United States Patent Application Publication US 2024/0327476 A1 - sequence listing, part 93

SEQ ID NO: 179527 - DNA, 1605 bp, synthetic construct
  misc_feature 1..1605: note = Description of Artificial Sequence: Synthetic coding sequence
  source 1..1605: mol_type = other DNA
atggacacccaggccggcagcgtggacgaggagaacggccggcagctaggagaggtcgagctccagtgtggaatctgtaccaaatggttcaccgccgatacctttgggatagataccagttcctgtcttccatttatgactaattactcctttcattgtaatgtctgccatcattctggcaacacctactttcttcggaagcaggcaaacctaaaggagatgtgcctctccgcattggcgaacctgacatggcagtcacgaactcaagatgaacatcctaaaactatgttctccaaggacaaagatatcatcccatttatcgacaagtactgggagtgtatgacaactcgccaaagacctggtaagatgacttggccaaacaacatcgtgaaaaccatgtcgaaggagcgggacgttttcttggtcaaggagcatccagatcctgggtccaaggatcccgaagaggactatcctaagttcggcctgcttgatcaggacctgtccaacatcggccccgcctacgataaccagaagcagtcaagtgctgtcagtaccagcggtaacctgaacggaggcatcgctgcaggcagctccggtaaaggacgcggggccaaacgaaaacaacaggatggcggcaccacaggaaccaccaagaaagcccgatcggaccccttgtttagcgcacaaagactcccccctcacggttatcccttggagcacccatttaataaggatggctatcggtatatcctggccgagcccgatccgcacgctccagatcctgagaagttggagttggattgttgggctggcaagcccatccccggcgatctctaccgggcatgcctgtacgagagagtgcttctggctctgcatgatcgcgccccgcagttgaaaatatcggatgaccgactgactgttgtaggggaaaaggggtattctatggttcgagcctctcatggagtccgaaagggggcttggtactttgaaatcactgtggacgagatgcctccagatacagccgccaggctgggctggtcgcagccattgggcaatttgcaagcccctcttgggtatgacaaattttcatactcttggcgctctaaaaaaggcaccaaatttcaccagtccatcggaaaacactattcttcaggatacggccagggggatgttctcgggttctacatcaacctgcctgaagatactgagacagccaagtctctgccagatacttataaggacaaggcgttgatcaaatttaagagttacctgtactttgaagagaaggactttgtggataaagcggagaaatctctcaaacagacaccacacagtgaaatcatcttctataaaaatggcgtgaaccagggtgtggcctacaaggacatctttgagggagtgtactttcccgctatctctctgtacaagtcatgcaccgtctcaattaattttgggccatgtttcaaatatccacctaaggatcttacatatagacccatgtccgatatgggatggggggctgtggtggagcatacactcgccgatgtcttgtatcacgttgaaacggaggttgacggtcgccgctccccaccttgggagccatag

SEQ ID NO: 179528 - DNA, 1506 bp, synthetic construct
  misc_feature 1..1506: note = Description of Artificial Sequence: Synthetic coding sequence
  source 1..1506: mol_type = other DNA
atggacacccaggccggcagcgtggacgaggagaacggccggcagttgggcgaggtggagctccagtgcggcatatgcaccaaatggtttactgctgacacattcgggattgacactagttcttgcctgccgttcatgacaaattattcatttcattgcaacgtgtgccaccactcaggtaatacctattttcttcggaagcaggccaatctcaaggagatgtgtctcagtgccctggccaaccttacatggcagtcacgcacccaagatgagcaccccaagaccatgttttctaaggacaaggacatcatccccttcattgacaaatactgggagtgcatgaccacgcgccagaggccgggtaaaatgacttggccgaacaacattgtaaaaaccatgtcaaaggaaagagatgtcttcctcgtgaaggaacatcctgatccaggatcaaaggatcccgaggaggactaccccaagtttggtctgctcgatcaggatctaagcaatattggtcccgcttatgacaatcaaaagcagtcttctgctgtaagcacctccggcaacctcaacggaggcatcgccgcaggttcctctggcaagggtcggggcgctaagcggaagcagcaggatggaggaacaacgggaaccacaaagaaggctaggagcgaccccctgttttccgcccaaagactcccccctcacggttatcctctggagcatccttttaataaggacggctatcgttacattctcgcagagccggaccctcacgcacccgatccagagaagctcgaactggattgctgggctggcaagccaatacctggcgacctctatcgggcttgtctttacgagagggtgctgctggccctgcacgaccgcgcgcctcaattaaagatttcagatgatcggttgaccgtcgttggcgaaaaaggttatagtatggtcagagcgtctcatggagttaggaagggtgcttggtatttcgaaatcactgtggacgagatgcctccggataccgcagcgaggttgggctggagtcagcccctaggcaaccttcaagcacccctggggtatgataagttctcttactcctggagaagcaagaaggggacaaaatttcatcagtctataggtaagcactattcttctggctacggccagggtgatgtgttaggcttttacattaatctgccggaggacacagaaaccgccaagtcactgcctgatacctataaggataaagctttgattaaatttaaaagctatctgtactttgaagaaaaagactttgtggacaaggccgagaagtctctcaaacagacgccgcacagcgaggtttcaataaatttcggcccctgtttcaagtacccccctaaggaccttacttaccggcctatgtcagacatgggctggggggcagtggtcgaacacacgctggccgatgttctgtaccacgtggagactgaagtcgatggccgaaggtccccgccatgggagccatag

SEQ ID NO: 179529 - DNA, 1470 bp, synthetic construct
  misc_feature 1..1470: note = Description of Artificial Sequence: Synthetic coding sequence
  source 1..1470: mol_type = other DNA
atgaccaactacagcttccactgcaacgtgtgccaccacagcggcaacacgtatttcttgcgcaagcaggcgaacctgaaagaaatgtgcttatccgctttagcaaacctgacatggcaaagcagaacacaagacgaacaccctaaaacgatgttttccaaagacaaagatataatcccattcattgacaaatattgggagtgcatgaccactcgtcaacgacccggtaagatgacctggccaaacaacatagtcaagaccatgtccaaagagagggacgtcttcctagttaaagagcaccctgacccagggagtaaggatcccgaggaggactaccctaagtttggtctgttggaccaagatctgagtaatattggcccagcatacgacaaccaaaagcagtcttcagcggtttcaacctctggtaacctgaacgggggcatcgcagccgggagtagcggaaaagggcgcggggctaagcgtaaacagcaggacgggggtacaactggcacaacaaaaaaggcaagatccgaccccctgtttagcgcacagaggttgcctcctcatgggtaccccctggagcacccctttaacaaagacggctatagatatattctggcagaaccagatccccatgcgcccgacccagagaagctggaactagattgctgggcgggtaaacccatccccggggatttgtaccgggcctgcctatacgaacgtgtgctcctggcccttcacgacagagcgccccagctgaaaatctcggatgaccgcttaaccgtggtcggcgagaaggggtacagcatggttcgcgcctcacatggagtgcgcaaaggtgcgtggtactttgaaatcaccgtcgatgaaatgcctcccgacacggccgcacggctgggctggtcccagcctctcggtaacttacaagctcctctcggttacgacaagttttcttactcctggcgcagcaagaaaggcaccaaatttcaccaatccattggaaagcattactcatcaggctacggacagggcgatgtcttgggcttctatataaacttaccagaggacaccgagactgctaagagccttcccgatacctacaaggacaaagccctgatcaagttcaagtcgtatctgtatttcgaagaaaaggactttgtggataaagccgaaaaatctctgaaacagacaccccatagtgagatcatcttttacaagaacggtgttaaccaaggtgtggcatataaagatatctttgagggagtctactttccagctattagtctgtacaagagttgtactgttagtattaatttcggcccatgcttcaagtatcctccaaaggatctgacataccggccgatgtccgatatgggatggggcgcggtggtagagcacaccctggccgatgtactttatcacgtggagactgaggtggacggacgtaggagccccccatgggagccttag

SEQ ID NO: 179530 - DNA, 876 bp, synthetic construct
  misc_feature 1..876: note = Description of Artificial Sequence: Synthetic coding sequence
  source 1..876: mol_type = other DNA
atgaccaaggagtaccaggacctgcagcacctggacaacgaggagtccgatcaccatcagttgagaaaaggacccccaccaccccagccactcctgcagagactgtgctccgggcccagactgctgctgctctccctaggcctgagcctgctcctgctcgtggtggtctgcgtgataggatcccaaaacagccagttacaggaggaacttaggggcttgcgggaaacttttagcaactttactgcaagcactgaggcccaggtgaagggattatctacccagggggggaatgttggccgaaagatgaagagtttggagtcgcagttagagaagcagcagaaagacctcagtgaggatcactccagtctgctcttacatgtcaaacaatttgtcagcgacctgaggtctctgagctgccagatggctgcacttcaaggcaatggctctgaaaggacatgctgccctgtgaactgggtggagcatgaacggtcatgctattggttctcacgtagtggaaaagcttgggcagatgctgataactactgtcgcctggaggatgctcacctggtcgtggttaccagctgggaagagcagaagtttgtgcagcaccacatcgggcccgtgaacacctggatggggctgcacgatcagaatggaccttggaaatgggttgatgggacagactacgagactgggtttaaaaattggagacccgaacagccagacgactggtacggacacggattgggcgggggcgaggattgtgcccatttcactgatgacgggcgttggaacgacgatgtgtgtcagcgcccatatagatgggtgtgtgagaccgagcttgataaagcttcccaggagcctcccctgttatag

SEQ ID NO: 179531 - DNA, 759 bp, synthetic construct
  misc_feature 1..759: note = Description of Artificial Sequence: Synthetic coding sequence
  source 1..759: mol_type = other DNA
atgaccaaggagtaccaggacctgcagcacctggacaacgaggagtcggaccatcatcaactgagaaaagacagccagctccaggaggaattgcgggggttacgagagacatttagtaactttaccgcctctacggaggcccaggtaaagggactgagtactcagggggggaacgttgggcggaagatgaaaagtctggagtctcagctggaaaaacagcagaaagatctgtccgaagaccactcctctctgctgttgcacgtgaaacagtttgtgagcgatttgcgatccttgtcctgccagatggccgcccttcagggcaatggatccgaaagaacatgctgtcccgtcaattgggtggagcacgaaagaagctgttattggtttagtagatcaggcaaggcctgggccgacgccgataactactgccgactggaggacgcccaccttgtggtggtgacctcatgggaggaacagaagttcgtccagcaccacattggcccagttaatacgtggatggggctgcacgatcagaacggcccttggaagtgggtcgacggcacggactacgaaacaggattcaaaaattggcggcctgagcaacccgatgattggtatgggcacgggttgggagggggggaagattgcgcccacttcacagacgatgggcgatggaatgacgatgtgtgtcaaaggccatacaggtgggtgtgcgagaccgagttggataaagcgagtcaggagccgcccctgctgtag

SEQ ID NO: 179532 - DNA, 759 bp, synthetic construct
  misc_feature 1..759: note = Description of Artificial Sequence: Synthetic coding sequence
  source 1..759: mol_type = other DNA
atgaccaaggagtaccaggacctgcagcacctggacaacgaggagtccgatcatcaccagctgcggaaggatagtcagctccaagaagagctgagaggcctcagagagactttttccaactttaccgcctctacagaggcacaggtgaagggactctccacccagggcggtaacgtgggacgcaagatgaagtccttggaatctcagctggaaaagcagcagaaggatctatccgaggatcacagttcactgctgttacacgttaagcagttcgtaagcgacctgcggtccctctcatgccagatggcggcgctacagggcaacggcagcgagcgaacctgctgtcccgttaattgggtcgagcatgaacgaagctgttattggttcagccggtctggcaaggcttgggccgacgcagataactactgcagacttgaagacgcccacctggttgtcgttacatcctgggaagagcagaagtttgtgcagcatcacattggacctgttaacacttggatgggtctccacgaccagaatgggccctggaagtgggtcgacggcaccgactacgaaacggggttcaagaattggagacccgaacagcctgacgactggtacgggcacgggctaggaggaggcgaggactgtgctcacttcacggatgacggcagatggaacgacgatgtgtgccaaaggccctatagatgggtatgcgagacagaactcgacaaggcatcccaggaaccccccctcctgtag

SEQ ID NO: 179533 - DNA, 5679 bp, synthetic construct
  misc_feature 1..5679: note = Description of Artificial Sequence: Synthetic coding sequence
  source 1..5679: mol_type = other DNA
atggccaaccggcgggtgggccggggctgctgggaggtgagccccaccgagcggaggcctcccgccggcttgcgcggccccgccgccgaggaagaagctagtagcccacctgtcctgagtctgtctcacttttgtcgcagccctttcctgtgctttggcgatgtgctgctcggggccagccgtacccttagcttagcactagataatccgaatgaggaggtggccgaggtgaagatctcacactttccggccgcggacctggggtttagcgtatcccagcggtgctttgttttacagcccaaagaaaaaatagtgatttccgtcaattggaccccccttaaagagggcagggtgcgggaaatcatgacatttcttgtgaatgacgtgctcaaacatcaggctatcttgcttggaaacgctgaggagcaaaaaaaaaagaaacgctccttatgggacacaatcaagaaaaagaaaatctccgcttcaacctcgcacaacaggcgcgtgagtaacatccaaaacgttaacaagaccttcagtgtgagtcagaaggtggacagggtgcgatcaccacttcaggcttgcgaaaacttagcgatgaatgaaggcggcccaccgactgaaaacaactcattaattctagaagagaacaagatcccaatttcccccatctcccccgctttcaatgagtgtcacggggctacttgtctgcccctgtcagtgcgacggtcaaccacatatagctctctccacgcctctgagaatcgtgaattactcaacgtgcattccgcaaacgtgagcaaagtatctttcaatgaaaaagccgtgaccgagacaagtttcaacagcgttaatgtaaatggtcagagaggggagaactcgaagctgagcctgactccaaactgctcttctaccctcaatattacccagtcacagatccactttctctctccggacagttttgttaataattcgcatggcgccaataacgagctggaactggttacctgcctcagttccgacatgtttatgaaggacaatagccagcctgtgcacctcgagtcgaccattgcccatgagatataccaaaaaatattgtcccccgacagctttatcaaagataattatggcttgaatcaggatctggagagtgagtccgtcaatcccatcctttccccaaatcagttcctgaaagacaacatggcctatatgtgcacttcgcaacaaacttgtaaagtgccgctgtccaacgagaattctcaggtccctcagtccccagaggactggaggaaaagcgaggtcagccccagaattccggagtgccagggcagcaagtctcccaaggccatctttgaggagctggtagaaatgaaatctaattattactctttcatcaagcagaataaccccaaattttctgcagtccaggacatctcctcccattctcacaacaagcagccaaagagaagacccattctttcggccaccgtcactaaacggaaggcgacctgcacccgcgagaatcagaccgaaatcaataaacctaaggctaaacgctgccttaattctgccgttggtgagcatgagaaggttatcaataaccagaaggaaaaggaagactttcatagttatcttccaatcatcgaccctatcctctcaaaaagtaaatcttacaagaacgaggtgacaccctccagcaccaccgccagcgttgcaaggaaacgaaagtctgatggaagtatggaagacgcaaatgtgagggtggcaattactgagcatacggaggtccgagaaattaaaagaatccacttttcccctagcgagcccaagacgagtgcagtgaagaagaccaaaaatgtgacaaccccaatttctaagagaatttccaacagggaaaaactgaacctcaaaaaaaaaaccgacttgtcaatcttccggacacctattagcaaaactaacaagcggaccaagcccatcatcgccgttgcgcagagttcactgacgttcatcaaaccattgaaaaccgacattcctaggcaccccatgccttttgctgcgaagaacatgttttacgacgagcgatggaaggagaaacaggagcagggctttacatggtggctgaatttcatcctgacccctgacgactttacagtgaaaaccaacatttcagaggtcaatgcagcgacccttctgctgggaatcgagaaccagcacaagatttccgtgcctagagcccccactaaagaagagatgtccttgagagcatacaccgctcgctgcagactgaatcgcttacggagagcggcgtgccgcttgttcacgtcagagaagatggttaaagccattaaaaaactggagattgaaattgaggcaagacggctgatcgtgcgcaaggacagacacttatggaaggacgtgggagagcgtcagaaggtactcaactggctgttgagttacaaccccctgtggttaaggatagggctcgagacaacatacggagagttgataagtttagaggacaatagtgacgtcaccggactcgcaatgttcatactcaatcgactgctttggaacccggatattgccgccgaatacagacacccaactgtgccccatctctaccgggacggccacgaggaggcactgagtaaatttacgctcaagaagttactactcctggtttgctttctcgactacgccaagatatctcgtctgattgaccacgatccatgcctcttttgtaaggacgctgaattcaaggctagcaaagagatcctgttagctttttcccgtgacttcctgtccggcgagggcgatctaagcagacatcttggcctgctaggacttcccgtgaatcacgtccagaccccgttcgacgagttcgattttgcagtcacaaatctggcggttgacctgcaatgcggcgtgcggctggtgcgtaccatggaactacttacacaaaactgggatttaagtaaaaagctaagaatccctgctataagccggctccaaaaaatgcacaatgtcgacattgtactgcaggttctcaagagtcgcggaatagagcttagcgacgagcatggaaataccatcctgtcgaaggacattgttgaccgacaccgcgagaagaccctgcgtctactttggaagatcgcatttgccttccaagtggacatttctctgaacctcgaccagttaaaggaggaaattgcgttcctgaagcatacaaaaagtataaagaaaaccatttctctcctttcatgtcacagcgatgacctaattaacaaaaagaagggaaagagagattcaggcagctttgagcagtactcagaaaacattaaattacttatggattgggtcaacgcagtttgtgccttctacaataagaaagtggaaaacttcaccgtgtctttttccgacggtagagtgctttgctatctgatccaccactaccatccttgttatgtcccatttgatgctatatgccagcgcactacccagacagtagaatgtacccagactggctcggttgtgctgaattcgtcatccgaatcagatgattcatccctggatatgtccctgaaagcttttgaccacgagaacacctctgagctgtacaaagagcttcttgagaatgaaaaaaaaaattttcacctggtgagatctgccgtgagagacctaggcggaatacctgccatgatcaatcactctgacatgagtaacacaattcccgatgagaaggtggttatcacctacttgagtttcctgtgtgcccgactgctggacctccgcaaagagatccgcgccgcgcgcttgattcagacaacctggcgcaaatacaaacttaagaccgacttaaagcggcatcaggagcgggagaaggccgcaaggattatccagctcgctgtcataaacttcctggcaaagcagcggttgcgcaagcgtgtgaatgctgcgctggttatccaaaagtattggagacgggtgctggcgcagcgcaagctgctgatgctgaagaaagaaaaattggagaaggttcagaataaggccgcctccctgattcaagcaatgtggcggagataccgcgcaaagaaatacctatgtaaggtgaaggccgcttgtaaaatacaggcctggtacagatgctggcgcgcacacaaggagtatctggctattctgaaggccgtgaaaattattcagggctgtttctatactaagctggagcgtacaagattcttaaatgtacgcgcaagcgctattattatccaaaggaaatggagggcaatactgcccgctaagatagcgcacgagcacttcctcatgatcaagaggcatagagccgcctgccttattcaggcccattaccgggggtacaaaggccggcaggtgttcctgcggcagaaatccgccgcccttatcatccagaaatatattagagcacgcgaagcaggtaaacacgagcgaatcaagtacatagagttcaaaaaatccacagtgatcctccaggccctggtgaggggctggctcgtgagaaaaagattcctggagcagagagccaagatccgtctgctccatttcacggcggccgcttattaccacctgaacgccgtgcgcattcagcgtgcatataagctttatctcgccgtgaaaaatgcgaacaaacaagtgaacagcgtcatttgcatccagcggtggttcagagctcggctccaggagaagagattcatacagaagtatcactccatcaagaaaatcgagcacgagggccaggagtgtctgtcccagaggaatcgggccgcaagtgttatccagaaggctgtgagacattttctgcttcggaaaaagcaggaaaagttcacatcagggattatcaaaatccaggccttgtggagggggtattcttggcggaaaaagaatgactgtaccaagataaaagcgatccgtcttagcctccaggtggtcaaccgagaaatccgggaagagaacaagctgtataaacgcaccgcgctcgccttgcattacctgcttacctataaacacttgtccgccatcctggaggctctgaaacacttggaagtggtgacccgactgtctcccctgtgttgtgagaacatggctcagtctggtgctatttctaaaatctttgtgctgatccgcagctgtaaccgatccatcccttgcatggaagtgatcaggtatgccgtgcaggtcctcctgaacgtgtctaagtacgagaaaaccacatcagcggtttacgatgtggaaaactgtattgacatactcctggaactgctacagatatatagagagaagcccggcaacaaagttgcagataaaggaggcagtatctttactaaaacctgttgcttgttagccatcttgttgaagaccactaatcgagcaagcgacgtgagatcccgcagcaaggtcgtggatcggatctattctttgtataagttgacagcacacaaacataaaatgaacacagagcgaatcctgtataagcagaagaaaaattctagcattagtattcccttcatccccgaaacgcctgtccgaacaagaatcgtgtccagattgaaacccgattgggtgctgcgacgtgacaatatggaggaaatcactaatccactacaggccattcaaatggtaatggatacactggggataccttattag

SEQ ID NO: 179534 - DNA, 4170 bp, synthetic construct
  misc_feature 1..4170: note = Description of Artificial Sequence: Synthetic coding sequence
  source 1..4170: mol_type = other DNA
atggccaaccggcgggtgggccggggctgctgggaggtgagccccaccgagcggcggccacccgccggacttcgagggccagcagctgaggaagaagccagttcccctcctgtgttgagtctgtctcatttttgtcgatctccgtttttatgcttcggggacgtactgttgggagccagccgtaccctctcgttggctcttgataatcctaacgaagaagtcgctgaggtgaagatctctcattttcccgcagcagacctcggcttcagcgtttctcagaggtgcttcgtcttgcagcctaaggaaaagattgtaattagtgtcaattggaccccactgaaagaaggacgtgtgagagagatcatgacttttctagtgaacgacgtgctgaaacatcaggccattctgctcggaaatgccgaggaacagaaaaaaaagaagcgatccctctgggacaccattaaaaagaagaagatttccgctagcacatctcataatcgccgggtcagcaacatccaaaatgtgaacaagacattttcagtctcgcagaaagttgatagaaggtatcggcagcagacatacttcaacaaactgaaaaaaatcactaaaactgtgcaacagagatactgggcaatgaaggaacgaaacattcagtttcagcgctacaacaagctacgccactcagtcatctatatccaggccatcttcaggggaaagaaggcccggagacacctgaagatgatgcacattgctgctaccttgatccaacgtagatttcggaccctgatgatgagacggcgttttctgagccttaagaagaccgccatcttgattcagcggaagtacagagctcacttatgcacaaagcatcatcttcagttcctgcaggtgcagaacgcagttatcaaaattcagtcatcttacaggcggtggatgattagaaagagaatgcgcgagatgcatagagctgcaactttcatccagagcacctttagaatgcatcgtcttcacatgaggtatcaggccctgaagcaggcgtctgtggttatccagcagcagtaccaggcaaaccgggccgcaaagctgcagcgtcagcactatctgcgccagaggcatagtgctgtgattctgcaggcagcgtttagaggaatgaagacccggaggcatctgaaatcaatgcactccagcgctactttaattcaatctagattccgctcacttctcgtacgcaggcgtttcatatctctgaagaaggcaaccatcttcgttcagagaaagtatcgcgccactatctgcgcaaaacacaagctgtaccagtttctacacctgcgcaaagccgcaatcaccatacagtctagctacagaagacttatggtgaaaaaaaagctgcaggaaatgcaacgagcagctgtacttatccaggcaacatttaggatgtacagaacatacatcactttccagacttggaagcatgcttccatcctgatccagcagcattacagaacctaccgagctgcaaagctccaacgggaaaattatatccggcagtggcactccgcagtcgtcattcaggcagcttataagggtatgaaggccagacagcttctgcgcgaaaaacacaaagcaagtattgttattcagagcacctaccgtatgtacagacagtattgcttctaccaaaagctgcagtgggcgactaagatcattcaggagaagtatagagctaataaaaaaaaacaaaaggtcttccaacataacgaactgaagaaagaaacctgcgtgcaggctggttttcaggacatgaacatcaaaaaacaaattcaggagcagcaccaggccgctatcatcatacagaaacactgtaaggcgtttaaaatacgtaaacattatctacatctcagggccactgtagtgtccatccagcgtagataccgtaagctgactgcagtgcgcactcaggccgtgatatgtatccagtcatactaccggggctttaaagtgaggaaggatatccagaatatgcacagggcggccaccctcatacagtccttttaccgtatgcatcgggctaaagtggactatgagacaaagaaaaccgcaatagttgttatccagaattattacaggctctatgtgagagtgaaaaccgagcgaaagaattttctggctgttcagaaatccgtgaggactattcaggcggcttttcgaggaatgaaggtgcgacagaagctcaaaaacgttagtgaggaaaaaatggccgcaattgtgaatcagtctgcactgtgctgctaccgaagtaagacacagtacgaagctgtgcagagcgagggggtcatgatacaagagtggtacaaggcttcggggcttgcatgctcccaggaggccgagtatcacagtcagtcaagggccgctgtaactatacaaaaagccttctgcagaatggttacacgcaagctagagacccaaaaatgcgccgcccttcgtattcagttttttctccaaatggccgtgtatagaaggcgattcgtgcagcagaagagagccgctattaccttacagcactattttagaacatggcagactaggaaacagttcctgttatacaggaaggcggctgtagtgctccagaaccattatagggcctttctcagcgccaagcaccaacgccaggtctatctgcagattagatctagtgtcataatcattcaagctcgatcgaagggcttcatccagaaacggaagtttcaggagatcaaaaatagcacaattaagatccaggctatgtggcgaaggtacagagccaaaaaatacctctgtaaggtgaaagccgcctgcaagattcaggcgtggtatagatgttggcgagcacataaagagtatttagccatccttaaagccgtcaaaataattcagggttgcttctataccaaactagaacggacgagatttctcaacgtccgagcaagcgcaatcattatccagaggaaatggagggctatcctacctgctaagattgcccatgagcatttcttaatgattaagcgccaccgggccgcatgtctcatccaggcccactacagaggctataaagggcgtcaagttttcctgcgccagaagagcgccgctctgattatccagaaatatatcagagcccgcgaagccggcaagcatgaacggataaagtacatcgaatttaagaaatccacagtaattctgcaggcgctcgtccggggatggcttgtccgcaagcgcttccttgaacagagagcaaaaatcaggctcctccactttaccgccgctgcctactatcatcttaacgctgttcggatccaacgggcttataagttgtacctcgccgttaaaaatgctaacaaacaggtcaatagcgtcatctgtattcagcgctggtttagagccagactgcaagaaaagcgctttatccagaagtatcattccattaagaagatcgagcacgaaggccaggagtgtctttctcagcgaaaccgggccgcaagcgtgattcagaaagccgtgaggcatttccttctccggaaaaagcaggagaaatttacctctggaataattaagatacaggctctgtggagggggtattcctggcgtaagaagaacgactgtaccaaaattaaagccattcgcctgagtttgcaggtcgtgaacagggaaattagggaagaaaacaaactatacaaacgtactgccctggcactgcattacttgttgacctacaaacatctttcagccatactggaagcactgaagcatctcgaagtcgtgacccgcctctcacccctttgctgcgagaacatggcgcaaagcggagctatctccaagatattcgtgctcataaggtcgtgtaatcgctccatcccttgcatggaggttatcaggtatgcagtccaggtcctgttgaacgtaagcaaatacgaaaaaactacatccgcagtctacgatgtagaaaactgtattgatatactgctcgagctgctccaaatttaccgggaaaagcccgggaacaaagtggcagataagggagggtctatcttcacaaaaacttgctgcctgctcgcaatcctgctgaaaactaccaacagagcctcagttagcataagccagttgcctttcttcaagattatctttttgtggtcctag

SEQ ID NO: 179535 - DNA, 3429 bp, synthetic construct
  misc_feature 1..3429: note = Description of Artificial Sequence: Synthetic coding sequence
  source 1..3429: mol_type = other DNA
atgagcctgcgggcctacaccgcccggtgccggctgaaccggctgcggagggccgcctgtagacttttcaccagtgaaaagatggtgaaggctatcaaaaaactcgagatcgagatcgaagcacgcaggttaattgtccgcaaagataggcacctatggaaggacgtgggcgagagacaaaaagtcctcaattggctgctgagctacaaccctctgtggttaaggatagggctagagacaacgtacggtgagctaatcagtctcgaggacaattctgatgttactggccttgcaatgtttatcctcaatagactcctgtggaatcccgatattgctgctgagtaccgccatcccactgtcccgcatctgtaccgggacgggcacgaggaagcgctcagtaagtttacactgaagaaactcttactgttggtatgttttctggattacgcaaaaatctcaagacttattgatcacgacccctgtctcttttgtaaagacgctgagttcaaagcctcgaaggagatccttctggcttttagtcgcgactttctttcaggggaaggtgacttgagtaggcaccttggcctgctggggctgccagtaaaccatgtgcagacaccttttgacgagttcgattttgctgtaaccaacctggccgtggatttacagtgcggtgttagactggttaggaccatggaactgctgacccagaactgggacctgagcaaaaaacttagaatacccgccattagcaggctacagaagatgcataacgtcgacatcgtgctccaggtgttgaaaagccggggtatcgaactctccgatgagcacgggaacaccattctgtccaaagatattgtggacagacacagagagaaaactctgcgcctcctctggaagatagccttcgcctttcaggtggatatttctttaaacctggaccagctcaaagaagagattgcctttctgaaacacaccaaatcgataaaaaaaaccatctctttgctgagttgtcattcagatgatctcattaacaaaaaaaaaggtaagagagatagtggctctttcgagcagtactctgagaacatcaagctcctgatggactgggtgaacgcagtatgcgccttttataacaagaaagtggagaacttcactgtgtcttttagcgatgggcgggtgctgtgttatctgatccaccactaccacccttgctatgtcccctttgacgctatttgtcaaaggacaacccagacagtcgaatgtacccaaaccgggtcagttgtcctcaatagtagttctgagtccgatgacagctcacttgatatgtctctcaaggcgttcgatcacgagaatacgtctgaactgtacaaggagcttctcgaaaatgagaaaaaaaattttcatctcgtgcgatcagcggtaagagatcttggcggcatccctgcaatgattaatcactctgacatgagcaatactatccctgacgagaaggtggtgatcacctacctgtcgtttctttgtgcccgcctgttggatctgaggaaagagattagggccgcaagactcatacaaaccacctggaggaagtacaagctcaaaacagaccttaagaggcaccaggagagagaaaaagccgcccgcatcatccagctagctgtgatcaactttctagccaagcagaggctaaggaagcgggttaacgctgccctagtgatccagaaatactggcgacgtgtgctcgcgcagcgcaagcttctgatgcttaaaaaagagaagctagagaaagtccagaataaggctgccagtctgatccaggctatgtggcgtaggtacagggccaagaaatacctgtgcaaggtgaaggctgcatgcaaaattcaggcttggtaccggtgctggcgggcccataaggagtacctggctatcctcaaagctgttaaaatcatacaggggtgtttctacaccaagcttgagcgaactcgcttcttaaatgtgcgagccagtgccattattatacagcggaaatggcgggctattttgccagcgaaaatcgcacatgagcatttcctgatgatcaaaagacacagggcagcgtgcttgatccaggcccactacagagggtacaaaggtcgccaggtcttcttgagacaaaaatctgccgccctcattatccagaaatacatacgggcccgtgaggcaggtaagcacgagcgcataaagtacattgagttcaaaaaaagtaccgtgatcctccaggctttagttcggggctggttggtgaggaaaagattcctagagcaaagagccaagatccggctgctgcattttaccgcagccgcttactaccatctgaacgcagttcggatccagagagcctacaaactgtatctggccgtaaagaacgcgaataaacaggtgaatagcgttatttgcattcagagatggttccgtgcacgattacaggagaaaaggtttatacagaaataccacagtatcaaaaagatagaacacgaggggcaagagtgtctgtctcaaagaaaccgcgctgcaagtgtaatacagaaagcggtccggcacttcttactgcggaaaaaacaggagaagtttacaagcgggatcatcaagatccaggcattatggcgcggctacagctggcggaaaaaaaatgactgtacaaagattaaagcaatcagactgagtcttcaggtagtgaacagggaaattcgggaggagaataagctgtacaagcggaccgcactggcgctgcactatctcctgacttataagcacctgagcgccattcttgaggcactcaagcatctcgaggtggttacacgccttagcccactctgctgcgagaatatggcccaatctggagctatctcgaagattttcgtcctgatcaggtcttgcaaccgaagtattccttgtatggaagtgattcgatatgccgtgcaggtactcctgaatgtgagtaagtatgaaaaaacaacatccgctgtgtacgacgtggagaattgcattgacatcctgctagagttattgcaaatctacagggagaagccagggaataaagtggccgacaagggcggttccatcttcactaaaacctgttgtttgcttgcgatcctgctgaagacaacaaatcgggcgtccgatgtgaggagtcgtagcaaagtagtggatcggatttattctctttacaagctgacagcacacaaacacaagatgaacacagagagaattctgtacaaacaaaagaagaactcaagtatctctataccatttatcccagaaacccccgtcaggactcgaattgttagccgcctcaagcctgactgggtcctaagaagagataatatggaggagataaccaatccgctgcaggcaatccagatggtaatggataccttagggatcccctactag

SEQ ID NO: 179536 - DNA, 10434 bp, synthetic construct
  misc_feature 1..10434: note = Description of Artificial Sequence: Synthetic coding sequence
  source 1..10434: mol_type = other DNA
atggccaaccggcgggtgggccggggctgctgggaggtgagccccaccgagaggagaccccctgccggactccgggggcccgctgccgaggaggaggcttcttctcccccagtattgtctctaagtcacttttgtcgctctccgttcctatgcttcggggacgtcctcctgggcgccagcagaactctctccctggccctggacaatcccaatgaagaggttgctgaggtgaagataagtcactttcctgctgccgacctaggcttttccgtgagccaaaggtgcttcgtgcttcagcctaaggagaagatcgtgatcagcgtaaattggacccctctcaaagaaggaagggtacgggaaattatgacctttctggtaaatgacgtactaaaacaccaggccatactccttggcaatgcagaggaacagaaaaagaaaaaacgaagcttatgggatactatcaaaaaaaaaaagatttcggccagtactagccataataggcgcgtgtccaatatccagaacgttaacaagacattttcagtcagtcaaaaagtagatcgggtaaggtcacctctgcaggcttgtgagaacctggccatgaacgaggggggaccacctactgaaaataactcactcattttggaagagaataaaataccaatctcaccaataagtcctgcgtttaatgagtgtcatggagcaacttgcttgcctctttccgttcggcgaagcacaacttactcctctcttcacgcctcagagaatagagagctgctgaacgtacatagtgccaacgtttctaaagtgagcttcaatgaaaaagcggtgactgagacctccttcaacagcgtcaatgtgaacggtcaacgcggcgagaattcaaaactgtccctcacacccaattgctcatccaccctgaacatcacgcaaagccagatccactttctgagtcctgattcattcgtgaataactcacacggcgccaataatgaactcgaactggtgacgtgcctgtcttccgatatgttcatgaaagataacagccagccggttcacctcgaaagcacgatcgctcacgaaatctaccaaaaaattctgagtcctgactcatttattaaggataactacggcctgaatcaagacttggagagcgaaagtgtgaatcccatattgtctcctaatcagttcctcaaggataacatggcatacatgtgtaccagccaacaaacttgcaaggtcccactttccaatgagaatagccaggtcccacaatctcctgaggattggcgaaaatccgaggtatctccccgcatccctgaatgtcaaggctctaaaagtcctaaggctatctttgaggagttggtcgagatgaagtcaaattattactcatttataaaacaaaataatccaaagttcagtgcagtacaagatatttcatctcattcccataacaagcagccaaagcggaggcccatcctcagcgccaccgttactaagagaaaggccacgtgtaccagggagaatcagaccgaaattaataagcccaaggcaaaacggtgtcttaactcagcggttggcgagcacgagaaggtaataaacaaccagaaggaaaaggaggacttccattcatacctgccgatcattgatcctatactgtcaaaaagtaagtcatataagaatgaggtcactccatcctcaacaactgcctccgtcgcccggaaaagaaaaagcgacggatccatggaagacgcgaacgtcagagtggccattacggagcatactgaggtaagggagattaaacgtatccacttcagtccttccgagccgaaaacatcagcagtgaaaaaaactaagaacgtgactaccccaatttccaagcggattagcaatcgagaaaagcttaatctgaaaaaaaagaccgacctgtccatctttcgcactccgattagcaagactaacaagcgcacaaaacctataattgcagtggctcagtcaagtcttacctttatcaagccattaaagaccgatattccaaggcacccgatgcccttcgccgctaagaacatgttctatgatgaaagatggaaggaaaagcaagagcagggcttcacttggtggcttaacttcatcctgacacctgatgattttaccgtcaaaacaaacatcagtgaggttaacgccgctacactattgctgggcatagaaaatcaacataaaattagcgtgccacgggcccccaccaaagaggaaatgagccttcgggcctacacagctaggtgcagactgaacaggctccgtagagcagcatgccgcctttttaccagtgagaagatggttaaagccattaagaaattggagatcgagatcgaggctcggcgactgatcgtccggaaagacagacatctgtggaaggatgtgggggagagacaaaaggtgctgaattggctgctgtcttacaatcctttatggttgcgcattggactcgagaccacatacggcgagttgataagccttgaggataattccgacgtgacagggctcgccatgttcatccttaataggctgctgtggaaccccgatattgctgccgagtaccgtcatcccacggtgccgcacctctaccgcgatggtcacgaagaggccctgtctaagttcacccttaagaagttactactgctggtgtgcttcctagattacgccaagattagcagactgatcgatcatgatccctgtttgttttgcaaggacgcagaattcaaggcaagtaaggagattctgcttgccttttctcgcgactttctgtccggtgaaggcgacctctcacggcatcttgggctgttaggactgcctgttaatcacgtgcagacacccttcgacgagttcgacttcgctgtcaccaatctggcggtcgaccttcagtgcggagtgaggctagttcgcacaatggagctgctcactcagaactgggatttgtccaagaaactgagaattcccgccatttcacgtctacaaaaaatgcacaatgtggatatcgtactgcaggtgctaaagagcaggggcattgaactgagtgatgagcacggtaataccatcttgtcaaaggacatcgtagaccggcaccgggagaaaaccctccgcctcctgtggaagatcgccttcgcttttcaagtagatatatccctgaatctggaccagctaaaagaggagatcgccttcctgaaacacactaagagtatcaaaaaaacaataagtctcttgtcttgccattcagacgatctcattaataaaaaaaagggcaaacgagacagcggtagctttgagcagtattccgaaaatatcaaactgctgatggactgggtaaatgctgtgtgtgccttttacaacaagaaggtggagaacttcacagtgtcattctctgatggcagggtactgtgctatctgattcatcattatcatccatgctacgtgccttttgatgccatctgtcagcgaacgacacagaccgtggagtgtacacagaccggctccgtagtcttgaactcctccagtgagtccgatgacagcagcctggatatgagcctgaaagcctttgaccacgaaaacacgtcagaactgtacaaggagctactagagaatgagaagaaaaatttccatctggtgcgctcagctgttcgcgacctgggcggaattccggccatgattaaccattctgatatgtccaacactatacccgatgagaaagtggtcatcacttacctctccttcctctgtgcccgcctgctggacttgcgtaaagagattcgtgcggccaggctaatccagacgacatggagaaagtataagctgaaaactgaccttaaacggcatcaggagcgagagaaagctgcaaggatcatccaacttgccgttatcaattttctggcgaagcagaggctgcgtaaacgggtgaacgcggcactggttattcagaaatactggcgtcgggtcctagctcagcgtaaactattgatgctaaagaaagagaaactcgagaaagtgcagaataaggctgcttccctgattcaaggctactggcgccgctacagtaccagacagagatttctcaagctcaagtactacagcatcatcctgcagtctcggattaggatgatcattgcggtgacatcctacaagcgctatctgtgggctaccgtaacgatccaaagacattggagagcctatttaagacggaagcaggaccagcaacggtacgagatgctcaagtcttcgactcttataatacaatctatgttcaggaaatggaagcagagaaagatgcaaagccaggtaaaggccacagtcatcctacagcgagcctttagggaatggcacttgcggaagcaagcgaaggaagagaacagtgcaatcatcatccagagctggtatagaatgcacaaagaattaagaaaatacatatatattcgctcttgcgtggtgatcatccaaaagagattccgatgctttcaggcacagaaactgtataaacgcaggaaggagtccattttaactatccagaaatattacaaggcgtacctgaagggcaagatcgagaggaccaactaccttcagaaaagggcagcagctatccagttacaggctgcattccgtcggttaaaggcccacaatttgtgccgtcagattcgtgccgcatgcgtcatccagtcgtattggagaatgagacaggacagggtgcggttcctcaacctcaaaaagactatcatcaaatttcaggcacacgttaggaagcaccagcagcggcagaaatataagaaaatgaagaaggctgctgtgattattcaaacccatttccgtgcctacatttttgcaatgaaagtcttggccagttaccagaagactcgctccgctgtgattgtgttgcaaagtgcatatcgaggaatgcaggctcgtaaaatgtacatccatattcttaccagcgttattaagatccaaagctattacagagcttatgtgagcaagaaagaattcctgagcctcaaaaacgcgactatcaaacttcagtccacagtcaagatgaaacagacaaggaaacagtacctgcacttgcgtgcagctgcacttttcatccaacagtgctaccgctccaagaagatcgcagcccagaaaagggaggagtacatgcagatgcgcgaaagctgcatcaagctccaggcctttgtgcgaggatacttagtgcggaaacagatgaggttacagcgcaaagctgttatatccctacagtcctacttcaggatgaggaaagcacggcagtactacctcaaaatgtacaaggccatcatagttatccagaattactatcatgcctacaaagcacaagttaatcagagaaaaaactttctgcaagtgaagaaggccgcaacatgtttacaagcagcgtacaggggttacaaggttcggcaacttataaagcagcagagcatcgccgcgctcaaaattcagtccgcattccggggctacaataaacgggtgaagtaccagtctgtcctccaaagcattatcaagatccaaaggtggtacagagcctacaagacgttgcatgatacccgcactcattttttgaaaaccaaggcagcggtgatctcccttcagtccgcatatcgtggctggaaagttaggaaacaaattcgaagagagcaccaggcggcattaaagatccagagtgcctttcgcatggccaaagctcagaaacagtttcgtttgttcaagaccgcagcattagtgattcagcagaattttcgtgcctggacagccgggcgtaaacagtgtatggagtatatagaattgaggcacgctgtattagtactccaaagcatgtggaagggaaaaactctccgtcgtcagctccagagacagcataaatgtgccatcataatccagagctactaccggatgcacgtccagcagaaaaaatggaaaatcatgaaaaaggctgccctgttaatccagaagtactatagagcatattctattggaagggagcaaaaccacttgtatttaaagaccaaggccgccgtcgttacacttcagtccgcctacagaggtatgaaggtgcggaaacgaattaaagattgtaacaaagctgctgttaccatccagtctaagtatcgggcctataagactaaaaagaagtatgccacatacagagcttctgctattattatccagaggtggtacagagggattaaaatcaccaaccaccagcacaaagagtacttgaatttgaagaagacagccattaagatacagtctgtttaccggggcattagagttcggagacacatccaacacatgcatagagccgccacctttatcaaagcaatgtttaaaatgcatcagtcccgtatatcctaccacactatgcgcaaagcagcaatcgttatacaagtgaggtgtagggcctactaccaaggaaagatgcagcgggagaagtatctgaccatcctcaaggctgtgaaggtactacaagcatcctttcggggtgtgcgcgtcagacgtactctgagaaaaatgcagacagctgctaccctaatccaaagcaactatcggaggtatagacagcagacctattttaacaaactgaagaagataactaaaactgtgcagcaaaggtactgggctatgaaggaacgaaacattcaattccagcggtataacaagcttcgacactctgttatttatatccaggctattttccggggtaagaaggctagacgccaccttaaaatgatgcacatcgctgcgactcttattcagcgccgattcagaacattgatgatgaggcggaggttcttgagtctgaagaaaaccgctattctgattcagaggaagtaccgcgctcacctctgcaccaaacaccacttacagtttctccaggtgcagaacgccgtcatcaaaatccagagcagctacagaagatggatgattcggaagcggatgagagagatgcacagggcggccacctttattcagtcgacattccgcatgcaccgactgcacatgcggtatcaagccctcaagcaggctagcgtggtaatacagcaacagtaccaagccaatagagctgcaaaactgcagcgacaacattatctgaggcaacggcactctgcagtgattctgcaggctgcttttcgcggcatgaagactcggcgacacctgaaaagtatgcattcatctgctacccttatacagagccgttttcggtctttgctggtgcgcaggaggtttatctccctcaagaaagccacaatcttcgttcagcgtaaataccgcgcaactatttgtgccaagcacaagttgtaccaattcctgcacctgagaaaggcggccattacaatacagagcagctataggcgcctaatggtgaaaaagaaattgcaggagatgcagcgggctgctgtcctgattcaggctaccttccgtatgtaccgaacctacatcacatttcaaacttggaaacatgcgtccattctgattcagcagcactaccgcacctatcgcgctgctaagctgcagcgggagaattacattagacagtggcattctgctgtcgttatccaggccgcttataaaggtatgaaggcccgacagctgctccgtgaaaagcataaagcctccattgtgatacaaagcacttacagaatgtaccgccagtactgtttctaccagaagctgcagtgggcaaccaagatcatccaggagaagtatagagctaacaaaaaaaagcagaaagtgttccaacacaatgagctcaaaaaggagacatgcgttcaggcgggtttccaggacatgaatatcaagaagcaaatccaggagcagcaccaggctgcaattatcatacagaaacattgcaaggcttttaagataaggaaacattatttacacttacgcgctacggtcgtgtcgattcagagaagataccggaagctgaccgctgtgaggacacaggcagtcatctgtattcagtcctactacagagggttcaaggtgcgcaaagatattcagaatatgcatagggcggcaacactcatccaaagtttctatagaatgcaccgcgctaaggtggattatgagaccaaaaaaaccgccatagtggtgatacaaaactactaccgcctgtacgtgcgagttaaaaccgaaagaaagaacttccttgccgtccagaagtccgtgagaacaatccaggctgctttccgcgggatgaaagtgcgacagaagttaaaaaatgtgtctgaggagaagatggcagctatcgttaatcagtccgctctgtgctgctatcgctctaagactcaatatgaagcagttcaaagcgaaggagtcatgatccaagaatggtacaaggcatcggggctggcttgtagccaggaggcggagtaccactctcaaagtcgtgctgcagtcactatccagaaggccttctgcagaatggtgacaaggaagttagaaacacagaagtgcgccgccctcaggattcaattttttctgcagatggcagtgtaccgtcggaggttcgtccagcaaaagagagctgcaattacccttcagcactactttaggacttggcagacaagaaagcagttcctgttatacagaaaagccgccgtggtactgcaaaaccattatagggccttcctctctgcaaaacatcaacgccaagtgtacttgcagatacggagtagtgtgatcattatacaagcccggagcaaaggttttatacaaaagcggaagtttcaggagattaaaaattcaacaattaaaatccaggctatgtggcggagatacagagcaaagaaatatctgtgcaaggtgaaggcggcctgtaagatccaggcatggtataggtgttggagagcccataaggagtacctggctatcctgaaggctgtcaaaattatacaaggctgtttctacaccaaactggagcgaactagatttctgaatgtccgagcctccgctatcatcatccaacgcaagtggcgggccattcttcctgctaagatagcccacgagcatttcctgatgattaagcgccacagggccgcctgcctcatacaagcccactaccgcgggtacaagggacggcaggtcttcctacggcagaaatcagcagctctgattatccagaaatacattcgtgccagagaagcagggaaacacgaaaggatcaaatatatcgagtttaagaagtcaaccgtgattctccaagcactggttcgcgggtggctggtgaggaagcgcttcctcgaacagagggccaaaattaggttactgcacttcaccgccgccgcctattaccaccttaacgccgtccggattcagcgtgcttacaagttgtaccttgccgttaagaacgccaataagcaggtgaacagtgtgatctgtattcagaggtggttcagggctcgtcttcaggagaagcgattcatccagaaatatcacagtatcaagaaaatcgagcatgaaggccaggagtgcctgtctcaaaggaacagagcggcctccgttattcagaaagcggtgcgtcattttctgctgcgaaagaagcaggaaaaattcacatctggcatcattaagattcaggctctgtggaggggctattcctggcgcaaaaagaatgattgtactaaaatcaaggccatcagattgagcctgcaggtggtcaacagagagatacgcgaggaaaataagctctataaacgaaccgccctggcgctccattacctcctcacttacaagcacctgagtgccatcctcgaggccttaaagcatctcgaagttgttacccgtctgtcgccactttgttgcgagaacatggctcagagtggagccatttcaaaaatctttgtccttatcaggtcctgtaaccgttccatcccatgcatggaggtgattagatacgccgtgcaggtacttctcaacgtgagtaagtatgaaaagactaccagtgctgtgtatgacgtcgagaactgtatcgacattttgctagagctgctccagatttaccgggagaaacctggaaataaagtggccgataaaggtggctcaatcttcaccaagacctgctgtctgttggctattttactgaagactacaaaccgagcctccgatgtgagatcgagaagcaaggttgttgaccgaatctacagcctgtacaagctgacagctcataagcataagatgaataccgagcgcatcctctataagcagaaaaagaattcatcaatctcaatcccattcatcccagagaccccagtgagaaccaggattgtctcaagactgaaacccgattgggtcctcagaagagataacatggaggaaatcaccaaccccttgcaggccattcagatggtgatggacaccctaggcattccatattag

SEQ ID NO: 179537 - DNA, 1686 bp, synthetic construct
  misc_feature 1..1686: note = Description of Artificial Sequence: Synthetic coding sequence
  source 1..1686: mol_type = other DNA
atgtgcggcatctgggccctgttcggcagcgacgactgcctgagcgtccaatgtttatccgccatgaagatcgcccatagggggcccgacgctttcagattcgagaacgtgaatggatacaccaactgttgctttgggttccacaggcttgcagtcgttgatcccttgtttggaatgcagcccatcagagtgaagaaatatccttatctatggctatgctataacggggagatttacaatcacaagaagatgcagcagcattttgagtttgagtatcagacgaaagttgatggggagatcattctgcatctgtacgacaaagggggcattgagcagacgatctgcatgctagatggagtcttcgccttcgtgctgctggacactgctaataaaaaggtgtttcttggccgagacacctacggcgttaggcctctattcaaggccatgactgaggatggtttcctcgcggtatgtagcgaggccaagggattggtgacactcaaacatagtgcaacaccttttctgaaagtagagccttttctgcccgggcactatgaggttctggatctgaaaccaaacggcaaagtggcatcagtcgaaatggtcaagtaccaccattgccgggacgtccctctgcacgcactttatgataatgttgaaaaactcttcccaggcttcgagatcgaaacggtaaagaacaacctgaggatattatttaacaatgctgtcaagaagagattgatgacagatagaagaattggatgcctgttgtctggtggactggacagctctctcgttgccgcgacactgttaaagcagttgaaggaggcccaggtccagtatcccctgcaaaccttcgccattggtatggaagattcccccgacttgttggccgctcggaaagttgccgatcacattgggagtgagcattacgaagttctgttcaactccgaggagggcattcaggccctcgatgaggtgatcttctcactggagacctatgacatcacaaccgtgcgagcttccgtcgggatgtaccttattagcaaatacataaggaaaaacacagacagtgtcgtaattttttccggggaaggctcagacgagcttacccagggatatatttattttcacaaagctccatcacccgagaaagctgaggaggagtcagagagacttctgcgcgagctgtacttgttcgacgtgctcagggccgatcgtacaaccgctgcccatgggctcgagctccgggtgccatttttggatcaccggttctcatcttattatctgtccctgccacctgaaatgcggattcccaagaacggcattgagaagcacctattacgcgagacatttgaagattccaatctgattcctaaagagatcctctggagacccaaagaggcattttctgatggtatcacaagtgtcaagaatagctggttcaagatcctgcaagaatacgtggaacaccaagttgacgacgctatgatggctaatgctgcccaaaagttcccctttaacactcctaaaacaaaagaggggtactactatagacaggtgtttgaacgacattatccagggcgcgctgattggcttagccactattggatgccaaaatggatcaatgctaccgatccttcagctcgcacccttacacactataaatcagctgtgaaagcctag

SEQ ID NO: 179538 - DNA, 1686 bp, synthetic construct
  misc_feature 1..1686: note = Description of Artificial Sequence: Synthetic coding sequence
  source 1..1686: mol_type = other DNA
atgtgcggcatctgggccctgttcggcagcgacgactgcctgagcgtgcaatgtttgtccgctatgaagattgcacatcgggggcctgatgccttcagatttgaaaatgtgaacgggtataccaattgctgtttcggattccatagactggccgtggtagacccacttttcggaatgcagcctatccgtgtcaagaaatacccatatctgtggttgtgctacaatggagagatctacaaccacaagaaaatgcagcaacactttgaattcgagtaccaaacgaaggtcgatggcgagatcatactgcatctttacgacaagggaggtattgaacagaccatatgcatgctggatggcgtgttcgctttcgtgctcctcgatactgctaacaaaaaggtgttccttggacgggacacctatggcgtgagacctctgttcaaggctatgacagaagacggctttctggccgtctgctcggaagcaaaagggctggtgaccctcaagcacagtgccaccccatttctgaaagtggagccttttttacccggacactacgaagtgctggacttgaagcccaatggaaaagtggcctcagtcgaaatggtaaaataccatcactgccgtgacgtgccactccatgccttatatgataacgtggagaagttgttccctggattcgagatagaaaccgttaagaacaaccttaggattctgttcaacaacgctgtgaaaaaaagactaatgaccgaccgtcgaatcggatgtttgttaagcggcgggctggacagttccttagtcgcggctactctcctgaaacagttgaaagaagcgcaggtacaataccccctgcagaccttcgctattggcatggaagactcccccgatttgcttgctgctaggaaggtggcagaccacattggctccgaacactacgaggtactctttaactccgaagaaggaatacaggcacttgatgaggtaatcttttccctggaaacctacgacatcacgaccgttcgagcttccgtcgggatgtatctgattagcaagtacataagaaaaaatacagattcagtggtcattttttctggggagggtagtgacgaactcactcagggatatatttacttccataaggcaccttctcctgaaaaagccgaagaagagagcgaacgcctcttgagggagctttacttgttcgacgtgctccgggctgatcgcaccacagctgctcatggactggaacttcgggttccattcctcgaccatcggttctctagttactacctgagcttgcctcctgagatgcgcatccctaagaacggtatcgaaaaacacctgcttagagagaccttcgaagactctaatttaattccaaaggagatcttatggagacctaaagaggccttctctgatgggattacatctgttaaaaattcatggtttaagattcttcaggagtacgtcgagcaccaggtcgacgacgctatgatggcaaacgccgctcagaaattcccgttcaacacaccgaagactaaagagggatactattatcgtcaagtatttgaacggcattaccctggacgggctgattggcttagccactattggatgcccaaatggattaatgctaccgatccaagcgcccgaacgctgactcactacaagtccgccgtcaaggcctag

SEQ ID NO: 179539 - DNA, 1686 bp, synthetic construct
  misc_feature 1..1686: note = Description of Artificial Sequence: Synthetic coding sequence
  source 1..1686: mol_type = other DNA
atgtgcggcatctgggccctgttcggcagcgacgactgcctgagcgtgcagtgtctgtctgcaatgaaaattgcccatcggggccccgatgccttccgcttcgagaacgtaaatggatacactaactgctgtttcggcttccacagattggccgtggtggatcctctttttggaatgcagcccattagagttaaaaaatacccctatctctggctgtgctacaatggcgagatctataatcacaagaaaatgcagcagcactttgagttcgagtatcagactaaggtcgacggtgaaattatcctgcatttatatgacaagggtgggatagagcagaccatttgtatgctggacggtgtgtttgccttcgtgttgttggacactgcgaataaaaaagtgttcttgggacgagacacgtacggcgtcagaccattgtttaaggctatgacagaagacggctttctggctgtctgctctgaagctaaagggctggttaccctcaagcattcagcgaccccgtttctaaaagttgaaccttttttgccaggccactatgaagttctagatttgaaaccaaacggaaaagtcgccagtgtggaaatggtgaagtaccatcattgtcgcgacgttcccctacatgccctatatgacaacgtcgagaaactctttcccgggttcgaaattgaaacggtgaaaaacaaccttcggatcttgttcaacaacgccgtaaagaaaagactgatgacagaccggcgaattgggtgtctgttaagcggaggactggactcttccctggtcgccgctaccctcctgaaacagcttaaggaagcccaggttcagtaccccctccaaacctttgccatcggcatggaggattctcctgacctgttagctgctagaaaggtggcggatcacatcggtagtgaacattatgaggtgctgttcaactcggaggagggcattcaggctttagatgaggtcattttctcacttgagacttacgacatcacaactgtccgagcctccgtgggcatgtatttgatctcaaagtacatcagaaaaaacaccgatagtgtggtcatcttcagcggcgaagggtctgatgagttgacccaggggtacatctatttccacaaggcccctagtccagagaaagcagaagaagaatctgagcgcctgttacgcgaattgtatctatttgatgttctgcgggccgacaggaccacagctgctcacggcctagaacttcgggtgccgtttctcgatcaccggtttagcagctactacctgagcctgcctcctgaaatgagaatccccaagaatggcattgaaaagcacctactgagagagaccttcgaggattccaacttgatccccaaagagatcttatggaggcctaaagaagccttttctgacggtattacatccgtcaaaaattcctggttcaagattctacaggaatacgtcgagcatcaagttgacgacgccatgatggccaacgcagcccagaagttccccttcaacacaccaaagaccaaagaggggtactactatcggcaggttttcgaaaggcactatccggggagagcagactggctgtcacactactggatgcccaagtggattaacgccacagatcccagcgctcgcactctcacccattataaatctgcagtaaaggcttag

SEQ ID NO: 179540 - DNA, 87 bp, synthetic construct
  misc_feature 1..87: note = Description of Artificial Sequence: Synthetic coding sequence
  source 1..87: mol_type = other DNA
atgtgcggcatctgggccctgttcggcagcgacgactgcctgagcgtgcagtgtttaagtgctatgaagatcgcccacaggggatag

SEQ ID NO: 179541 - DNA, 489 bp, synthetic construct
  misc_feature 1..489: note = Description of Artificial Sequence: Synthetic coding sequence
  source 1..489: mol_type = other DNA
atgtgcggcatctgggccctgttcggcagcgacgactgcctgagcgtccagtgcttgtcagcaatgaagatagcacaccggggccccgatgcttttcgcttcgaaaacgttaacggatataccaattgctgcttcggctttcataggctcgctgtcgtcgatcccctcttcgggatgcagcccatccgagttaagaaatacccctacttgtggctatgttataatggagaaatctataatcacaaaaagatgcaacagcatttcgaattcgagtaccaaaccaaggtcgacggggaaataatcctccatttatatgataagggcgggatcgaacagaccatttgtatgctggacggcgtttttgccttcgttctgctcgacaccgctaataagaaagtttttttgggcagagacacttatggggtgcgtcccctcttcaaggcgatgactgaggatggatttttggcagtgtgttctgaggctaagtag

SEQ ID NO: 179542 - DNA, 648 bp, synthetic construct
  misc_feature 1..648: note = Description of Artificial Sequence: Synthetic coding sequence
  source 1..648: mol_type = other DNA
atgtgcggcatctgggccctgttcggcagcgacgactgcctgagcgtgcagtgcctctcggccatgaagatagctcaccgaggtccggatgcatttagatttgaaaacgtgaatgggtacactaattgctgttttggttttcatcggctggccgtcgtggatccactgtttggtatgcagccgatccgggtgaagaagtatccctacctttggctttgctacaacggagaaatttataaccacaaaaagatgcagcagcactttgaattcgagtaccagacaaaagtagacggtgagatcatcctacacctttatgacaaaggaggcatcgaacaaaccatctgcatgctggatggcgttttcgccttcgtgttgctagataccgcgaataagaaagtgtttctgggccgggatacatatggggtgagaccactgtttaaagcaatgacggaagacggcttcttagctgtctgcagtgaagccaagggcctcgtaacactgaagcattccgctactcccttcttaaaggtggagcctttcttacccggacactatgaggtactcgatcttaagcctaatgggaaggtcgccagcgttgaaatggtgaagtaccaccactgcagggatgtgccactgcatgccctgtag

SEQ ID NO: 179543 - DNA, 360 bp, synthetic construct
  misc_feature 1..360: note = Description of Artificial Sequence: Synthetic coding sequence
  source 1..360: mol_type = other DNA
atgtgcggcatctgggccctgttcggcagcgacgactgcctgagcgtccagtgcctgagtgccatgaaaattgcccatcgagggccggatgccttccggtttgagaacgtgaacgggtacaccaactgctgctttggctttcatagactggccgtggtcgatcctctgtttggaatgcagcccatacgagtgaagaaatatccatacctctggctgtgctataacggtgaaatctataaccataaaaagatgcagcagcactttgaattcgagtatcaaaccaaagtggatggagaaatcatcctccacctttacgataagggtggcatcgagcagacaatctgcatgctggatggctag

SEQ ID NO: 179544 - DNA, 102 bp, synthetic construct
  misc_feature 1..102: note = Description of Artificial Sequence: Synthetic coding sequence
  source 1..102: mol_type = other DNA
atgtgcggcatctgggccctgttcggcagcgacgactgcctgagcgtgcagtgtctgagcgcgatgaagattgctcacagggggcccgacgcttttagatag

SEQ ID NO: 179545 - DNA, 192 bp, synthetic construct
  misc_feature 1..192: note = Description of Artificial Sequence: Synthetic coding sequence
  source 1..192: mol_type = other DNA
atgaagatcgcccaccggggccccgacgccttccggttcgagaacgtgaacggctacactaactgctgtttcggcttccaccgactggccgtggttgaccctctctttggaatgcagcccataagggtcaagaaatacccctatctctggctttgttacaatggtgagatctataatcacaaaaaggtgtag

SEQ ID NO: 179546 - DNA, 1437 bp, synthetic construct
  misc_feature 1..1437: note = Description of Artificial Sequence: Synthetic coding sequence
  source 1..1437: mol_type = other DNA
atgcagcagcacttcgagttcgagtaccagaccaaggtggacggcgagatcatacttcacttgtacgacaaaggtgggattgaacaaaccatttgtatgctcgatggggtgttcgctttcgtcttactagatacagccaacaaaaaggtctttctggggcgagatacttacggtgtgaggcccctattcaaggccatgaccgaagacggctttttggccgtgtgcagcgaggcaaaaggtttggtcacccttaaacactcggcgacaccattcttgaaggttgagccctttctccctgggcattacgaggtgctggatcttaagcccaatggaaaagtggcctctgtggagatggtgaagtaccatcattgcagagacgtgcctttgcacgccctatatgacaacgtcgagaaactgtttcccgggttcgagatcgaaacggtaaaaaacaatttgagaattttattcaataatgctgtcaaaaaacgactgatgactgatagacgaatcggctgcctcctgtcagggggcctcgacagcagcttagtagccgcaaccctcctcaaacagttgaaagaggcccaggtacagtacccacttcaaaccttcgctataggaatggaagatagcccggacctgctcgccgctaggaaggtggccgaccatattggaagtgagcattacgaggtgctgtttaactctgaggaaggcattcaggctcttgatgaggtgatcttctctttggagacttacgatattactacggtcagagcctcagtaggaatgtatctgatcagtaagtatatcagaaagaatacagacagcgttgtgattttcagcggagaaggatctgatgaactcacccagggctatatctattttcataaggcccccagcccggaaaaagcggaggaagaatccgagcggctgcttcgcgagctctacctcttcgacgtgttaagagccgatcggaccacagccgcacacggtctagaattaagggtgccgtttctggatcataggttctcatcctattatctcagccttcctcccgaaatgcgtatcccaaagaacggtattgaaaaacacctgctaagagagaccttcgaggacagtaatctgattccaaaggagatattgtggagacctaaggaagcattctcggatggcatcacgagcgtgaaaaattcctggtttaaaatattgcaagagtatgtggagcaccaggtcgatgacgccatgatggcaaatgccgcacagaaatttccctttaacaccccaaaaactaaggaggggtattattatcgtcaagttttcgaaagacactaccccggcagggccgactggctgtctcattactggatgcctaagtggataaacgcaaccgacccctcagctcggactctcacccattataagtccgctgtcaaggcctag

SEQ ID NO: 179547 - DNA, 1623 bp, synthetic construct
  misc_feature 1..1623: note = Description of Artificial Sequence: Synthetic coding sequence
  source 1..1623: mol_type = other DNA
atgaagatcgcccaccggggccccgacgccttccggttcgagaacgtcaacggctacaccaactgctgctttgggtttcacagactggccgttgttgatcctttgtttggcatgcagcctataagagtgaagaagtacccttatctttggctgtgctataatggtgagatttataaccacaagaagatgcaacagcactttgagtttgagtaccagaccaaagtggatggtgagattatcctgcatttgtacgacaaaggaggcatagagcaaaccatctgtatgctggacggtgtctttgccttcgttctcctggacaccgccaacaaaaaggtttttttaggccgcgatacttatggggtcagacctctcttcaaggccatgaccgaggacggcttcctggccgtttgttcagaagccaaggggctggtcaccctgaagcacagcgccaccccctttctcaaggtcgagcctttcctccccggccattacgaagtgttggacctgaagccgaatggaaaagtcgctagcgtagaaatggtgaaatatcatcactgccgtgatgtgccactccatgccctgtatgacaatgtggagaaactgttcccaggcttcgagattgagactgtgaagaataatcttcgaattctattcaataacgccgtgaagaagcgtctcatgacagaccgcaggattggctgcttgttgagtggcggccttgactcaagtctggtggccgctacactcctgaagcaacttaaggaagcacaggtccagtacccactccagacttttgccattggaatggaggacagtcccgatcttcttgccgcacgcaaggtggccgaccatattggctcagaacattacgaagttctgttcaatagcgaagagggcatccaagccctcgacgaagttatattttccctcgagacatatgatatcaccaccgttagggcaagcgtgggtatgtatttgataagtaagtacatcagaaagaatacggactccgtagtgatattttccggtgagggctctgatgagttaactcagggatatatctatttccacaaagctcccagccctgagaaagcggaagaagagtctgagcggttgttgcgggagctgtacctttttgacgtgctgagggctgacagaactaccgccgcccatggtttggaattgcgtgtgccctttttagatcaccggttttcttcttactatctaagcctgcccccagagatgaggatcccaaagaacggtatagaaaaacacctgctgcgggagactttcgaggacagtaatctaatacctaaggagatcctctggaggccgaaggaggcattctccgacggcatcaccagtgttaaaaattcgtggtttaagatattacaagaatacgttgaacaccaggtggatgacgcgatgatggcaaacgcagcgcaaaagtttcccttcaacactccaaaaaccaaggagggctactattataggcaagttttcgaacggcactatcccggccgcgcagactggctgtcccattattggatgcccaagtggataaacgctacagatccatcagcccgaacactaacccattacaaatcagctgtaaaagcatag

SEQ ID NO: 179548 - DNA, 1437 bp, synthetic construct
  misc_feature 1..1437: note = Description of Artificial Sequence: Synthetic coding sequence
  source 1..1437: mol_type = other DNA
atgcagcagcacttcgagttcgagtaccagaccaaggtggacggcgaaattatcttacatctgtacgataaaggcggaattgaacagaccatatgcatgctggacggcgtgtttgcattcgtgctgctagacaccgccaacaagaaggtattcttgggtcgggacacctatggtgtcaggccactctttaaagccatgactgaggatggtttcctggcagtgtgttcagaggccaaaggcctagttactctcaaacactctgcaacacccttcctcaaagttgagcccttcctgccaggccattacgaggtgctggatttaaagccaaatggcaaggtagccagtgttgagatggtgaagtaccatcactgtcgagacgtgcctctccacgcactctacgacaacgtggaaaaactgttcccgggtttcgaaattgagacagtgaagaacaatctgcgaatccttttcaacaacgccgttaagaaaagacttatgaccgaccgacgcattggttgcttactgtccggtgggctcgactcatccctggtagcagccaccctgttaaagcagctcaaggaggcccaggtccagtacccgctccagacctttgcgatcgggatggaagattcacctgatctgctggctgctcggaaggtggccgatcacatcgggagtgagcattacgaggtgttgtttaactcagaggaggggatccaagcactggatgaggtgattttttccctggagacgtacgatataactaccgtccgtgcctccgttggtatgtaccttatcagtaaatatattcggaagaacaccgatagcgtcgtgattttttctggtgaggggtcagacgaattaacccagggctatatttactttcacaaagccccttcgcctgaaaaggccgaggaggagagtgaaagactgctccgggaactctaccttttcgacgtattgcgggcagatagaactactgccgcacacggtcttgagctgagagtccccttcctggaccatcgcttttcctcttattatttgtctctgccccctgagatgcgaattcctaagaatggcatcgagaagcacctgcttagagaaacctttgaggactccaatttaatcccgaaggagatcctttggaggcccaaggaggctttttctgacggaattaccagcgtgaaaaactcatggtttaagatcctgcaagagtacgtcgagcatcaggtggacgatgcaatgatggctaatgcagcccagaagtttccattcaatacaccaaagacgaaggaaggatattactacagacaggtgtttgaaagacactaccccgggagggccgattggctcagtcactattggatgccaaaatggatcaatgccacggatccatccgcccggacactgacccattacaagtccgccgtgaaggcctag

SEQ ID NO: 179549 - DNA, 1395 bp, synthetic construct
  misc_feature 1..1395: note = Description of Artificial Sequence: Synthetic coding sequence
  source 1..1395: mol_type = other DNA
atggccgccagctgcctggtgctgctggccctgtgcctgctgctgcctctgctgttactgggaggctggaaacgatggcggcggggtcgagctgcaaggcacgtcgtcgctgtggtcctcggcgacgtggggcgctcccccagaatgcagtatcacgcactcagcttggccatgcacgggttctcagttacccttctcggtttttgtaactctaagccacatgatgaattgctgcagaacaatcggattcagattgtgggacttacagaacttcagtcgctcgcagttggacctcgagtcttccaatacggagtcaaggtggtgctacaggcaatgtacctcttatggaagctgatgtggagggaaccaggcgcttatatctttctgcagaatccacccggtttgccgagcattgcagtttgctggttcgttggatgtctttgcggcagcaagctggtaatcgactggcataattatggatactctatcatgggacttgtgcacgggcctaaccatcctcttgtcctgttggctaaatggtacgaaaagtttttcggccgtttgagtcatctgaacctgtgcgtcactaatgccatgcgggaggacctggctgacaattggcatatccgggccgtaaccgtgtatgataaaccagcaagtttctttaaagaaaccccccttgatcttcagcacagattgttcatgaagctgggctccatgcattcaccatttagggcacggtctgagcctgaggacccagtgacagaacggtctgcctttactgagcgggacgccggatccggtctggtcacccggttgagggaacgtcctgcccttctggtgtcatcaaccagctggactgaggatgaggacttcagtattctgctcgcagcattggaaaaattcgagcaactcactctggacgggcataacctgccctcactggtgtgcgtaattactgggaagggcccccttcgagaatactacagccgcctgatccaccagaaacattttcaacatatccaggtgtgtaccccttggcttgaggctgaagactaccctttgttgctcgggagcgccgacctgggcgtctgtctacacacgtcatccagtggacttgacctgcctatgaaggttgtagatatgtttgggtgctgcctgccagtgtgcgctgttaatttcaagtgcctacacgaactggtcaaacacgaggaaaatggactggtattcgaagactctgaggagctagctgctcagctgcaaatgctattcagcaattttcctgatcccgccggtaagttaaaccagtttagaaagaatctgcgggagtcacaacagctgaggtgggatgagtcatgggtccagactgttctacccctggttatggatacatag

SEQ ID NO: 179550 - DNA, 1062 bp, synthetic construct
  misc_feature 1..1062: note = Description of Artificial Sequence: Synthetic coding sequence
  source 1..1062: mol_type = other DNA
atgtacctgctgtggaagctgatgtggcgggagcccggcgcctacatctttctccaaaatccgccggggctgccaagcatcgcagtttgttggtttgtgggatgtctgtgcggctccaagctggtgatagactggcataattacggatattccatcatgggcctcgtgcacggtcccaatcatcccctcgtgctgctggccaaatggtacgaaaagttttttgggcggctgagccatctcaacctgtgtgtgacgaacgcaatgagggaggatctggcggacaattggcacattagggctgttacagtgtacgacaaacctgccagctttttcaaggagacccccctcgacctacagcaccgattatttatgaaactcggatcaatgcatagtcctttccgggcgaggtctgaaccagaagacccggtgactgagaggagtgcatttaccgaacgtgatgccgggagtggtctggtgacacggctcagggagcgccctgcgctattagtgtccagcaccagctggacggaagatgaggatttttcaatccttctggccgccttggaaaaatttgaacagctgactctggacgggcataacctgcccagcctggtttgtgtaatcacgggcaagggccctctgagagaatactatagcagactgattcaccagaagcatttccaacatatccaggtctgtaccccatggctcgaggctgaagattaccctttgctgcttggatctgccgacctcggtgtgtgcctgcatacttcttccagcgggctggacctgcccatgaaagtagtggatatgttcgggtgctgcctgccagtgtgtgccgtgaacttcaagtgcttgcacgaacttgtgaagcacgaggaaaatggcctggtttttgaggacagcgaggaactcgctgcacagctgcagatgctgtttagcaacttccccgaccctgccggcaaactgaatcaattccgtaaaaatcttagggagtctcaacagctccggtgggatgaatcctgggtccagaccgtacttcccctggtaatggacacatag

SEQ ID NO: 179551 - DNA, 1422 bp, synthetic construct
  misc_feature 1..1422: note = Description of Artificial Sequence: Synthetic coding sequence
  source 1..1422: mol_type = other DNA
atggcccagctggagggctactacttcagcgccgccctgagctgcacctttctggtttcatgtctcctatttagcgctttttccagggctctgagagaaccttacatggatgagattttccacctcccgcaggctcagagatattgtgaaggacactttagcttgtcacagtgggacccgatgatcactacactgcctggtctttatctcgttagcataggagtgatcaagccagcgatctggattttcggctggtccgagcatgtcgtgtgcagcatcggcatgctgcgcttcgtcaacctgcttttctccgtgggaaatttctatcttctctatctgctgttctgtaaggtacagcctcgcaataaggccgctagttccatccagcgcgtgctttccacccttacactcgccgtattcccaaccttgtacttcttcaactttttatattacactgaagcgggttctatgttttttactctgtttgcttatctaatgtgcctctacggaaaccacaagacgagtgcctttttgggtttttgtgggtttatgttccggcagaccaacattatatgggcagtattctgcgccggtaacgttattgcccagaagctgacagaagcttggaagacagagttgcagaagaaggaagatagactaccccccatcaaaggacctttcgccgagtttcgaaaaattttacagttcctgctagcttacagcatgagttttaaaaacctgtctatgctgcttctcttaacatggccgtatatactcttaggtttcttattttgtgctttcgtggtagtcaacggcggcatcgtgataggcgaccggagctcacatgaggcttgtttgcattttccccagctattctatttcttcagtttcacgttgtttttcagctttccccacctgctgtctccctccaaaattaagactttccttagtcttgtgtggaagagacgaatcctattcttcgtcgtgacgctggtttctgtattccttgtgtggaaatttacctacgcacataagtatctgcttgccgacaatcgacactacaccttctatgtgtggaaacgcgtgttccagcgctacgaaacagtgaagtacctgctcgtccccgcgtacatcttcgccggttggagcatcgccgactccctgaagagcaagtccatcttttggaacttgatgtttttcatctgtctgttcaccgtgatcgtgccacagaagctcctcgagttcaggtatttcatattgccctacgtgatatatcgtctgaatattcctctgcctcctacttctcggctaatatgcgaactgagctgttacgccgtagttaactttatcacattttttatatttctcaataagacattccaatggccaaacagtcaggacatacagagattcatgtggtag

SEQ ID NO: 179552 - DNA, 1479 bp, synthetic construct
  misc_feature 1..1479: note = Description of Artificial Sequence: Synthetic coding sequence
  source 1..1479: mol_type = other DNA
atggccgccggcgagcggagctggtgcctgtgcaagctgctgcggttcttctactctctttttttcccagggttgattgtttgcggcactctttgcgtctgtctggtcattgtgttatggggaatccgactgctgcttcaacggaaaaagaaactggtttcaactagcaagaacggaaagaaccagatggtgatcgctttcttccacccatattgcaatgctggaggaggcggcgagcgcgtgctctggtgcgcacttagagcactacagaagaaataccccgaggctgtttatgttgtgtataccggggacgtgaatgtcaatggacagcaaatcctggagggcgcatttcggcggtttaacataagactgattcatcccgttcaattcgtgtttctacgtaagcgctatttggttgaagactccctctatccccacttcacactactgggccagtctcttggatccatattcctgggctgggaggccttaatgcagtgcgtacctgacgtgtacatcgactctatgggctatgctttcaccttgcccctcttcaaatatatcggtggatgccaggtgggaagctatgtacattaccctactatcagcactgacatgctttcagtcgttaaaaaccagaatatcgggtttaacaatgctgctttcatcaccagaaatcccttcctgagcaaggtcaagctgatctactattacttatttgcctttatatacggtctggtgggtagctgctccgacgttgtgatggttaacagctcctggacactgaatcacatactgtccctgtggaaggttggaaactgcacaaacatcgtgtatccgccttgcgacgtgcagacgtttctggatattccgctgcatgaaaagaaaatgacccctggacacctattagtgtccgtgggtcaatttcgccctgagaagaatcatcccctacagatacgagcttttgccaaacttctcaataagaaaatggtcgaatctcctcctagtttaaaactggtgctaattgggggatgcaggaataaggacgacgagctaagagtaaaccagctgcgacggttgagcgaagacttaggggtccaggagtatgttgagttcaagatcaatatccctttcgatgagctgaaaaattacctgagcgaggctacaatcggtctgcatacaatgtggaacgaacactttggaattggggtggttgagtgtatggccgccggaacaataatcttggcccacaattcaggggggcccaagttggatatagtagtgccccacgaaggggacataactggcttcctggcagaatctgaggaggactacgctgagacgatcgctcatatactgtctatgagtgcagaaaagcgcctgcagattcgtaagagcgcaagagcttccgtcagccggtttagtgatcaggagtttgaggttacctttctttcctctgtagagaagctgtttaaatag

SEQ ID NO: 179553 - DNA, 111 bp, synthetic construct
  misc_feature 1..111: note = Description of Artificial Sequence: Synthetic coding sequence
  source 1..111: mol_type = other DNA
atggccgccggcgagcggagctggtgcctgtgcaagctgctgcggtcctgcggagtgtatggttcatggcataattatccatgtacccagtttggcggcccaaaagcctag

SEQ ID NO: 179554 - DNA, 1467 bp, synthetic construct
  misc_feature 1..1467: note = Description of Artificial Sequence: Synthetic coding sequence
  source 1..1467: mol_type = other DNA
atggccggcaagggcagcagcggccggcggcccctgctgctgggcttattggtagctgtggccactgtacacctggtgatctgcccgtacacgaaggttgaagagtcctttaacctacaagctacccacgatctcctgtatcactggcaagatcttgagcagtacgaccacctcgagtttccaggcgttgttccaagaacctttctcggacccgtggttattgctgtttttagctctccggccgtgtacgttcttagcttactagaaatgagtaaattttactcacagctgattgtgcgaggtgtgctcggacttggcgtgatctttggactctggaccctccaaaaagaagtcaggcgacatttcggtgccatggtggcaacaatgttctgctgggtgacagccatgcagttccacttgatgttttactgtactcgcacactgcccaatgtgttggctctccccgtcgtgctgttggctctcgcggcttggctgagacatgagtgggcgaggttcatctggctgagcgcatttgcaataattgtgttcagagtggagctctgtctgttcctcggtctattgcttctcctggctctaggcaatcggaaggtttcagttgtacgagcccttaggcatgcagtgcccgcggggatcctgtgcttggggctgactgtggccgtcgacagctacttctggcgtcaactgacgtggccggagggaaaggttctctggtataacaccgtgctgaacaagagctccaactgggggacaagtccgttattgtggtatttttattcagctctgccacggggcctgggttgttccctgctgttcattccactcggcttggttgacaggcggactcatgcacccacggtgctggcactgggcttcatggcgctctactccttacttccccacaaggagctgagatttatcatttacgccttcccaatgctcaacattaccgccgcccgcgggtgctcatatttgctgaacaactacaagaagtcatggctttacaaggctggatccctgctggttataggccatctggtcgtcaacgcagcttattctgccaccgccctgtatgtgagccactttaattatcccggcggggtcgcaatgcagaggctacatcagctggttcctcctcaaacagatgtgcttctccacatcgacgttgctgcagcccagactggtgtgtctaggtttttacaagttaactctgcctggcggtatgacaagagagaggacgtgcagcccggcacaggcatgctggcctacacccacattttgatggaagcagcaccaggcctgctcgccctgtacagagacacacatcgcgtattagcaagtgtggttgggactactggcgtatccctgaacctgacccagctgccccccttcaatgtgcacctacaaaccaagcttgtgctgttggagaggctgcctaggccaagctag

SEQ ID NO: 179555 - DNA, 987 bp, synthetic construct
  misc_feature 1..987: note = Description of Artificial Sequence: Synthetic coding sequence
  source 1..987: mol_type = other DNA
atgccccccacccagccccggccctgcatgtgccccatcagcaccacgcaggtggcctcccagtgtcgtggctgcacatcgtggtgccccccgcgccagacatcgttttgcacgctgacttggcaacctccgaggcaagtttgcctgggattctcaaagtctaccgccccaggaggcactacgagaggtagaatgtgctccaggggacaagcctgctggcacactcacacctccagctggcggcgtccctgggcgcccgggcccctgcaggggcataccccaggtcctggacaaagacgaggcgaccatcgctgcgagtccgagcctgacccaacggcacccctgcagagaccacctgcagacaaagctggtgcctccggagaggcgccaccagctgtgttgcgcggaacacggcagccttctgcagcaacaggactgcccggggcagttatcactacctcattctggcacaattcgtctacaattatgactatacagcggtctaaaagtaaggactgggcccctgcctctgatcggcatcagaccaggagccgggctagtagcacagccagtgctggagccctctcaactaaagagaggggggctcaggttctgctcgcgccccgggagccgcttccaagggtgatggtggctagctctggactacctgcaggcgactgtaggcccgaccaggtgccatttatgaccaaccaggagcagagggcccaccccgggacctgcttgccaggggggcatgtatgtcctgcccatcctggaggcgcggtgttctggcagcatcctacgttagcggcccggggccccctgggggcacccaaaacagcaccaccactacggggagaccatggtggcccaggtcgcacccctcctccatggtgtcaccactgcaatttctgcatccacaggcaccctatctctatcacagacaaaattctcggtgataaacacatccagaaagggatgcgctag

SEQ ID NO: 179556 - DNA, 2865 bp, synthetic construct
  misc_feature 1..2865: note = Description of Artificial Sequence: Synthetic coding sequence
  source 1..2865: mol_type = other DNA
atgaacaaccaccagctggagctggccaagcagctgcacaaggaggggcacctcttttactgcacttgccgcgtcctgacctgccccggccaggctaagagcatcgcctctgctccgggtaagtgccaagatagcgccgctcttacttctacggccttcagcggactcgacttcggcttactgtccggttacctgcacaagcaggccctggttacagcaacccaccctacatgtaccctgctgtttccaagctgccacgccttctttcctctgcctctgactcccacgctctacaaaatgcacaagggatggaaaaactattgcagccagaagtctttaaacgaggcatccatggatgagtacctgggatcactcggactgttcagaaagttgaccgcgaaggacgccagctgcctgttcagagctattagtgagcagctcttttgcagccaggtgcaccaccttgaaatccgcaaagcttgtgtatcctatatgcgggaaaatcaacagacatttgaatcctatgtcgaaggttcgttcgaaaagtatctcgaacgcctgggcgatcctaaagaatcggcagggcagctggagattcgggccctttctctgatctataatcgcgactttattctctacaggtttcccggaaagccacccacatatgttaccgataatgggtatgaagataagatcctgctgtgctacagcagctctgggcactacgactccgtgtattccaagcagtttcagtcgagcgccgccgtttgtcaggctgtgctctatgagatactgtacaaggatgtctttgtagtggatgaggaggagctcaaaacagccattaaactgtttcggtccggcagcaagaagaaccgcaataatgccgtgaccggtagcgaagatgcacatactgattacaagtcctcgaaccagaatcgaatggaggaatggggggcatgctacaatgccgagaacattcccgagggctacaacaaaggcacagaagagaccaaatccccagagaatccgtctaaaatgcccttcccttacaaggtgctgaaggcgttggacccggagatttaccgcaacgtggaatttgatgtctggctcgattctaggaaggagctgcagaagagcgactacatggaatacgctggccgccaatattatttgggcgacaaatgtcaagtctgtttggaatcggagggacgatactacaatgcccatattcaggaggtcggcaacgaaaacaactcagtcacagtatttatagaagagctggccgagaagcatgtagtccctctggcaaacctcaaacctgtcactcaagtgatgtccgtacccgcttggaacgctatgccatctcggaaagggcgcggataccaaaagatgccaggtggctacgttccagagatcgtgatatctgaaatggacattaagcagcagaaaaaaatgttcaaaaagattaggggaaaagaggtctacatgacaatggcttatggcaagggggacccactcctcccgccgaggctccagcactctatgcactatggccacgatccccccatgcactatagccagaccgctggtaatgtgatgtcaaatgagcattttcacccacagcatccgagtcctcgacaggggagaggctatggaatgccacgtaactcatcacggtttataaacaggcataacatgcctgggcccaaagtcgatttctaccctggtcccgggaaacggtgttgccagagttacgataacttcagctatcgtagcagatctttccgccgatctcaccgtcagatgagttgtgtcaacaaagaatcccagtacggttttacaccaggcaacggtcagatgcctcgagggctggaagagacaatcaccttttacgaagtggaggaaggggacgagactgcctacccaaccctccctaatcacggtggaccttcgacaatggttccggcgaccagcggatattgtgtcgggagacggggccattcttcaggcaagcaaaccctcaacctggaggagggtaacggccagtcagaaaatggccggtaccacgaggagtatctgtatcgagctgagcctgactacgagacatccggggtctactcaacaacagcctccaccgctaatctgtctctgcaggaccgcaagagctgttcaatgtcccctcaggataccgtgacttcttataattatcctcagaaaatgatgggcaatatcgccgctgtcgcagcgagctgcgcaaacaacgtacccgctccagtgctgagtaacggagcggcagcgaaccaggcaatctcaactacaagcgtttccagtcagaacgccatccagcctctattcgtcagccccccaacccacggtcggcctgatacaaaggttctccagtactactttaatctgggacttcagtgctattatcattcttactggcatagtatggtgtatgttccacaaatgcaacaacaattgcacgtcgaaaactaccctgtgtacaccgagccccccttggtggatcaaacagtgccacagtgttactccgaggtgaggagggaagacggcatacaggccgaggcatcggctaatgatacctttcctaatgcagattcttcgtcagtaccccatggcgccgtctactatcctgtgatgtcagacccttatgggcaaccaccgttacccgggtttgattcttgccttcccgttgtgcccgactacagttgcgtcccaccttggcacccagtgggcaccgcttatggcggctcctctcagattcatggtgctatcaatccaggccctattgggtgtatcgcaccctccccacctgctagtcattacgttccgcagggcatgtag

SEQ ID NO: 179557 - DNA, 498 bp, synthetic construct
  misc_feature 1..498: note = Description of Artificial Sequence: Synthetic coding sequence
  source 1..498: mol_type = other DNA
atgaagtgcgtgttcgtgaccgtgggcaccaccagcttcgacgacttgattgcttgcgtttcggcccccgacagcctccaaaagattgagagcctgggctataatcgacttattctccagattggtcgggggactgtagtgcctgagcctttttccacggaatcgtttaccctggatgtgtaccgctataaggacagcttgaaggaagatatccaaaaagccgaccttgtgatctctcacgccggggcaggctcatgcctggaaaccctcgagaagggtaagcctctcgtggtcgtcatcaacgagaagctgatgaataaccaccagctagagctggccaagcagctccacaaagaaggacacttgttttattgcacctgtagcaccctcccgggcctgcttcagtctatggatctctccacccttaaatgctatcctccaggtcaacccgagaagtttagcgcttttctggataaagttgtaggcttgcagaagtag

SEQ ID NO: 179558 - DNA, 3414 bp, synthetic construct
  misc_feature 1..3414: note = Description of Artificial Sequence: Synthetic coding sequence
  source 1..3414: mol_type = other DNA
atgaagtgcgtgttcgtgaccgtgggcaccaccagcttcgacgacctgatcgcatgtgtgagcgcccctgactctctgcagaagatagaatccctcggttacaatcggcttattctacagatcggacgtggtaccgttgtacctgagccatttagtactgagtcctttacactggatgtgtacaggtataaggattccctgaaggaggacattcaaaaggctgacctggtgatctcgcacgctggggcgggctcatgcctggagaccctcgaaaaaggaaaaccacttgttgttgtcattaacgaaaaacttatgaataatcaccaattggaactggctaaacagttgcacaaggaaggccatctgttttactgcacatgtagggttcttacctgcccagggcaagctaaaagcatcgcctccgctcctggcaagtgccaagattccgccgctctgacatcaactgcgttctctggcctagattttgggcttctcagcggctacctacataagcaggccctcgtcaccgccacacatccaacttgtactttgctcttcccctcttgccacgccttttttccactgcctttgactccaaccctttacaaaatgcataagggatggaaaaactactgctcccagaagtctttgaacgaagccagcatggatgaatatctgggaagcctcggactattccggaagctgaccgcgaaggacgctagttgtctgtttcgggcgatttcggagcagctcttctgtagtcaggtgcaccatcttgagatccgcaaggcctgtgtgtcatacatgagggaaaatcagcagacattcgagagctacgtggagggctccttcgagaaatatctggagcggctgggggatccaaaggaatccgccggtcagctcgagattcgcgcgctcagtcttatctataatagggattttattctttatcgtttccccggaaaaccacccacctatgtgacggataacggctatgaagacaagattctcctgtgctatagctcatctggccattacgacagcgtgtacagcaagcaatttcagtcttcggctgctgtctgtcaagccgtgctctatgagattttgtataaagatgtctttgtggtggatgaagaggaactcaagacggctatcaagttgttccggagcgggagtaagaagaaccggaacaacgccgtgacaggctcggaggacgctcacactgattacaagtcctctaaccagaaccgcatggaagaatggggagcctgctacaacgcagagaacataccagagggctacaacaaaggcactgaggaaacaaagtcccccgagaatccatccaagatgccgtttccatacaaagtcctgaaagcactggatcctgagatctacaggaacgtggagttcgatgtgtggctcgactctcggaaagagctgcagaagagtgattatatggaatacgctggcaggcagtattatttgggagacaagtgccaagtatgcctcgaatctgaaggacgctactataacgcccatatccaggaagtgggtaatgaaaataattcagtgactgtgttcattgaggagcttgccgagaaacatgttgtccccctggccaacctgaagcctgtgacccaggtgatgtctgtcccggcatggaacgcaatgccaagccgaaaaggcaggggatatcagaaaatgccaggcggttatgttccagagattgtgatcagcgaaatggacataaaacagcagaagaagatgtttaaaaaaattagaggcaaggaagtgtacatgacaatggcttacggaaagggggaccctctcttgcctcccaggctgcagcactcgatgcactacgggcacgacccccccatgcactacagtcagaccgcaggcaacgtgatgtctaacgaacacttccatccccagcatccgtcaccaaggcaggggcgcggctatgggatgccacgtaactccagccgattcatcaatcgccataatatgcctggccccaaggtggatttttatcctggacccggaaagcgctgttgtcagtcatacgacaacttctcctacagaagccggtcttttagaagaagccaccgacagatgtcttgtgtaaacaaagagagccaatacgggtttaccccgggcaatgggcagatgccacgcggactagaagaaactattaccttctacgaagtggaggaaggcgacgaaacggcctatcctactctgcctaaccatggagggccttcaaccatggtgcctgcaaccagcggatattgtgtcggcagacgggggcactcctctggcaaacaaacactaaacttggaggagggaaacggacagtcggagaatggccgataccatgaagagtacctctaccgcgctgagccagactacgaaacgtcgggcgtatattctactactgcttccaccgccaacttgtccctgcaggatcgtaaatcctgtagcatgagcccacaggacaccgtgactagttacaattatccccaaaagatgatggggaacatagctgccgtggccgcgagttgcgccaataacgtcccggcccccgtcttgtccaacggggccgcggctaaccaggctatttccaccacttcagtatcttcccaaaatgccatacaacccttgttcgtctctccgcctacccatggaaggccagttatcgcatcaccttcgtatccctgccacagcgccataccgcatgctggggcctccctccctcctccacctcctcctcccccacctcccccccccccgccgcccccccccccccctccaccaccccccccccctcctccagcattggacgttggtgaaacttctaacctccagccccctcctccactgcctccacccccatattcctgtgaccctagtggctctgatttgccgcaggatacaaaagtgctccagtactatttcaacctcggccttcagtgttattatcactcctactggcatagcatggtctacgttccccagatgcagcaacagctgcatgtggagaactaccccgtgtatacagagcccccgctggtggaccagaccgtgccacaatgctacagtgaggtcagacgggaagacggaatacaggcagaggcctcagcgaacgatacatttccgaatgctgactcgtcaagcgtgccccatggagccgtgtactatccagtcatgtctgatccatacggtcagccaccactacctggctttgactcatgcctgcctgtagtgccagattattcctgtgtgccaccctggcaccccgtggggactgcctacgggggaagcagccagatccacggcgccatcaaccctggcccgataggctgtatcgccccaagtccacctgcaagccactacgttccacagggcatgtag

SEQ ID NO: 179559 - DNA, 651 bp, synthetic construct
  misc_feature 1..651: note = Description of Artificial Sequence: Synthetic coding sequence
  source 1..651: mol_type = other DNA
atggtgtgcgtgctggtgctggccgccgccgccggcgccgtggccgtgtttctgattctgagaatttgggtggttctgcgttcaatggacgtgacgcctagggaaagcctgtcaattctagtggtggccgggtccggagggcataccacagagatccttcggctactcgggtcactcagtaacgcgtattccccgagacactatgtaatcgccgacacagacgagatgagtgcaaataagatcaacagcttcgaactggaccgagctgatagggatccatcaaatatgtacacaaagtattatatccatcgcataccaagatccagagaggtgcagcagagctggccaagtacagtgttcacgacattgcactcaatgtggctctcttttcctctgattcatcgggtgaaaccggatctcgtactgtgtaatggccctggcacatgtgtgccaatttgcgtgtcagctctcttactgggaatactgggaataaagaaggtgattatcgtttatgtggaatcaatttgccgagtggaaactctgtccatgtcgggcaagattctgttccacctatctgattatttcatagtccaatggcccgccctgaaagaaaagtatccgaaatctgtgtacctcggccggattgtatag

SEQ ID NO: 179560 - DNA, 972 bp, synthetic construct
  misc_feature 1..972: note = Description of Artificial Sequence: Synthetic coding sequence
  source 1..972: mol_type = other DNA
atgcccctgctgaagctggtgcacggcagccccctggtgttcggcgagaaattcaagctgtttaccctggtctctgcgtgtatccctgtctttagacttgcacggaggagaaaaaaaatcctgttctactgtcattttcccgatctgctattaaccaaacgggattcatttcttaaacggctgtatcgggcccctatcgattggattgaggaatacactaccggcatggctgactgcatcctcgtaaatagccagtttacggcagcagtgttcaaagaaactttcaagtccctgagtcacatcgacccggatgtgctgtaccctagcttgaatgtaacttccttcgactccgtggtccctgagaagctagacgatctggtaccgaagggcaaaaagttcctgctcctctcgatcaatcggtatgagcgcaagaagaacttaactctggccctcgaagcacttgtgcagctgagagggcgccttaccagtcaggattgggaaagagtgcacttgattgtggctggcggctacgacgaaagagtgctcgagaacgttgaacactatcaagagctgaagaagatggtgcaacagtccgacctcgggcagtatgtgaccttcctgcggtcatttagtgataaacaaaagatcagtctgctgcacagttgtacctgcgtcttgtacaccccctctaatgagcactttggtatcgtcccgttagaggccatgtatatgcagtgtccagtaatcgcagttaacagcggtgggcctctggagagcatcgatcactccgtgaccggatttttatgcgagcctgaccctgtgcacttcagcgaggctattgagaaattcatccgagagccaagtttgaaggctacgatgggactagctggtcgcgccagagtaaaggagaagttttctccagaggccttcactgaacaattatatcgctatgtcacaaaactactcgtctag

SEQ ID NO: 179561 - DNA, 1251 bp, synthetic construct
  misc_feature 1..1251: note = Description of Artificial Sequence: Synthetic coding sequence
  source 1..1251: mol_type = other DNA
atggccgaggagcagggccgggagcgggacagcgtgcccaagccctcagttctcttcctccaccccgacctaggggtgggtggcgcggagcgattggtgctggacgcagccctcgccttacaggcaagaggatgctccgttaagatctggaccgcccactacgaccccggccactgctttgccgaatcaagagagttgcctgtgagatgtgctggcgactggctgccacgcggacttggctggggtggccggggggctgccgtttgcgcttacgtgaggatggtttttttggcgctgtacgtcctgttcctggccgatgaagagttcgatgtcgtggtttgcgatcaggtgtcggcttgcatccccgtgtttaggcttgcccgccgacggaaaaagattcttttttactgtcacttccccgatcttctgctcacaaagcgggactcctttttgaagcggctttatagggcacccatagattggattgaagaatataccaccgggatggccgactgtatcttagtaaactctcagtttactgctgctgtattcaaagaaacatttaagagtttaagtcacatcgatcccgacgtgctgtacccaagtctcaacgtgacatcctttgatagcgtcgtcccggagaagctcgacgatctggttcctaaaggaaagaagtttctgttgctctctatcaataggtacgagaggaagaagaatcttaccctggctctggaggcgctggtccagctccgtggccgccttacgagccaggactgggagcgcgtgcatctgattgtggctggcggatatgacgagcgagttctcgagaacgtagagcactatcaggagctgaaaaagatggtacagcagagtgacttggggcagtacgtaactttcctgcggtccttctctgacaaacaaaagattagtctgttacactcttgcacctgtgttctatacacaccctcaaatgaacattttggcatagtcccactcgaggccatgtatatgcagtgccccgtgatagcagtgaattctggtggcccgcttgagagcatcgatcattcagtgacaggctttctttgtgaacctgacccagttcacttctcagaggccattgagaaatttatcagagagccttccctgaaggcaaccatgggcttggctgggagggcccgggtgaaggaaaaattctctccagaggcattcactgagcagctctataggtatgttactaagctgttggtttag

SEQ ID NO: 179562 - DNA, 1317 bp, synthetic construct
  misc_feature 1..1317: note = Description of Artificial Sequence: Synthetic coding sequence
  source 1..1317: mol_type = other DNA
atggccgccggcctgcggaagcggggccggagcggcagcgccgcccaagcagagggattgtgtaagcagtggctgcagcgcgcttggcaagagcggcgcttattgcttagagagcccagatataccttgctcgtggcagcttgtctgtgtctggcggaggtcggcattacgttctgggtcattcatagagtagcatacaccgagatcgactggaaagcttacatggccgaagtggaaggagtaattaacggcacttatgactacactcaacttcagggcgatactggccctttggtttatcctgccggatttgtatacatatttatggggctgtactacgccacgtcgaggggcactgatatcaggatggctcagaacattttcgccgtcctttacctcgccaccctcctgctcgtgttccttatataccaccagacctgcaaagtccccccgtttgtgttttttttcatgtgttgcgccagctatcgggtgcacagtatcttcgtgctgaggcttttcaatgatcccgtggctatggttttgctcttcttatcaattaacctgttgctggcccagagatggggttggggatgttgttttttctctctcgccgtgtcggtaaagatgaatgtcttgttgttcgcccccggcctcctgttcctgttgctgacccagttcgggttccggggggctctccccaagctaggcatctgcgctggtcttcaagtggtcctcgggcttccattcctcctagagaatccatccgggtacttgtcgcggtccttcgatcttgggagacaattcctctttcactggactgttaactggaggttcctgccggaggccctcttcctgcacagggcattccacctggcgctgttgacagcacacctgaccctgcttctcctgtttgccctttgtcgatggcatagaacaggagagtccattctgtccctcttgcgggatccatccaagaggaaggtccccccccagcctctgactcccaatcagattgtatccactctcttcacgagtaatttcatcggtatctgcttttcacgttcactgcattatcagttttacgtgtggtatttccataccttaccctacctgctgtgggccatgccagcccggtggctgacacacctgttgaggctgctggttctgggccttatcgagctgtcatggaacacatacccttccacatcttgctctagcgcggcacttcacatctgtcatgccgtcattctcctccagctttggctgggtccacagccattccctaaatctacccagcactcaaagaaggcgcactag

SEQ ID NO: 179563 - DNA, 1149 bp, synthetic construct
  misc_feature 1..1149: note = Description of Artificial Sequence: Synthetic coding sequence
  source 1..1149: mol_type = other DNA
atggccgccgcccggctggcccgggccgcccccgccgccgccggcgctgccctgcatgccgcagggggccgactccctcttcctggagggggcggtcatcaccttttgggacactctcagggaggtatgtatcctgcaggattcgtgtatatattcatgggcctgtattacgctacttctcgcggcactgacattagaatggcccagaacatctttgctgtcctgtacctggcgacactgctactcgtttttctcatctaccaccaaacctgtaaagtgcctcccttcgtgtttttctttatgtgctgtgcatcttatagagtccattcgattttcgtgttaagactttttaatgaccccgtggccatggtactattgttcctgtctatcaaccttcttttagctcagcgctggggctggggatgctgcttcttctcactcgccgtcagtgtcaagatgaacgtgctgctgttcgcgcccggtctcttattcctgctgctgacacaatttggcttccgaggagctctgccgaaactcggaatttgcgctggtctccaagttgttttagggttgcccttcctattggaaaacccgtccggatacctcagtcgctcgtttgacttggggagacagttcctgtttcactggactgtcaactggcgattcttgccggaggctctgttcctgcatcgagccttccatctggctctgctcacagcccacctgactcttttgcttctattcgccctgtgcagatggcacagaactggcgagagcatcttaagcctcctacgcgatccttcaaaacgaaaagtcccaccccaaccgctcactcccaatcagatcgtatctacactgttcacttcaaacttcatcgggatttgtttttctcggtctcttcattaccagttctatgtttggtattttcacaccctgccctatctgttgtgggctatgcctgcccggtggctaacacacctactacgcttactggtgctgggcctcatcgagttgagttggaatacataccctagcacctcttgcagctccgccgctctgcatatctgtcacgcggttattctcttgcagctgtggctggggccccagccattccctaagtccacccagcatagcaaaaaggcccattag

SEQ ID NO: 179564 - DNA, 1530 bp, synthetic construct
  misc_feature 1..1530: note = Description of Artificial Sequence: Synthetic coding sequence
  source 1..1530: mol_type = other DNA
atggagaagtggtacctgatgaccgtggtggtgctgatcggcctgacagtgcgatggacagtgtcactgaactcatattccggcgcaggaaagcctcctatgtttggagactacgaagctcagcggcattggcaggagatcacctttaatctgcccgttaagcaatggtacttcaatagtagcgacaataaccttcagtattgggggctggattatcctcccctaactgcataccactccctcctctgcgcatacgtggcgaagtttatcaatccagattggattgccctacatacctcaaggggctatgaatctcaagctcataagctgttcatgcgcaccacagtcctgatcgcagacctgctcatctatattcccgctgtcgtgctctattgctgctgcctcaaggagatcagtaccaagaagaagatagccaatgctctgtgtattctactgtatcctgggctgatcctgatagattatggccacttccagaatatatataactccgtgagcctgggcttcgctctttggggggtgctgggcatctcatgtgactgtgaccttctcgggtcacttgcattttgtctggcaatcaattataaacagatggaattgtatcacgctctccccttcttttgcttcctccttggaaagtgttttaagaagggcctcaaaggaaaaggattcgtgttacttgtcaagctggcctgcattgtagtcgcgtccttcgtgctgtgctggctgcccttcttcacagagcgcgagcaaaccttacaagttcttcgcagacttttccctgtggaccgaggcctgtttgaagataaagtggctaatatctggtgttcattcaacgtgttcctcaagatcaaagatattcttcctagacacatccaactgatcatgtctttctgttctacttttctgtcactcctgcctgcctgcattaagctcatccttcagccctcttccaaggggttcaagttcacactggttagttgcgcgctgagcttctttctgttttcatttcaggtgcacgaaaagtcaattcttctggtatcactcccagtgtgtttagttttgagtgagatccccttcatgtcaacctggttcctgcttgtgtctacatttagcatgcttcccctattacttaaagacgaactgctaatgccctccgtagtcacgactatggcattttttatcgcatgcgtgacctcgttttcaattttcgaaaagacgtcggaggaggagcttcagctgaaatcctttagtatcagcgttcggaaatatctaccttgcttcactttcctgtctcggataatacaatacctgtttctcattagtgtcattaccatggtgttgctcactctcatgaccgtaaccctggatcctccgcagaagcttcccgacctcttttctgtgctggtttgtttcgtcagttgcctcaactttctgttctttctggtgtattttaatatcattataatgtgggactcaaaaagtggacgtaaccaaaaaaagatcagctag

SEQ ID NO: 179565 - DNA, 1524 bp, synthetic construct
  misc_feature 1..1524: note = Description of Artificial Sequence: Synthetic coding sequence
  source 1..1524: mol_type = other DNA
atggagaagtggtacctgatgaccgtggtggtgctgatcggcctgacggtgagatggactgttagtctgaatagctacagcggtgccggcaagccacccatgttcggagactacgaggcccaacggcactggcaggaaataacttttaatctgccagtgaaacaatggtactttaatagttcagacaataacttgcagtactggggtcttgactacccccctctgacggcttaccactctttattgtgcgcttacgtcgccaagttcattaaccctgactggatcgctcttcacacaagtcggggatacgagagccaagctcataagttatttatgaggacgactgtgctcattgcagatctcctgatttatattcccgcagtcgtactgtactgctgctgtttgaaagagatatcgacaaaaaagaaaatcgcaaacgctctgtgtatcctgctgtacccggggctcatactgatcgactacgggcatttccagtataactctgtgagtctggggttcgcgttgtggggagtgttgggaatctcatgcgattgcgatctccttggctccctcgccttctgtctagctattaattataagcagatggagctgtaccatgctttgccattcttctgttttctgctcggaaagtgcttcaagaaaggtctgaaaggaaagggatttgtactcctcgtgaagttagcttgtatcgtggtagcatcctttgtgctttgttggctacctttttttactgaacgcgagcaaactctccaagtattgaggcggctctttcccgtcgacagaggtctcttcgaagataaggttgcaaacatctggtgctccttcaatgtgtttctgaagattaaagatattctgccccgacacattcagttgattatgtctttttgtagcaccttcttgagtttactgcctgcttgcataaagttgatcctgcagccctcctcaaagggattcaaatttacccttgtctcttgtgccctgagtttctttctcttttcttttcaggtgcacgagaaatcaatcctgcttgtttctttgccagtgtgcctggtcttgagtgaaattccgtttatgtccacttggtttctgctggtgagtactttttcgatgctgccccttctgttaaaagatgaattgctcatgccttcagtcgtaactacaatggctttcttcattgcctgcgtaacttcttttagcatctttgagaagacttccgaagaggagctacaactgaagagcttttctatttccgtgagaaagtatctgccctgctttactttcctgtctaggatcatccagtacctcttcctgatctctgttatcacaatggtgctgctgactttaatgacagtgactctggatcctccccagaaattgccagacctcttctcggtgctggtctgctttgtgagttgcttgaactttctgttttttcttgtgtacttcaatattataattatgtgggactctaagagcgggagaaaccagaaaaagatatcgtag

SEQ ID NO: 179566 - DNA, 765 bp, synthetic construct
  misc_feature 1..765: note = Description of Artificial Sequence: Synthetic coding sequence
  source 1..765: mol_type = other DNA
atggagctgtaccacgccctgcccttcttctgcttcctgctgggcaaatgcttcaaaaagggcttaaagggcaaggggttcgtgctcctcgtaaaactcgcttgtattgtcgttgccagctttgttctgtgttggctgccgttttttacggagagggaacaaacgcttcaggtcctgcggcgcttattcccagtcgatcggggattattcgaggataaggtcgctaatatttggtgttctttcaacgtgtttcttaaaatcaaagatatcttgcctcgtcatattcagctgattatgcggcctgtttgtcttgtactgagtgaaatccctttcatgtcaacttggtttcttctggtgtcgacattttctatgcttccattgctgctcaaggatgaactcctgatgccttcagtggtgaccacaatggctttctttatagcatgcgtgacctcattctctatattcgaaaaaacaagtgaagaagaactgcagctgaaatccttcagtatatctgtcaggaagtacctcccttgtttcactttcctgagtcgaattatccaatacctctttcttatttctgtgatcacgatggtcctcctgaccctgatgacagtaaccttggatccgccacagaaactgcctgatctgtttagcgttcttgtgtgctttgtctcctgtctgaatttcctgttcttcctggtgtattttaatatcattatcatgtgggacagtaaatctggtaggaatcagaaaaaaatcagctag

SEQ ID NO: 179567 - DNA, 1581 bp, synthetic construct
  misc_feature 1..1581: note = Description of Artificial Sequence: Synthetic coding sequence
  source 1..1581: mol_type = other DNA
atggccgccctgaccatcgccaccggcaccggcaactggttcagcgccctggccctcggcgtcaccttgctcaagtgtctgctaatccccacctaccattctaccgacttcgaagtgcatcgcaattggctggccatcactcatagcctgcctatcagccagtggtattatgaagccacttccgaatggaccctggactaccccccattctttgcatggttcgaatacatcctctcccacgtggcaaagtactttgatcaggaaatgctcaatgtgcacaatctgaattattcatctagtcgcacccttctattccaacgcttttctgtgatattcatggatgtgctgtttgtgtatgctgtcagagaatgttgtaagtgtatcgatgggaagaaggtgggcaaggaactcacggagaaacctaaatttatattgagcgtgctcctgctttggaacttcggcttgttaatcgtggaccacatacacttccagtacaacgggtttctgtttgggcttatgttattgagcatcgctagattatttcagaaaaggcacatggaaggagcatttctgttcgcagtgctcttgcacttcaaacacatttacctatatgttgcccccgcatacggcgtgtatctgcttcgctcctactgcttcacggctaacaagccagacgggagcatcaggtggaaatccttctcctttgtgcgagtaatctccttaggactcgtagtgttcctggtctctgcactgtccctcgggccattccttgcactgaaccaactgcctcaggttttctcacgcctattcccgtttaagaggggactatgccacgcgtattgggcccccaacttctgggctctgtataacgcactcgataaggtgctcagcgtcattgggctcaagctcaagttcctggatcccaataacattcccaaagcatccatgacttccgggctggtccagcagtttcagcatacagtgctgccctccgtcaccccactggctacccttatttgtaccttgatcgcgatcctgccctccatcttttgcttatggttcaaacctcagggcccccggggcttcctcaggtgtctgacgctctgcgctttatccagtttcatgttcggctggcatgtgcacgagaaagcgattctgctggccatcttgccaatgagcctgctgagtgttggcaaagcgggcgatgccagcatctttcttatactgaccactaccggccactatagtctgtttcctttgttatttacagccccagagctgccgatcaagattttactcatgttgctgtttacaatttacagcatcagctccttgaagacgttatttcgaaaagagaaacctctgttcaattggatggagaccttttacctcctcggactaggacctctcgaggtttgttgcgagttcgtgtttcctttcacttcttggaaggtcaaatacccgtttatcccactgctgcttacctctgtatattgcgccgtcgggatcacctatgcctggttcaaactgtatgtaagtgtacttatcgactccgctatcggtaaaacaaaaaaacaatag

SEQ ID NO: 179568 - DNA, 1404 bp, synthetic construct
  misc_feature 1..1404: note = Description of Artificial Sequence: Synthetic coding sequence
  source 1..1404: mol_type = other DNA
atggccgccctgaccatcgccaccggcaccggcaactggttcagcgcactcgcgctcggggtcacactgttgaaatgtctccttatccccacttaccattctaccgacttcgaggtccaccgcaactggctggccattactcatagtctgcccatctctcagtggtattacgaagccacctcggagtggaccctggattacccaccattttttgcctggtttgaatacattttgagccacgtagccaaatattttgaccaggagatgttgaacgttcacaatctaaattattctagcagtcggaccctgctttttcaaagattttccgtaatcttcatggatgtgttgttcgtgtacgcggtacgggagtgttgtaagtgcatcgacgggaaaaaggtaggaaaggagctaaccgagaaaccgaagtttatcctgtctgtgctgctgctttggaatttcggtctgctcatcgtggaccacatccactttcagtacaacggatttttgtttggtctgatgcttctctccattgctcgcctatttcagaagcggcatatggaaggagctttcctgtttgctgtgttgctgcacttcaagcacatttatttgtatgtcgcccctgcgtacggcgtgtatctgctgaggtcttattgcttcacagccaacaagccagacgggagcattcggtggaagtcattttctttcgtgagggtaatctccctgggtcttgtggttttcctggtgtcagccctgagtctgggacccttcctggccttgaaccagttgccccaggtgtttagtaggttgtttccctttaaacggggtctgtgccacgcctattgggccccaaacttctgggccctgtataacgccctggacaaggtcctcagcgtgatagggctcaaattgaagttcctggatcccaacaatatccccaaagctagtatgacgtctggattggtccaacagtttcagcataccgtccttccttctgtgaccccactggctacgctgatctgcaccttaatcgccattctgccatcaattttttgcctatggttcaaacctcaggggccacgtggctttttgcggtgtttaactctgtgcgcgctgtcatcttttatgttcggttggcatgtgcatgagaaggcgatcctgctggctattctgccaatgtccctgctctccgtgggcaaagcgggagatgcgtcaatcttcctcatccttaccactacaggacactattccctgtttcctttgctcttcactgccccagagctcccaattaagatcctgctcatgctcctcttcacaatatattcaatttcttcgctgaagaccctctttcgacgctcatttacactggtagctcaggctggggttcagtggcatgacctgagttag

SEQ ID NO: 179569 - DNA, 1323 bp, synthetic construct
  misc_feature 1..1323: note = Description of Artificial Sequence: Synthetic coding sequence
  source 1..1323: mol_type = other DNA
atgatgctggccttcctggtgctgagcaccggcatgttctgcagcagttccgcttttctgccttcaagtttttgtatgtacacgactctgattgctatgacagggtggtacatggataaaacctcaatcgccgtcctgggagtcgctgctggcgcaatattgggatggccatttagtgcagccctgggcttgccaattgccttcgacttactcgtgatgaagcaccggtggaaatcctttttccactggtccttaatggccttgattctgtttctcgttccggttgtggtcattgatagttactactatggaaagttggtgatagcgccactaaacattgtcctctacaatgtgtttacccctcacggaccagatctctacggcaccgagccttggtatttctacctgattaacggtttcctcaacttcaacgtggcattcgccctggccctattggtgctacctctgacctctttaatggagtacttactgcagagattccatgtgcagaacttgggccatccctattggctgactctcgcccccatgtatatatggttcataatcttttttatacagccccacaaagaagagagattcctgttcccggtctatcctttaatctgcctctgcggagcagtagccttatcggctcttcagaagtgctatcattttgtctttcagaggtatcgcctagagcactacactgtgacaagcaattggctcgcactgggaactgtcttcttattcggccttctcagttttagccggtccgttgccctgttccgaggctaccatggccctcttgacttgtaccccgagttctaccgtatcgcgacagatcccaccatccacacagtgcccgaaggaagacccgttaatgtttgcgtggggaaggagtggtatcgatttcccagtagctttctgctgccggataactggcaactgcagtttatccctagtgaattccgaggacagctgccaaaacccttcgccgaaggaccccttgcgactagaattgtacctaccgacatgaatgatcagaacctggaagagcccagtcgatacatcgatatttctaagtgccactatttggtggacctggacactatgagggagaccccacgagaaccgaaatactcaagcaacaaagaggaatggattagcttagcttacaggccttttctcgatgccagtcgctcaagcaagctgttaagagctttctatgtgccttttctgagtgatcagtatactgtctacgtgaattatacgatcctcaagcctagaaaggctaagcagatccgcaagaaaagcggcggctag

SEQ ID NO: 179570 - DNA, 2535 bp, synthetic construct
  misc_feature 1..2535: note = Description of Artificial Sequence: Synthetic coding sequence
  source 1..2535: mol_type = other DNA
atggccccccggcggctgctgctggtgggcgagggcaacttcagcttcgcagccgcgctatctgaaacactagaccagagcactcagctaaccgcaacctgccttcaacgtcccgcggagcttgcccgcgaccctcttgcctgggaaaacctgcagtgtctgcgggaaagaggcattgatgttcggttcggcgtggattgtactcagttggccgatgtcttcgagctccatgaaagagagttcgatcaaatttacttcatctttccccattgtgggcggaaggccggtgtggccaagaatcgcgaactgttggccaaattttttcagagctgcgcagatgttcttgccgaggaaggagaagtgcatgtcgctctgtgtcgcgggcagggcggaactcccgccgacaaaccacagcgcgagtggcataactcttggcaagtggttgccatggccgcactcggggggttgatcctgtctgacgtgtatccgttctcatgtaaggccgtggccggatataaatgcacaggctatcgttcccaggataagtctttccacgtggaaggtgccctgaatcacatattcacgagatcgctgccattcgaggggtctcagcctcgaattttccgaatcaaactggggaatcagtggttcagctttcccgagccagaggccctggtggggaagctgaatagactggcaatggccagccgaggtgccaggcagaggctgaagggctcgggcgcgtcctccggagacactgctccagcagcagataagctgagggaattattgggctccagagaggccggtggtgccgagcatagaacagaactgtctggaaacaaggctggtcaggtgtgggctcctgagggcagcaccgcattcaaatgtcttcttagcgcccgactctgcgccgccctgctttctaatatttctgactgcgacgaaacttttaattactgggaaccaacccactatctcatatacggtgaggggtttcaaacttgggagtattctcctgcctacgcgattagaagctatgcatacttgctcctgcacgcttggccagcagcattccatgcaaggatcttgcaaaccaataagatacttgtgttttactttttgaggtgtttgcttgctttcgtcagctgcatctgcgaactgtatttctacaaagctgtgtgtaaaaagttcggcctgcacgtttctagaatgatgcttgcattcctagtgctctcaaccggcatgttttgttcttcatcagcattcctgccctcttctttttgcatgtatacaaccctgattgccatgactggctggtacatggataagaccagtatcgcagtactcggagtagcagcaggggcaatcctgggttggcctttctcagccgccttaggcctaccaatcgctttcgacctcctagtaatgaagcacaggtggaagtcgttcttccattggtctctcatggccttgattttgtttctggtccccgttgtggtgatcgatagttattattatggcaagctggttatcgccccactcaacattgtactctataacgtttttacaccccatgggcccgacctgtacgggacggagccctggtatttctatcttattaacgggtttctgaatttcaatgtggcgtttgctttggccctccttgttctgccgctgacatctcttatggagtatctcctgcagagattccatgtgcagaatcttggtcatccctactggctcacgctggcccccatgtacatctggtttattatcttcttcatccaacctcacaaagaggagcgattcttatttcccgtctaccctctgatctgcctgtgcggcgccgttgccctctccgctctgcaaaaatgctaccacttcgtgttccagcgctataggctggagcactacaccgtgacatcaaactggctagcccttggcaccgtctttttatttgggcttttatccttctctcggtctgtggcgctttttaggggttatcatgggcccctggacttatacccagagttctaccggattgcaactgatcccaccatccatacggttcctgaaggccgcccagtaaacgtgtgcgtaggtaaggagtggtaccgtttccccagctcttttcttcttccagataattggcagctgcagttcattccgtccgagtttagggggcagctgcctaaaccgttcgccgagggcccactggctaccaggatcgtgcccactgatatgaatgatcaaaacctggaggagccatctcggtatatcgacatttccaagtgccattatctggttgatctggatactatgcgcgagacaccgagagagcctaagtattctagcaataaggaagaatggatcagtctggcgtatcggccattcctcgacgctagccgatcttccaagctacttcgagccttttacgttcctttcctgtcagatcaatacaccgtgtatgttaactacactatcctgaagccacgaaaggctaagcagattaggaaaaagtcggggggttag

SEQ ID NO: 179571 - DNA, 1344 bp, synthetic construct
  misc_feature 1..1344: note = Description of Artificial Sequence: Synthetic coding sequence
  source 1..1344: mol_type = other DNA
atgatgctggccttcctggtgctgagcaccggcatgttctgcagcagtagcgcttttttgccatcttctttttgcatgtatactactcttattgctatgaccggttggtacatggataagacttccatagccgtccttggcgttgccgccggcgctattctgggatggcctttctcagctgccttggggcttccgattgcgttcgacttactcgtaatgaagcatcgatggaagtcattcttccactggtccctgatggcgctcatcttgttcctagtgccggtcgtcgtcattgattcctattactatggaaaactggtaatagctcccctaaatatcgtcttgtataacgtctttacgccccatggcccggacctgtacgggaccgagccatggtatttctatcttatcaatggcttcctaaactttaatgtggcctttgccctggccctgctggtcctgccactgactagcctgatggagtatctgctgcaaaggtttcacgtgcagaacctaggccatccgtactggttgacattggctcctatgtatatttggttcattatcttcttcatccagccccataaggaggagcgcttcctatttcccgtgtacccactcatttgcctgtgtggcgccgtggctctcagcgccctgcagcattccttcctgtacttccagaagtgttaccattttgtctttcagcggtataggctagaacactataccgtgacaagtaattggctggccctcggaaccgtctttctctttggcctgctgagcttcagcaggtctgtcgcactgttccgtggttaccatggaccactggatctgtatcccgagttttaccgcatagcgacggatcccactattcacactgttcccgaggggcggcccgtgaacgtgtgcgtcggcaaggagtggtatcgctttccctccagttttcttctgcccgataattggcagttgcagtttatcccctcagagtttaggggccagctccctaaaccattcgccgaaggccccctggctacacggatcgtccctacagatatgaacgaccaaaacctggaagagccctccagatacatcgatatctctaaatgtcattatctggtggatctcgacaccatgcgggaaaccccgcgagaaccaaagtattcgagtaacaaggaagaatggatctcgctggcgtaccgtccattcttggacgccagtcgatcttcaaagctgcttcgagctttttatgttccattccttagcgatcagtacaccgtttacgtgaactatacgattcttaagcctcgcaaagctaaacagattcggaagaagagcggcggctag

SEQ ID NO: 179572 - DNA, 1647 bp, synthetic construct
  misc_feature 1..1647: note = Description of Artificial Sequence: Synthetic coding sequence
  source 1..1647: mol_type = other DNA
atggtgctggccgagctgtacgtgagcgaccgggagggcagcgacgccacaggggatgggactaaggagaagccattcaaaacgggcctgaaagctctcatgactgttgggaaagagcccttcccaactatctacgttgattcacagaaggaaaacgagaggtggaacgttatatcaaaaagccaactcaaaaatattaagaagatgtggcatcgcgagcagatgaagtctgagagcagggaaaagaaagaggccgaagacagcctgagacgggaaaaaaacctggaagaggcaaagaagatcacgattaagaatgacccctcactacccgaaccaaagtgcgtcaaaatcggagcacttgaaggctacagagggcagagagtgaaggtattcgggtgggtccacagactccgcagacagggcaagaacctgatgtttcttgttcttcgggacgggacgggttatctgcagtgtgtcctggccgacgagctctgccaatgttacaatggggtcctgctaagcactgagtctagtgtagctgtgtacgggatgctgaacctaacgcccaaggggaagcaggcacctgggggacatgaactgagctgcgacttctgggaattgattggattggcccctgcaggtggtgcggataacctgatcaacgaggaatccgatgtcgatgtgcagctgaacaatcggcacatgatgatccgaggggagaatatgtctaaaatcctcaaggcccgctccatggtgaccaggtgttttcgcgaccatttcttcgatcgtggttattacgaggtcaccccccctaccttggtacagacccaagtcgaaggcggagccactctcttcaagctcgattatttcggcgaagaagccttcttgactcagagctctcaactgtacctggaaacctgtttgcccgcccttggcgatgtcttttgtatcgcccagtcctaccgcgcagagcagagccgtacccgaagacacttggcagagtacacacacgtcgaagcagagtgcccattcttgacctttgacgatctgctcaacagactcgaagatttggtttgcgacgtggtggataggatcctgaaatccccagcaggcagcattgtgcatgaattgaaccccaatttccagccacccaagcggccatttaaacgcatgaattactcagacgcgattgtctggctgaaagaacacgatgtgaaaaaggaggatggaaccttctatgagttcggtgaagacattcctgaggccccggaacgacttatgacagacacgattaacgaacctattctcctttgccgattcccagtggaaatcaaaagcttctacatgcaacgttgccctgaggatagccgtctgacagaatcagttgacgtgctgatgcccaacgtaggggaaatcgttggaggttcaatgaggattttcgatagtgaggagatccttgctggatacaaacgcgaaggtatcgatccaaccccttactactggtacaccgaccaacggaagtacggaacatgccctcatggtggatacggtctggggctggagcgatttctgacttggatcctcaacagataccatatacgcgacgtctgtctgtatcctcggtttgtgcaaaggtgtaccccgtag

SEQ ID NO: 179573 - DNA, 765 bp, synthetic construct
  misc_feature 1..765: note = Description of Artificial Sequence: Synthetic coding sequence
  source 1..765: mol_type = other DNA
atgaccgtgggcaaggagcccttccccaccatctacgtggacagccagaaggaaaatgaacggtggaatgtgatatccaaaagccagctcaaaaacatcaagaagatgtggcatagggagcaaatgaagagtgaatctagagaaaagaaggaggccgaagattccctaaggcgggagaagaacttggaggaagctaaaaaaattactatcaaaaacgaccccagccttccagagccaaaatgcgtgaagataggggctttggagggatatcgcggccagcgcgtgaaggtgtttggctgggtgcatagactccgtcgacagggcaaaaacttaatgtttttagtgttacgcgatgggacaggatacctgcagtgtgtgctcgcagacgaattatgccaatgctacaacggagtcctgctctccactgaatccagcgtggctgtgtatggaatgctaaatctcacccctaagggcaagcaagctccaggtgggcacgagctgtcatgcgacttttgggagctgataggccttgctcctgctggcggagccgataatctgatcaatgaggaatctgatgtcgatgtgcagctgaacaatcggcacatgatgataaggggagagaacatgtcaaaaatactaaaggcaagatccatggtgacacgctgcttccgagatcacttctttgaccggggctattatgaagtttcaatgcactcgtccgctttcgcgaagaacatgttctttgccgtgctcaaactcgagtag

SEQ ID NO: 179574 - DNA, 900 bp, synthetic construct
  misc_feature 1..900: note = Description of Artificial Sequence: Synthetic coding sequence
  source 1..900: mol_type = other DNA
atgtgcgaggactggtgcttccgggaccacttcttcgaccggggctactacgaggtcaccccacccacccttgtgcagacccaagtggaaggcggagctaccctttttaaactggactattttggagaagaagcttttctgacacagtcgtctcagctttatctggaaacatgcctgcccgcactaggcgacgtgttctgcatcgcacagtcatatcgcgccgaacaatcccgcacacgtcggcatctggccgaatacacccatgttgaagctgaatgtcctttcctgacctttgatgatcttctcaacagacttgaagacctggtgtgcgacgtggtcgaccggattctgaagagcccggcaggctccattgtccacgaactgaaccccaatttccagccaccaaagcgacctttcaagaggatgaattactccgatgcaatcgtgtggctgaaggagcatgatgtgaaaaaggaggacggcacgttctacgagtttggagaagacatacccgaagcccctgaaagactgatgacagacaccatcaacgagccaatactactctgccgctttcccgtcgagatcaagtcattttacatgcagcggtgtccggaagactcaagacttaccgaaagcgtcgacgtcctgatgcctaacgttggggagattgttggcgggtctatgcgcatatttgactcagaggagatcctggctggctacaagagagagggtatcgaccctactccctattactggtataccgaccagcggaagtacgggacctgtccacatggaggatacggactgggcctagaaaggtttctaacctggatcctcaataggtaccatatcagagatgtttgcttatatccccggtttgtgcaacgatgcaccccctag

SEQ ID NO: 179575 - DNA, 525 bp, synthetic construct
  misc_feature 1..525: note = Description of Artificial Sequence: Synthetic coding sequence
  source 1..525: mol_type = other DNA
atggtgctggccgagctgtacgtgagcgaccgggagggcagcgacgctaccggagacggaactaaagaaaaaccttttaagaccggcttaaaagctttaatgaccgtggggaaggagccgttcccaacgatctacgtggatagccagaaagagaacgaacgctggaatgttattagcaagtcccagctaaagaatattaagaagatgtggcatcgcgagcagatgaaatccgagtcacgagaaaaaaaggaggctgaggattcactgcgcagagaaaagaacctcgaggaagctaaaaagataaccatcaagaatgatccgagtctccccgagcctaagtgcgtcaagattggggccctggaagggtacaggggccaaagggtcaaagtctttgggtgggtgcaccgcctccggcggcaagtcagcgtcctacaatggtctagcctagtgcacggtgaacaatgctgttccgtttggaacgcgaagagctatcccaaggggcaggctggatcaagatggccctag

SEQ ID NO: 179576 - DNA, 1434 bp, synthetic construct
  misc_feature 1..1434: note = Description of Artificial Sequence: Synthetic coding sequence
  source 1..1434: mol_type = other DNA
atgctgggcgtgcggtgcctgctgcggagcgtgcggttctgcagctccgcaccattccccaaacataaaccatccgcgaaactgagcgttagagatgcccttggagcgcaaaacgcgtccggagagaggatcaaaatccagggctggattcggtccgtgcggagccagaaggaggtcttgttcctacacgtgaatgacggaagctccttagagtcattacaagttgttgccgactccgggttggacagcagggagttgaattttggctccagtgtggaggtgcaaggtcagcttatcaagtcgcccagcaaacgacagaacgtcgagctcaaagccgaaaaaatcaaggtgattggcaattgtgatgccaaagactttcccattaagtacaaggagcgccacccacttgagtatctaaggcagtacccgcacttccgctgccgaaccaatgtccttggtagcatcctgcgaattaggtccgaagctacagccgcaattcactcttttttcaaggactctgggttcgtgcacatccacactcccattatcacctcaaacgactcagagggcgctggcgaactcttccagctggaaccatcaggtaaactgaaggtccctgaggagaacttcttcaacgttcctgcctttctcactgtcagtgggcaacttcacctcgaggtgatgtctggcgcttttacacaggtgtttacgtttggccccacctttcgggcagagaattctcaatcacggaggcatctcgcagagttttatatgattgaagccgagattagcttcgtcgactctttacaagacctcatgcaggtaattgaagagctgttcaaggctacaaccatgatggtgctatctaaatgtcccgaggatgtcgagctctgccataagtttatcgctcctggccagaaagacaggctcgaacatatgcttaagaataactttttgattattagctacacggaggcagtcgaaatactgaagcaggccagtcaaaattttacttttacacctgaatggggagccgacctgaggacagaacatgagaaatacctcgtgaagcattgcggaaatatccctgtgttcgtgataaattaccctcttaccctgaagccattttacatgcgggacaatgaagatgggccgcagcataccgtggctgcagtggaccttctggtccccggagtgggggaattatttggtgggggcctaagagaggaacgctaccactttctcgaggaaaggctggccaggagcggcctgactgaagtctatcagtggtatctggacctgaggcggtttggaagtgtcccccacggcgggttcggcatggggttcgaacgttacctgcagtgtatcctgggtgtggataatattaaagatgtcattccatttccgaggttcccccactcctgcctgctttag

SEQ ID NO: 179577 - DNA, 942 bp, synthetic construct
  misc_feature 1..942: note = Description of Artificial Sequence: Synthetic coding sequence
  source 1..942: mol_type = other DNA
atggcccagcggaagaacgccaagagcagcggcaacagcagcagctccggctcaggcagcggatcaactagcgccggatcatcaagtccaggggcccgcagggagacaaagcacggagggcataagaatgggcgaaaaggtggtctgtccggaacaagttttttcacatggtttatggtcatcgcactgctcggggtctggacgagcgtcgctgtcgtgtggttcgacctggtagattacgaagaggttctagggaagcttggtatttacgatgccgatggggacggcgacttcgacgtcgacgacgccaaggtgcttctgggcctgaaagaaaggagcacaagcgaacctgccgtcccaccagaggaggctgaaccgcacactgaacccgaagagcaggttcctgttgaagctgagccgcaaaacatcgaagacgaggctaaggaacagattcaatccctgcttcatgaaatggtgcacgctgagcatgtggaaggcgaggatttgcagcaggaagacgggcccacaggggaacctcaacaggaagacgacgaatttttaatggcgacagatgtggatgaccgcttcgaaacccttgaacccgaagtcagccacgaagagacagaacacagctatcacgtcgaagagaccgtcagtcaagactgcaatcaggacatggaagagatgatgtctgagcaggagaaccccgactcgagcgagccagtggtcgaggatgagaggctgcaccatgatactgacgacgttacctatcaggtgtatgaggaacaagctgtttacgagcccttagagaacgaggggatcgaaataacggaggtaaccgccccccctgaggacaatccagtcgaagattcacaggtcatcgtggaggaggtttctatctttcccgtggaggagcaacaggaggtcccacctgacacctag

SEQ ID NO: 179578 - DNA, 612 bp, synthetic construct
  misc_feature 1..612: note = Description of Artificial Sequence: Synthetic coding sequence
  source 1..612: mol_type = other DNA
atggcccagcggaagaacgccaagagcagcggcaacagcagcagcagcggctctgggtctgggtctacaagtgctggctcttcgagtccgggtgctcggagagaaacaaagcatgggggccacaaaaatggccggaaggggggcctgagcggaacctccttttttacatggtttatggtgattgcactgcttggcgtctggacatccgtggcagttgtgtggtttgacctggttgattacgaggaggtattggctaaagctaaggattttaggtacaacctgagcgaagtactccagggtaaactgggtatttatgatgctgacggcgacggggacttcgacgtggatgatgctaaggtgttactgggactgaccaaagacggatctaatgaaaacatcgactcactggaagaggtactgaacatactagccgaagaaagcagcgactggttttatggcttcctgagtttcctttacgacatcatgactccatttgagatgctagaagaggaagaagaggaatctgagacagcggatggagtggatggcacatcccagaatgagggcgtgcaaggtaaaacttgcgtgatactggatctccacaaccagtag

SEQ ID NO: 179579 - DNA, 2277 bp, synthetic construct
  misc_feature 1..2277: note = Description of Artificial Sequence: Synthetic coding sequence
  source 1..2277: mol_type = other DNA
atggcccagcggaagaacgccaagagcagcggcaacagcagcagctccggaagtggatctgggtcaacctctgcagggtcttcctctcccggagctcgcagggagactaaacacggcgggcacaaaaacgggaggaaaggaggtctgtccggtacaagctttttcacctggtttatggtgattgccctcttgggagtctggaccagcgtggcggtcgtctggttcgacctagtcgactacgaagaggtcctaggtaagttgggtatatatgacgccgacggcgatggcgactttgatgttgatgacgctaaggtcctgctgggactgaaggaacgaagtaccagcgagcccgcagtgccacccgaagaggccgagccgcacacagaacctgaggagcaggtgcctgtcgaagccgagccacagaatatcgaggatgaggcaaaagagcaaatccagtcactgctgcacgaaatggtgcacgccgagcacgtggaaggcgaggacttgcagcaggaggacggacccacaggtgagccccagcaggaggacgacgaatttttgatggctaccgatgttgacgatcgcttcgagactctggaaccagaagtctctcacgaggagactgagcactcataccatgtggaagagactgtgagtcaggattgtaaccaggatatggaagagatgatgagtgaacaggagaacccagatagtagtgaacctgtagtggaggatgaacgactccaccatgacacagacgacgtaacttaccaggtgtatgaggaacaggctgtttatgagcccttggagaacgagggtatcgagataactgaggtgacagctcctcctgaggacaatccagtggaggactcacaggttatcgttgaggaagtgagcatcttccccgtcgaggaacagcaggaagttcctccggagactaaccggaagacagacgacccagagcagaaggctaaagttaaaaagaagaaaccgaagctgctgaataagtttgataagactattaaagccgagttggatgccgcagagaagctgcgaaagcgaggcaaaatcgaggaggcagtgaacgcatttaaggaactcgttcggaagtatccacagagtccacgtgcccggtacggaaaggcgcagtgcgaagatgatctggccgaaaagcggagaagcaatgaggtcctgagaggggccatcgaaacttaccaggaagtggcctctctccccgatgtgccagcggaccttctgaagctgtcgctgaagaggaggagcgacagacaacagttcctgggacatatgcgcggaagtcttttgacactacaacggctggtccagttgttcccgaacgacacctcattgaagaacgacctgggggttggatatttacttattggagataacgataatgctaaaaaagtatatgaagaggtcttatccgtgacccccaacgacgggtttgcaaaggtacattacgggtttatccttaaggcccaaaataaaatagctgagagcattccctacctgaaggaggggatcgagtctggcgatcccggaacagatgacgggagattctattttcacctgggggacgccatgcagcgtgtgggtaataaagaagcttataagtggtacgagctgggacataagaggggtcactttgcctccgtttggcagcggagtttgtacaacgtgaacggtctgaaagcccagccatggtggaccccaaaagagacagggtacacagagttggtgaaatccctcgagagaaactggaaactgattcgcgacgagggactggcagtcatggataaagcgaagggtctctttctgcctgaagatgagaatctgagggagaagggggactggtcccaatttaccctatggcagcaggggcggcggaatgagaacgcctgtaagggcgcgcctaagacatgcacactgctggaaaagttcccagagaccaccggctgcagacgtggccagatcaaatattcaataatgcatcccggaacgcacgtatggccccacactgggcccaccaattgtagactgagaatgcacctcggtttagtgatccctaaagagggctgcaagattagatgtgccaatgagacaaagacttgggaagagggtaaagtgctgatctttgacgactcatttgagcacgaggtgtggcaagatgctagcagcttccgcctgatctttattgttgacgtatggcacccagaattgacgccacagcagaggagatccctgcccgcaatctag

SEQ ID NO: 179580 - DNA, 678 bp, synthetic construct
  misc_feature 1..678: note = Description of Artificial Sequence: Synthetic coding sequence
  source 1..678: mol_type = other DNA
atggccgaggacaaggagaccaagcacggcggccacaagaacggccgtaagggcggcctgtcaggcactagcttctttacatggtttatggtcatcgcgctactgggcgtgtggacctctgtggccgtggtttggttcgatctggttgattatgaagaggtgctggctaaagccaaggacttcagatacaacctgtccgaggtgcttcagggcaaattaggaatttatgacgctgatggtgacggcgatttcgatgtagacgatgctaaggtgctccttgaggggccgtccggcgtggcaaaaagaaagactaaagccaaggtgaaggagctgacaaaggaagagctgaagaaagagaaagagaagcctgagagccgcaaggagtcaaagaacgaggaacgcaagaaggggaaaaaggaggatgtccggaaggataaaaaaatagcggatgctgatctgagcagaaaagagagtccgaagggcaaaaaggaccgggaaaaggagaaagtcgacctggagaagagtgcgaaaacaaaggagaaccggaagaagtcaacgaacatgaaggatgtatccagcaagatggcttctcgggacaaagatgataggaaggaatctcgtagcagtacccgctacgcccacttaactaaaggtaacacacagaaacggaacggctag

SEQ ID NO: 179581 - DNA, 1290 bp, synthetic construct
  misc_feature 1..1290: note = Description of Artificial Sequence: Synthetic coding sequence
  source 1..1290: mol_type = other DNA
atggcccagcggaagaacgccaagagcagcggcaacagcagcagctccggctctgggtctgggtcaacatccgccggatccagcagtccaggtgctcggagggaaacgaaacacggaggtcacaaaaatggaaggaagggcgggttaagtggcaccagtttttttacatggttcatggtcattgctcttttaggcgtctggacgagcgtggcggtcgtctggttcgatcttgtcgactatgaggaagtgctggggaaactcggaatctatgacgcagatggggacggagactttgacgtggacgacgctaaagtccttctcggtctgaaggagaggtcaacaagcgagccagctgtgccccctgaggaggccgagccccacaccgaaccggaggagcaggtcccagtagaggcagaaccccagaatatcgaggacgaggcaaaggagcagatccagtccctgctgcacgagatggtgcatgccgagcacgttgagggagaggacctccagcaggaagacggccctacaggtgagccccagcaggaagatgatgaattcctgatggcgaccgatgtggatgatcgtttcgaaactctcgagcccgaagtttcacatgaggagacggagcattcttaccacgtagaagaaactgattccagcgaacccgtcgttgaagacgaaaggctgcaccatgataccgatgatgtcacgtaccaagtgtacgaagagcaagcagtctacgagcctttagaaaatgagggaatcgagataaccgaagtgaccgctccccccgaagacaacccagttgaggacagccaggtcatagttgaagaagtttcaatctttccagtcgaagagcagcaggaagtgccccccgaaacgaatcgaaagactgatgaccccgaacagaaagccaaagtgaagaaaaagaaaccaaaacttctgaataaatttgataagaccattaaggctgagttggacgcagccgagaagctccggaaacggggaaagatcgaggaagctgttaacgcattcaaggaattggtccgcaaatacccacagagtcctagggcccgctacggcaaggcacagtgtgaagatgacttagcagagaaacgacgcagtaatgaagtactgagaggagccatcgagacatatcaggaggtggccagcttgccagacgtgcccgcagacttgttaaaattgtccctgaaaaggcgaagtgatcgtcaacagtttctgggccatatgagagggtctcttctgacactgcagcgtctggttcagtag

SEQ ID NO: 179582 - DNA, 900 bp, synthetic construct
  misc_feature 1..900: note = Description of Artificial Sequence: Synthetic coding sequence
  source 1..900: mol_type = other DNA
atggccgaggacaaggagaccaagcacggcggccacaagaacggcaggaagggaggactctctgggacctccttctttacgtggtttatggtgatcgctctgctcggcgtgtggacctccgttgcagtggtttggtttgatcttgtggattacgaagaggtcctcgccaaagcaaaggatttccgctacaacttgtctgaggtgttgcaaggaaagcttggaatatacgacgccgacggggacggagatttcgatgtggatgatgcgaaagttctgctgggcctgaaagagaggagcacctccgaacctgccgttccccccgaagaagctgagccccacacagaacctgaggaacaggtgcctgtagaggccgaaccacagaacatcgaagatgaagcaaaggagcagatacagagcttattacatgaaatggttcacgccgagcacgtcgagggtgaagatttgcagcaggaagatgggccaactggtgagccacagcaggaagatgatgaattcctaatggctactgatgtggatgaccggttcgagactctggaaccagaggtgagccatgaggagaccgaacacagttatcatgtggaagagaccgtgagccaggactgcaatcaggacatggaggagatgatgtccgagcaagaaaaccctgatagcagcgagcctgtggtagaggacgaacggctgcatcatgacacagacgacgtcacgtatcaggtctatgaggaacaggctgtgtatgaaccattagaaaacgaggggattgagattacggaggtcacagcgcctcccgaggataaccctgtcgaggactcccaggtgatcgttgaagaagtgtccatctttcctgtcgaagagcagcaggaagtgcccccggatacttag

SEQ ID NO: 179583 - DNA, 900 bp, synthetic construct
  misc_feature 1..900: note = Description of Artificial Sequence: Synthetic coding sequence
  source 1..900: mol_type = other DNA
atggccgaggacaaggagaccaagcacggcggccacaagaacggccgtaagggcggcttgtcagggacgtccttcttcacgtggtttatggtcatcgcactgttaggtgtatggacctctgttgccgtggtttggttcgatctggttgactacgaggaggttctcgccaaggcaaaagatttccggtataatcttagcgaggtgctgcagggcaagctcggaatatatgacgccgacggggacggggattttgatgttgatgacgccaaggttttgctgggcctgaaggaacggtcaacatctgagccagcagtgccaccagaggaggccgaacctcacacagaacccgaggaacaggtgccagtagaagccgaaccgcagaatattgaggacgaagcaaaagaacagattcagtccttactgcacgagatggtccatgctgaacacgtggaaggcgaagatctccaacaggaggatggccccacaggtgaaccacaacaggaagacgatgaattccttatggccacagacgtggacgatcggtttgagaccttagagccggaagtgtcccacgaggaaacggagcacagttaccacgtcgaggaaactgttagtcaggattgtaatcaggacatggaggagatgatgagcgaacaagagaatccagacagctcagagcccgtggtggaagatgaaaggctccatcacgacaccgatgatgtgacttatcaggtatacgaagaacaggccgtttatgagcctctggagaacgaaggaattgagattaccgaggtgaccgcgccacccgaggacaaccccgtcgaggatagtcaggtgattgtggaggaggtgtccattttccctgtagaggagcagcaagaggtgcccccagacacgtag

SEQ ID NO: 179584 - DNA, 897 bp, synthetic construct
  misc_feature 1..897: note = Description of Artificial Sequence: Synthetic coding sequence
  source 1..897: mol_type = other DNA
atggccgaggacaaggagaccaagcacggcggccacaagaacggccgaaaaggagggctgtccggaaccagcttcttcacatggttcatggtgatagccctgctgggggtctggacaagtgtggcagtggtctggttcgacctggtggactacgaggaagtgctcgctaaggccaaggacttccggtacaatttatctgaggttctccaagggaagctcggcatctatgatgctgacggtgatggagatttcgatgtcgatgatgcaaaggtgttactcgggttaaaagaacggagcacatccgaacctgccgttcctcctgaggaggccgaaccccatacagagccagaggaacaggttcccgtggaggcggagcctcagaacatcgaggatgaggcaaaggaacaaattcagagtctgctccatgaaatggtgcacgctgaacatgtggaaggagaagatctccagcaagaggacggaccgacaggcgaacctcaacaggaagacgacgagttcctgatggctaccgatgttgacgacagattcgaaaccctcgagcctgaagtgtcacacgaggagaccgagcatagctatcatgtggaggaaaccgtaagccaggattgtaaccaggatatggaagagatgatgtcggagcaggagaatcctgatagctccgaaccagtcgtggaggacgaaaggttgcaccatgatacagatgatgtcacgtaccaagtttatgaggaacaggtatatgagcccctggagaatgaggggatcgagattacggaagtaactgccccaccagaggacaatcctgttgaagattcacaggtgattgtcgaggaagtgtccatatttccggtcgaagagcaacaggaggtgcctccagacacatag

SEQ ID NO: 179585 - DNA, 813 bp, synthetic construct
  misc_feature 1..813: note = Description of Artificial Sequence: Synthetic coding sequence
  source 1..813: mol_type = other DNA
atggcccagcggaagaacgccaagagcagcggcaacagcagcagctcaggatctggttctgggagtacctctgccggctcttcttcgccaggcgcccggcgggagacaaagcacggtggacacaaaaacgggcgcaagggagggctgtctggaaccagtttttttacatggtttatggtcattgccctcctgggggtctggacatctgtggccgtggtatggttcgacttggttgactacgaagaagttctaggcaaactgggaatttacgacgctgacggcgatggagacttcgatgtggatgacgccaaagtgctcctcggtctcaaggaacgcagcaccagcgagccagcagttccccctgaggaggcagaaccccacacggagcctgaagagcaggtgcccgtggaggcagagcctcagaatatagaggatgaagcaaaggagcagatccaaagcctgttgcatgagatggttcacgccgaacacgagaccgagcatagttatcatgtggaggaaacagtctcccaggattgcaatcaggatatggaagagatgatgtcagagcaggagaatcctgatagttctgagcccgtggtggaggatgagcggttgcatcatgacaccgacgacgtcacatatcaggtgtacgaagagcaagccgtgtatgaacctctggagaacgaaggaattgagataactgaggttactgcaccccctgaggataaccctgtggaagacagtcaggtgattgtggaggaagtctctattttcccagttgaagagcagcaggaagtcccaccagacacgtag

SEQ ID NO: 179586 - DNA, 633 bp, synthetic construct
  misc_feature 1..633: note = Description of Artificial Sequence: Synthetic coding sequence
  source 1..633: mol_type = other DNA
atggccgaggacaaggagaccaagcacggcggccacaagaacggcagaaagggcggactcagcggcacctcatttttcacttggtttatggttattgcactacttggtgtttggactagtgtggccgtggtgtggtttgaccttgtcgattatgaggaggtgctcgggaagctgggcatctacgatgcagatggtgatggagatttcgacgtggacgatgctaaagtgctcctcgagggaccgtcaggagtggccaaacggaaaaccaaggccaaagttaaagagctgaccaaggaggaattgaaaaaggagaaggaaaaacccgagagtcgaaaagagagtaagaacgaagaacgtaagaagggaaaaaaggaggacgtgcgaaaggacaaaaaaattgctgacgccgacctctccagaaaggaaagtccaaaagggaaaaaggaccgcgaaaaagaaaaagtcgacctggagaagagtgccaagactaaagagaacaggaagaaaagcacaaatatgaaggatgtgagtagtaagatggccagcagggacaaggacgatcgcaaagaatcgaggagctcaactcggtacgctcatctgacgaagggcaatacacagaagcgtaatgggtag

SEQ ID NO: 179587 - DNA, 771 bp, synthetic construct
  misc_feature 1..771: note = Description of Artificial Sequence: Synthetic coding sequence
  source 1..771: mol_type = other DNA
atggccgaggacaaggagaccaagcacggcggccacaagaacggcaggaaaggcggcctgtccggaactagctttttcacctggttcatggtgattgctttgcttggggtctggacgtctgtggcagtggtctggtttgacctcgttgattacgaagaagtgctggccaaggctaaagattttcgctataacctgagtgaggtgcttcaggggaagctaggtatttacgatgcagacggcgacggcgattttgacgtggacgacgctaaagttcttctggggctgaaggaaagaagtacctcagagcctgccgtgcctccggaagaggccgagccccatacggagcctgaagagcaggtgccagttgaagcagagcctcagaacatcgaagacgaggcaaaagagcaaattcagtccctgctccacgaaatggtgcacgcagagcacgagactgaacactcataccatgtggaggagacagtgtcacaggactgtaatcaggatatggaagagatgatgtcggagcaggaaaatcccgattctagtgagcctgtggttgaagacgaaaggctgcatcacgacaccgacgacgtaacctaccaggtctacgaggagcaggcggtgtacgagcctctcgagaatgagggtattgagataacggaagtcactgcccctcctgaggataaccccgttgaagacagtcaggtcatagtggaagaggtgtcgatcttcccggtggaagagcagcaggaggtccctccagatacctag

SEQ ID NO: 179588 - DNA, 2190 bp, synthetic construct
  misc_feature 1..2190: note = Description of Artificial Sequence: Synthetic coding sequence
  source 1..2190: mol_type = other DNA
atggccgaggacaaggagaccaagcacggcggccacaagaacggcagaaagggcgggctctctggtacaagcttctttacctggtttatggtcattgctctgctgggtgtttggacctcggtcgccgtggtgtggtttgatttagtcgattacgaggaggttttgggcaaacttggcatctatgacgcagacggtgatggcgatttcgatgtcgatgatgcaaaggttctgcttggcctcaaggaacgaagtacttctgagcccgctgtgccacccgaggaggccgaacctcataccgagccagaggagcaggtgccggtggaagccgagcctcagaatatcgaagacgaggctaaggagcagattcagtctcttctgcatgaaatggtgcacgccgagcatgtcgagggagaagatttgcagcaagaggacggccccacaggagagcctcaacaggaagacgatgagtttcttatggctaccgatgtcgacgataggttcgagaccctggagcctgaagtgtcacacgaggagacagaacacagttatcacgtcgaagaaaccgtgtcacaagactgtaaccaggacatggaggaaatgatgagtgagcaagaaaaccccgatagcagcgagcccgtagtggaagatgagagacttcaccacgacaccgatgacgtgacttaccaagtgtacgaggaacaagccgtgtatgaaccgctggagaacgagggtatcgaaatcacggaggtgaccgccccccccgaggacaaccctgtggaagacagtcaggtaattgtggaggaagtatctattttcccggtggaggaacaacaggaagtgcccccagaaaccaacagaaagaccgatgatcctgaacaaaaggccaaggtcaagaagaaaaagcctaagttgctgaataaatttgataagaccattaaggccgaattagatgcagcggagaagctgcgcaagaggggcaagattgaggaagccgtcaacgccttcaaggaattagtgcgcaagtatcctcagagcccccgggcgcggtatgggaaggcccaatgcgaggacgatctggccgaaaagcggagatcgaacgaggttcttaggggtgccattgaaacctaccaagaggtagcaagcctacctgacgtgcctgcagacctactcaagttatcactgaagaggcggtccgatagacaacagttcctaggacatatgaggggctccctgctgacactccaaagactcgtgcagctgtttccaaacgatacgtcactaaaaaatgacctcggagtggggtatcttttgattggggataatgacaacgcaaaaaaagtgtacgaggaagtgctctccgtcactccgaatgacggcttcgccaaggtgcattatggttttatattaaaggcccaaaataagattgcagaatcaattccatatctgaaggaaggaatagagtcaggtgaccccggcaccgacgatgggaggttttattttcaccttggagatgctatgcaacgggtcggcaataaggaagcttataaatggtacgaattagggcacaaaaggggccattttgcctctgtgtggcaaaggtccttgtataacgtgaacggcttgaaggcccagccatggtggaccccgaaagagacgggctacaccgagttggtcaaaagcctggaaaggaactggaagctcattcgggatgaaggtcttgccgtgatggacaaagcgaagggcctctttttgcccgaagacgaaaatctccgagaaaaaggagattggtcccagtttacattatggcagcagggccgacggaacgagaacgcatgcaaaggtgcccccaagacgtgtaccctgctcgagaagtttcctgaaactaccggctgtagacgaggtcagatcaagtactcaataatgcatcctggcacgcacgtgtggccgcacactggaccaaccaattgtcgcctgagaatgcacctgggcctggtgatcccaaaagaggggtgcaaaatccgatgcgccaacgaaacaaaaacctgggaggaagggaaagtgctgatctttgatgatagttttgaacacgaagtgtggcaagatgcctcaagcttcaggctcatatttattgtggatgtgtggcatccagaactgacaccccaacaacgccgcagtctgccagcaatctag

SEQ ID NO: 179589 - DNA, 1032 bp, synthetic construct
  misc_feature 1..1032: note = Description of Artificial Sequence: Synthetic coding sequence
  source 1..1032: mol_type = other DNA
atgggcagccccggcgccagcctgggcatcaagaaggccctgcagagcgagcaggccactgctctgcctgcaagcgctcccgccgtaagccagccaacagcgcccgcgccttcttgtctccccaaggcgggacaggttataccgaccctgctcagagaagcccctttttcttcagtgatcgcaccgaccctgctttgtgggttcttgtttctggcatgggtagccgcggaggttccagaggaaagctcccggatggccggctctggcgctagaagtgaggaaggcaggagacaacatgcattcgtgcccgagccctttgatggcgctaacgtcgtgcctaacctgtggcttcactcgtttgaggtcatcaacgacctgaaccattgggaccatatcaccaaactcaggttcttaaaagagtcacttaggggcgaggcactgggagtgtataacagactgagcccccaggaccagggagactacggtactgtgaaggaggcccttctcaaggcttttggagtcccaggcgcagcacccagtcatcttcctaaagaaatcgtgttcgctaactccatgggcaaggggtactacctcaaagggaagatcggtaaggtgccagtgcgtttcttggtcgacagcggtgcccaggtaagcgttgtacatcctaacctctgggaggaagttacggacggggacctcgatactctccaacctttcgaaaatgtggtgaaggtggccaatggggccgagatgaaaattctgggggtgtgggacactgcagttagtctggggaagttaaagctgaaagcccagtttctcgtggccaacgcctccgcagaagaagcaatcattggtaccgacgtgctccaggaccacaacgctattctggacttcgaacatcggacctgcaccctgaaaggaaaaaaatttcgtctgttacctgtcggggggtcgctggaggatgagtttgatctggagctaattgaggaggaccccagctcggaagagggcaggcaggagctgtcacattag

SEQ ID NO: 179590 - DNA, 960 bp, synthetic construct
  misc_feature 1..960: note = Description of Artificial Sequence: Synthetic coding sequence
  source 1..960: mol_type = other DNA
atgtgcagcctgcccgtgccccgggagcccctgcggcgggtggccgtgacagggggtacacacggtaacgagatgtccggagtgtaccttgctaggcactggctgcacgctcctgcagaactgcagcgggctagcttcagcgcagtgccagtcttggccaacccagccgctacttccggatgcagacgctatgttgaccacgatctgaacaggacattcacgagctcctttcttaacagtcggcccacgcccgacgatccctacgaggtcaccagagctagagaattgaaccagctgctgggtcctaaggcttccggtcaggcatttgacttcgtattagacctacacaacaccactgccaatatgggcacatgtttaatagccaagagctctcatgaagtctttgccatgcacttgtgtcgacatctccagctgcagtacccagaactaagctgtcaagtgttcctctaccagagaagtggcgaagagagttataatctagattccgtggcaaaaaatggtctcgggctggaacttggacctcagccgcagggcgtgctcagagcagacatcttctctcgtatgcgtaccctggtggcaactgtgcttgacttcatcgagctgtttaaccaggggaccgccttccccgccttcgagatggaagcttaccgaccagtcggtgtcgtggactttccacgcaccgaagccggacacctggccggtactgttcatccgcaactccaggaccgcgatttccagccactgcagcctggagctccgatcttccaaatgttctcgggtgaggaccttctctacgagggagaatccacagtgtatcctgtttttatcaacgaggccgcttactacgaaaaaggggtggcatttgtccaaacagaaaagtttacctttaccgttccggctatgccagcgctgactccagctcccagccccgcctcctag

SEQ ID NO: 179591 - DNA, 1041 bp, synthetic construct
  misc_feature 1..1041: note = Description of Artificial Sequence: Synthetic coding sequence
  source 1..1041: mol_type = other DNA
atggcccggaagagcaacctgcccgtgctgctggtgcccttcctgttgtgccaagctctggtaaggtgtagttcccccctgccactggtcgtaaacacatggccttttaaaaacgccaccgaggcagcttggcgcgctctggcatcaggtggatccgccctggatgctgtggaaagcggatgcgccatgtgcgagcgtgagcagtgcgatggcagtgtcgggttcgggggcagccccgatgagctcggggagacaacacttgacgccatgattatggatggaaccactatggacgtaggcgcggttggcgacctgcggcggatcaagaacgccatcggggtcgcccggaaagtgcttgagcatactacacacacactactagtgggggaaagcgcgacaactttcgcacaatccatgggatttatcaacgaggatctgagcacaacggcttcccaggctctgcactctgactggctggcaagaaactgccagcccaattattggaggaatgtgatcccagatcccagcaagtactgcggcccgtacaaaccccccgggatcctcaagcaagacataccgatccataaagagaccgaggacgacagaggacatgataccatcggaatggttgtgatccacaaaaccggtcacatcgcggcaggcacctccactaacggtattaagttcaaaattcatggacgggtgggcgacagtccaatccccggggctggcgcctatgcggatgatactgcaggcgctgcagcagccactggcaacggcgacatcctgatgcgcttcttaccttcataccaggcagtggagtatatgcgcaggggcgaggaccccaccatcgcctgtcagaaagtgatttctcggatccagaagcatttcccggagtttttcggcgcagtcatctgcgccaatgtgactggatcctatggagcagcttgtaacaaattgtcaaccttcacccaattttcattcatggtgtacaatagtgagaagaatcagcctacagaagagaaagtggactgcatttag

SEQ ID NO: 179592 - DNA, 573 bp, synthetic construct
  misc_feature 1..573: note = Description of Artificial Sequence: Synthetic coding sequence
  source 1..573: mol_type = other DNA
atggagagccagcggctggagctgatccggctgatggagacccaggaggaggacgtggtcctgctcaccgccggagagcataacaaggcctgctctcttctgggaaagctccgtttggaatgtgctgacttgcttgagactagaggcgtggtcctgcgggacccaacattgttttcgtttctgtgggttgtggatttccctctgtttctccctaaagaggaaaatcccagggagttggagagtgctcaccatccctttactgcccctcacccctctgacattcacttgttgtacaccgagccgaagaaagaggatgtgaagatgcttagtcatctgctgcaggcgttggattatggagcgcccccacatggggggatcgcgctgggactggacagactcatatgtctcgtcaccggctccccttcaatcagggatgtgatagccttcccaaagagcttccgtggacatgatctcatgagtaatacccccgactcagtgcctccagaggagctcaaaccctaccacattcgggtatctaagccaaccgattctaaagccgagcgggcacattag

SEQ ID NO: 179593 - DNA, 1938 bp, synthetic construct
  misc_feature 1..1938: note = Description of Artificial Sequence: Synthetic coding sequence
  source 1..1938: mol_type = other DNA
atgtacttccccagctggctgagccagctgtaccggggcctgagcaggcccattaggcggaccacacaacctatttgggggagcctctacaggtctttgctgcagtcttcacaaagaagaatacctgaattcagtagctttgtggtgcgtacaaacacatgcggcgaactgcggtcttcccacctgggccaggaagttacactatgcgggtggattcaataccggcgacaaaacactttcttggttcttcgtgacttcgatgggctagtccaggtgatcatcccacaggacgagtctgcggcttctgtgaaaaaaatactgtgcgaagcccccgtggaatctgtggtacaggtgtcaggcacagtcatatcacggcctgcaggccaggaaaatcctaaaatgcccaccggggaaattgagattaaagtcaagaccgcagagctgcttaatgcatgcaaaaaactgccctttgagattaagaattttgtcaagaagactgaagccctgcggctgcagtatcgctacctcgatttgagaagttttcaaatgcaatacaacttaaggctgaggagccagatggtaatgaagatgagggagtatctttgtaacctgcacggattcgtcgacatcgaaacacccactctgttcaaacgaacacctgggggcgccaaggaattcctggtacctagtcgcgagccgggcaagttttactccctgccacagtccccacagcaattcaaacagctgctgatggtcggtgggcttgaccgatatttccaggtcgcgcgctgctaccgcgatgaggggtcccgaccagatagacagccggaattcacccagattgacatcgagatgtccttcgttgaccagaccgggattcagtccctcatagaaggacttcttcaatatagctggcctaacgacaaagatcccgtagtcgtgccgtttcccaccatgacgtttgccgaggtactcgctacctatggaactgacaagcctgatacacggttcggtatgaagatcatcgacatcagcgatgtcttccggaacacagagattgggtttctccaagacgccttaagcaagccccacggcaccgtgaaggctatttgcatcccagagggggccaagtatctcaagcgaaaggatattgaaagcatccgcaatttcgccgccgaccactttaaccaggaaatcctgcctgttttcttgaacgcgaacagaaactggaacagtcccgtggcaaattttattatggagtctcagaggctagagctgatcaggttgatggagacacaagaggaggacgtggtgctgttgacagccggcgaacataacaaagcctgttctctgttgggcaagttaagactggagtgcgctgatttgctggaaacacgcggggtggtcctgagggatcctactctgttctcgtttttatgggtcgtggacttccctttgtttctgcctaaagaagagaaccctagagaacttgagtcagcacaccatcctttcacagccccccatccctccgacattcacctgttgtacacagagcctaaaaaggcccgttctcagcactatgatctcgtcctaaacggcaatgaaattgggggcggcagcatcagaatccataatgctgagcttcaacgctacatcctggccacgctgttaaaggaggacgtgaagatgctcagtcatctgctgcaagctctcgactacggcgctccacctcacggagggatcgcattgggccttgaccggctgatctgcctcgtaactgggagtccaagtatccgagacgtaattgctttccccaagagctttaggggccacgacttaatgagtaatacacccgactccgtgcctccggaagagctgaagccatatcacatccgagtgtccaagccgacagacagcaaagccgagagagctcactag

SEQ ID NO: 179594 - DNA, 1143 bp, synthetic construct
  misc_feature 1..1143: note = Description of Artificial Sequence: Synthetic coding sequence
  source 1..1143: mol_type = other DNA
atgaaggagtacgtgctgctgctgttcctggccctgtgcagcgccaagccatttttctcaccctcgcatatcgcgctgaagaacatgatgctgaaggacatggaggacaccgatgacgatgacgacgacgacgacgatgacgacgacgacgacgaggacaactcactcttccccacaagggagcccaggtcccacttcttccccttcgatctgttccccatgtgcccgtttggctgtcaatgttattcccgggtcgttcactgtagtgatctgggactgacctcagtccccactaacatacctttcgatacccgaatgttggatctgcagaacaacaagatcaaagagatcaaggaaaatgactttaaagggctaacaagcctatatggacttattctaaacaacaacaagttgactaaaatacaccctaaggctttcttgaccaccaagaagttgcgccgactgtacttgagtcacaatcagctcagcgaaataccactaaatctgccgaagtccctagccgaattgcgtatacatgagaacaaggtaaagaaaattcagaaggataccttcaaaggcatgaacgcactgcacgtcctagagatgagcgccaacccgctagacaataacgggatcgagcctggagcttttgagggcgtaaccgtattccatatcaggatcgccgaggctaagctcacctctgtgcccaagggtctccctcctacactgctagaactccatctggattacaacaaaatttcaaccgttgagctagaggatttcaaaaggtacaaagaactgcagagactcggcttgggcaataacaagattacagacattgaaaatggaagcctggcaaatattccccgagtcagagagatacacctggagaacaacaagctgaaaaagattccctccggcttgcccgagttgaagtacctgcagattatcttcttgcatagcaatagcattgcaagagttggagtaaacgacttttgccctacagtccccaagatgaaaaaaagcctgtacagcgccatttctcttttcaacaaccctgtaaagtattgggagatgcagccagccacctttaggtgtgtgctgtctcgtatgtctgttcaacttggcaattttgggatgtag

SEQ ID NO: 179595 - DNA, 732 bp, synthetic construct
  misc_feature 1..732: note = Description of Artificial Sequence: Synthetic coding sequence
  source 1..732: mol_type = other DNA
atgaaggagtacgtgctgctgctgttcctggccctgtgcagcgccaagccatttttttcccctagccacattgcactcaaaaatatgatgctaaaagacatggaagataccgacgatgatgacgacgatgatgacgacgacgacgatgatgatgaggataattccctgttccccacccgggagccaagatcacatttcttccccttcgacctgtttccaatgtgtccattcggctgccagtgctattctcgtgtagttcattgttctgacctggggctgacctctgtccctactaatataccctttgacaccaggatgttggaccttcaaaataacaagatcaaggagatcaaggagaatgactttaagggtttgacttccctatacggcctgattctaaacaataataagctgactaagattcatccaaaggcttttctcacgacaaagaaacttagaaggttgtatctttctcacaaccaactcagtgagatccccctgaaccttcctaaaagcctggccgagctgcgaatccatgaaaataaagtcaagaagattcaaaaagatacattcaagggaatgaatgcactccatgtactcgaaatgtcagctaatcccctggacaataacggcatcgaaccaggtgccttcgaaggggtcacggtcttccacatccgtatagccgaggctaaattgacttccgtgccgaaggtgaaccttccgcagttttag

SEQ ID NO: 179596 - DNA, 243 bp, synthetic construct
  misc_feature 1..243: note = Description of Artificial Sequence: Synthetic coding sequence
  source 1..243: mol_type = other DNA
atgatgctgaaggacatggaggacaccgacgacgacgacgacgacgacgacgacgacgacgacgatgacgaggataatagcctatttcccacgcgcgagccccgtagccatttcttccctttcgatttatttcctatgtgcccatttggctgtcagtgttatagcagagtggtgcattgctccgacctggggctgacatcagttcccaccaacatccctctgatcctcgagtgcctcatttag

SEQ ID NO: 179597 - DNA, 732 bp, synthetic construct
  misc_feature 1..732: note = Description of Artificial Sequence: Synthetic coding sequence
  source 1..732: mol_type = other DNA
atgaaggagtacgtgctgctgctgttcctggccctgtgcagcgccaagccatttttcagcccatcccacatcgctctcaagaacatgatgctcaaagatatggaggatactgacgacgatgacgatgatgacgacgatgacgacgacgatgacgaagataattctctctttcctacacgcgaaccaaggtcacacttttttcctttcgatctgttcccgatgtgtcctttcggctgtcagtgttacagccgagtcgtccactgttcagaccttggcctgacatccgtccccaccaacattccattcgacacccgcatgttggatctgcagaacaataagatcaaagagatcaaagaaaatgattttaaaggactgacctcgttgtacgggctgattctgaataataacaagctgaccaaaatccatcccaaagccttccttaccaccaagaagctgagaaggctgtatttaagccataatcagctgtcagagatcccgttgaacttgcctaaaagcttggcagaacttcgtatccacgagaacaaggtaaaaaagattcagaaagatacgttcaaagggatgaatgctttgcacgtcctggagatgagcgcaaacccattagacaacaatgggattgaaccaggggcattcgaaggtgtgacggtatttcacatccggattgctgaggctaagttgactagcgtacccaaggacaacctccctagcttctag

SEQ ID NO: 179598 - DNA, 3885 bp, synthetic construct
  misc_feature 1..3885: note = Description of Artificial Sequence: Synthetic coding sequence
  source 1..3885: mol_type = other DNA
atggccctggccggcctgtgcgccctgctggcctgctgctggggccccgcagcagtgctcgcaacggctgccggcgacgtcgaccctagtaaggaactggagtgtaagcttaagtccattaccgtctctgccctgccgttcctgcgggagaatgacctatcaatcatgcactctcccagcgccagtgagccgaagctgctgtttagcgtgcgtaacgattttccaggcgagatggttgttgtggacgatctcgagaataccgagctcccttacttcgtgctggaaatcagtggtaacaccgaagatatccccctggtgagatggcgacagcagtggctggaaaacggcacccttctgttccatattcaccaccaagacggcgctccttccttgccaggtcaggatccaacagaggagccccagcacgaatccgcagaagaggaactccggatcctgcacatttcagtgatgggaggaatgatcgccttgctgctctctatcctctgcttagtaatgatcctgtataccagacgtcgctggtgtaaaagacggagagttcctcagccccaaaagagtgcctccgccgaggctgcaaacgaaatccattatatcccctccgtcctgatcggtggccacgggagagaatctctcagaaatgcacgcgtgcagggccataatagtagcggcactctgtcaattcgggagactccaattctggacggttatgagtatgacatcacggatctgcgccatcacctgcagagggagtgtatgaacgggggagaagatttcgccagtcaggtaactcgcaccctggactcattacaggggtgcaacgagaaatccggcatggaccttacaccagggtctgataacgccaaattaagtctcatgaataaatataaagacaatatcatcgcaacttccccagtggactccaaccaccagcaggccacacttctctctcatacgtcttcctcccagcgtaagaggattaacaacaaagccagggccgggagcgccttccttaaccccgagggagattccgggactgaagcagagaatgaccctcagttgactttctacaccgatccatcccgctctaggcgccgcagcagagtcggcagtccacggtctccagtcaacaagactactcttaccctcataagcattacaagctgcgtcattggattagtttgtagctctcacgtcaattgtcccttggttgtgaaaatcactctccacgtgccagagcaccttatcgccgacggctcacgattcattctcctagagggcagccagctggacgcctcagattggctgaatcccgcccaagtggtgctgttctcacagcagaattcaagcgggccttgggctatggatctgtgcgcccgcagactgctcgatccgtgtgagcaccaatgcgatcctgaaaccggagagtgcctctgctacgaaggatatatgaaggaccctgttcacaaacacctctgtataagaaatgaatggggcactaatcagggaccctggccctacacaatctttcagcgcggcttcgacctcgtccttggcgaacagccttctgataaaatattccggttcacttacactttgggtgaaggtatgtggctgccactgagcaagtcttttgtcataccccccgccgagttggcgataaatccatccgccaagtgtaaaacagacatgactgtgatggaagatgccgttgaggtcagggaggaacttatgacttcttctagtttcgatagcctcgaggtattgctggatagcttcggtccagtccgtgactgctccaaggacaatgggggatgttcgaagaattttagatgtatctcggaccggaaactcgactctaccggatgtgtctgccctagcgggctctcacctatgaaggatagcagcggctgttacgataggcacataggcgtcgactgtagcgatgggttcaacggaggatgtgaacaactatgcctacagcaaatggcacccttccccgatgaccccactctctacaacatcctgatgttttgcgggtgtatcgaggattataaactgggcgtcgatgggagaagctgtcagcttataacagaaacttgccctgaagggagcgattgcggggagtcacgggagttgcctatgaatcaaacactattcggcgaaatgtttttcggatataacaatcattctaaggaggtcgccgctgggcaagtgcttaaaggcaccttccgtcagaataatttcgccagagggctggaccagcaactgccagatggcctggtagtggccacagtgccactggagaaccaatgcctggaggaaattagtgagccgacacctgacccggactttctgactggcatggtgaacttcagcgaagtgagtggctacccagtactgcagcactggaaggtccgttcggtgatgtaccacataaagctgaaccaggtggcaatcagccaagctttgagtaacgccttacactctcttgatggggcaacctccagggctgatttcgtggcgctcttggatcagttcgggaatcactatattcaagaagctatctacggctttgaagagtcttgtagcatctggtatccaaacaagcaagttcagaggcgcctgtggttagaatatgaggatatttctaaaggaaatagtccctcagatgagtccgaggagcgggagcgggatccgaaggtgctgaccttcccagaatacattacaagcctcagtgattcagggacaaaacatatggccgctggagtgaggatggaatgccactccaagggtaggtgtccctcgtcttgcccactgtgccatgtgacctctagcccagataccccagctgagcccgtgctccttgaagttacaaaggcagctcccatctatgagttagtgacgaataaccagacacagaggttgttacaggaggccaccatgagctcgctgtggtgctccggaacaggagacgtgatagaagactggtgccgctgcgactccaccgcctttggcgccgacggcctccccacctgcgcacctcttcctcagcctgtgttacggctgtcaacagtgcacgagccctcatctacactggtggtcctggagtgggagcactcagagccccctatcggcgtccagattgtcgattacctgctcagacaggaaaaagtgaccgacaggatggatcattctaaagtcgagacagagaccgtgttatcttttgtagacgatatcatatcaggcgccaagtctccctgcgccatgcctagccaggtcccggataaacagctaaccaccatcagcctgatcataaggtgccttgaacccgatacgatctacatgtttacgctgtggggtgtcgacaatactgggaggaggagtcgcccatctgacgtcatagtaaagaccccatgtcctgtcgttgatgacgtgaaggcccaagaaattgccgataaaatatataatctgtttaatggttatacttcggggaaggagcagcagacagcctacaatacgctgctagatctgggctcccctacactgcaccgagtgctttaccattacaatcagcactatgaaagcttcggagagttcacctggaggtgtgaggacgagctggggcctagaaaggctggcctgatcttgtcacagcttggggacctgtcttcatggtgcaatgggctgctccaagaacccaagatctcactgcggagaagtagccttaagtacctagggtgtcgttacagcgagattaaaccgtatggcctggattgggcagaactcagcagggacctgaggaaaacatgcgaggagcagacactgtccatcccatataacgactacggagacagcaaggagatatag

SEQ ID NO: 179599 - DNA, 3909 bp, synthetic construct
  misc_feature 1..3909: note = Description of Artificial Sequence: Synthetic coding sequence
  source 1..3909: mol_type = other DNA
atggccctggccggcctgtgcgccctgctggcctgctgctggggcccagccgccgtgctggctacggcggctggcgacgtggatccatccaaggaactagaatgcaagctgaagagcattaccgtaagcgcactcccctttcttcgggagaacgatctgtccatcatgcactcaccgtcagcaagcgagcccaagctgcttttctcggtccgaaacgattttccaggggagatggtggtggtggatgatcttgaaaatacagagctcccctattttgtcctcgagatctcaggaaatactgaagatataccactggtgaggtggaggcaacagtggttagagaacggaacactcttgttccatattcatcatcaggacggtgctcctagcctaccaggccaggaccccactgaggaaccccagcacgagtccgcggaagaagaactccgcattcttcacattagcgtcatgggcggcatgatagcactactgctgtcgatcctctgtctcgtcatgattctgtataccagacggagatggtgcaaaaggaggagggtcccccaaccccagaagtccgcaagtgcggaggctgcaaacgagatccattatattccctccgtcctgattggcggacatggacgtgagagtctcagaaatgcaagggtgcagggccataacagcagtggtaccctttcaatccgggagactccaattctcgacggctacgaatacgatatcactgaccttagacaccatttgcagcgggagtgtatgaatggcggcgaagatttcgcctctcaggtgacaagaacacttgattctctccaggggtgcaatgaaaaaagtggaatggacttgaccccaggaagtgacaatgcaaagctttctctgatgaacaagtataaagacaacatcatcgccacgtcccccgtggattctaatcatcaacaggccacccttctgtcacatactagttccagccaaagaaagagaattaataataaagcaagggccggtagtgcatttctgaaccctgaaggcgacagcggcacagaagccgagaacgacccgcagctaacgttctacaccgaccctagtcgctctaggagaagaagtcgcgtcgggtctcccagaagcccggtgaacaaaacgactttaaccctgatctctatcacctcatgcgtgatcgggctggtgtgtagttctcatgtgaactgcccactggtagtgaagatcaccctgcatgtgcctgaacaccttattgcagacggctccaggtttatcttgcttgagggatcccagctcgacgcctcagactggctcaatccggcccaggtagtcttattctcacaacagaatagcagtggaccatgggctatggatttatgcgcccggcggctgctagacccctgtgagcaccagtgtgatccggaaaccggtcgacgggagcaccgcgccgctggtgaatgtctttgttacgagggttacatgaaggaccccgtgcacaaacatttgtgcataaggaacgagtggggtaccaatcagggcccgtggccatacacgatcttccagcggggctttgacttggtgctgggtgagcagcccagcgacaaaattttcagattcacttacacactgggagaggggatgtggcttccgttgtccaagtccttcgtgattccacctgccgagctggcaataaacccttccgccaaatgtaaaacagatatgactgtgatggaggacgccgtcgaggtacgcgaagagctgatgacctcatcttctttcgattctctcgaagtccttctggactccttcgggccagtccgcgattgtagtaaagacaatgggggctgcagtaagaattttcgctgcattagcgacagaaagttagactcgacaggatgtgtttgcccatcagggctgtctcccatgaaagacagcagcggctgctacgaccggcacatcggagtcgattgctcagacgggtttaacggcggttgcgagcaactttgcttgcagcagatggccccttttcccgacgaccccactctgtacaacattctgatgttctgcgggtgcatcgaagactacaagttgggcgtagacggaaggagttgtcagctcataaccgaaacctgtcccgagggctccgattgtggtgagtccagggaattacctatgaaccagaccctctttggagaaatgttcttcggatacaataaccattccaaagaggtggccgccggtcaagtattaaaggggacattccgccagaacaacttcgcccgcggactcgatcagcagctgccagacgggctggtcgtggctactgtcccactggagaatcagtgcttagaagagatcagtgaaccaactccggaccctgacttcttaaccggaatggtgaatttctccgaggttagcggttacccagttcttcaacactggaaagtcagatctgtgatgtatcacatcaagctcaatcaggtggctataagtcaggccctgagcaatgccctccattccttggacggagccacctcgagggctgattttgtagcattacttgaccagtttgggaatcactacattcaggaagccatctatgggtttgaagagtcctgttcaatttggtaccctaacaaacaggtacagcgtcgactttggctggagtatgaggacatctccaagggtaactccccaagcgatgagagcgaggagagagaacgtgatccgaaagtgcttacgttccctgaatacataacaagtctgagcgactcgggcaccaaacacatggctgctggcgtccgcatggaatgccattccaaaggtaggtgtccttcaagctgcccattgtgccacgtgacctccagcccagatacacccgctgagccagttttattagaagttaccaaggcggccccaatctatgagctggtgacgaacaaccagacccagaggctccttcaggaagccacaatgtcctcactatggtgtagtgggaccggggatgtgatcgaggattggtgcagatgtgatagtaccgcatttggtgcggacggcctgcctacttgtgcgcctttgccgcagccagtgcttaggttgtccacagtgcacgagccaagttctaccctagtcgtgttggagtgggagcattccgagccaccgatcggagtgcaaatcgtcgactacctgttaaggcaggagaaggtcactgaccggatggatcacagtaaagtcgagactgaaaccgtactttcttttgttgacgacattatcagcggggccaaaagcccgtgcgccatgccttcccaagtgcctgataaacaattgactacgatcagtctcataatccgttgcttggagcccgacactatctatatgtttacactgtggggagtggataatacggggcggcggagtcgacctagcgacgtgattgtaaaaaccccgtgcccagttgtagatgacgtgaaagctcaagagatagccgacaagatctacaacttgttcaacgggtacactagcggcaaggaacaacagactgcctataatacgctgctggacttgggctcacccacactccatagggttctgtaccactacaatcagcactacgagagcttcggggagttcacttggcggtgcgaagatgaacttgggccaaggaaagccggcttaatcctgtcacagctgggtgatctgtctagctggtgtaatggcttattgcaggagcccaaaatctcactgaggcgttcatcgctgaaatacttggggtgtcggtactcagagataaaaccctacgggctcgactgggcagagttatcccgggacctccgtaaaacctgtgaagagcagaccctctccatcccatataacgactatggtgactctaaggagatttag

SEQ ID NO: 179600 - DNA, 3651 bp, synthetic construct
  misc_feature 1..3651: note = Description of Artificial Sequence: Synthetic coding sequence
  source 1..3651: mol_type = other DNA
atggccctggccggcctgtgcgccctgctggcctgctgctggggccctgccgctgtgttggccacagctgccggcgatgttgacccgagcaaagaattggaatgtaagttgaagagcattaccgtatctgctctcccctttctccgtgaaaacgacctatcaattatgcactctccttcagcgtcggaacctaaactgcttttttcggtacggaacgactttcctggcgagatggtcgtcgtggatgatttggaaaataccgaactgccctacttcgttctcgagattagtggtaataccgaagatataccattagtcaggtggaggcagcaatggcttgagaatgggactctgttatttcatatccaccatcaggatggggcgccaagtctacccggacaggaccccacggaggagcctcagcatgaaagcgctgaagaggaattgcggatcctccacatttcggtgatgggcgggatgatcgctctcctgctgagtatcctctgcttggtgatgattttatacactcgacgaaggtggtgcaaaaggcgtagggtaccccaaccccaaaaaagcgcaagcgccgaggccgctaatgagattcattacattccatccgtgttgatcggcgggcacggcagggaatcactgcggaatgcacgcgtccagggtcacaacagttcaggtactctgagcattagggaaacgcctatattagacgggtacgaatacgacattactgatttacgccaccacctgcagagggaatgtatgaacggcggagaggatttcgcctctcaagtcacccgaaccctggactccctccagggttgcaacgaaaagtcaggaatggatctcactcctggttctgacaatgctaagctctccctcatgaacaaatacaaagacaacattattgccacctctcctgttgatagcaaccaccaacaggcaactctactcagccacacctctagttctcagcgcaagcgcatcaacaacaaggccagagccggttccgcattccttaatccagaaggagattctggaacggaggccgagaacgacccccagctcactttctacactgatccaagtaggtctaggcggcgttctcgcgtcgggtctccccgctcacccgtcaataaaaccacactcactttaattagtattacctcttgcgttatcgggctggtgtgtagctcccatgtgaactgtcctcttgtggtcaaaatcaccctgcacgttccggagcacttgatcgccgatgggtccagatttattcttctggaaggtagtcagctggatgcttccgactggcttaatcctgcccaagtcgtgctcttttcccagcagaactcaagtggcccgtgggccatggatctttgtgcccgaaggctgctcgatccatgcgagcaccagtgtgatccagagaccggagagtgtttgtgttacgagggctacatgaaggacccagtgcacaagcatctgtgcatacgtaatgaatggggtactaaccagggcccctggccatataccatttttcagagaggcttcgatctggttctgggagaacaaccctctgataaaatctttaggtttacgtacaccttgggcgaaggcatgtggcttccactgtcgaagtccttcgtaattccaccagctgagcttgcgatcaacccatccgcaaaatgtaagactgatatgacagtgatggaagacgcagtggaggtccgggaggaattaatgactagttctagtttcgattcccttgaggtgctgttggactcgtttgggcctgtgagggactgcagtaaggataatggcggctgttctaaaaactttcggtgtatcagcgatcgcaagcttgattccactgggtgtgtgtgcccttccggcctatcgccaatgaaggatagcagcggctgctatgatcggcatattggagtagattgcagtgatggattcaacggcggctgcgagcagttgtgccttcaacaaatggcccccttccccgacgacccaacattgtacaatatcctgatgttctgtggatgcattgaggactacaagctgggggttgacggacgttcttgccaactgataactgaaacttgccccgaaggatccgactgtggcgaaagtcgcgaactaccaatgaaccaaaccctgtttggcgaaatgttctttgggtataataatcactcgaaggaggtggccgctggtcaggtactgaaaggtacctttcgccagaacaattttgccaggggcctggaccagcagcttccagatgggctcgttgttgccaccgtgccgctggagaaccagtgcctggaggaaatcagtgagcctaccccagaccctgactttctgaccggcatggttaacttctccgaagtgtcaggctaccctgtgcttcaacattggaaggttaggtccgtcatgtatcacatcaagctgaatcaggtggctatctcccaggcactgagcaacgcgctgcattccctcgacggagctacttcacgagcagacttcgtcgccctgctggatcagttcggaaatcactatatccaggaagccatctatgggttcgaggagtcttgtagcatttggtaccccaataaacaagtgcagcgaagactgtggttggagtacgaagacattagcaaaggaaactcaccctccgacgaaagtgaagaaagggagagggacccaaaagtcctgacttttccagaatatattacctctttgtctgatagtggcacaaagcatatggccgcaggggtgcgcatggagtgccattcaaagggaagatgcccaagctcgtgtcccctgtgtcatgtgacctcttcacccgacaccccagcggaaccggttttactggaagtaaccaaagctgccccaatctacgagctggttaccaacaaccagactcagaggctgttacaagaggcaaccatgtctagtctctggtgctccgggactggggatgtgattgaagactggtgtaggtgtgactcaaccgcattcggtgctgacggcctccctacatgtgctcccctcccacaacctgtgctgaggctctccaccgtacacgagccgtcatctaccttagtcgtgttggagtgggagcactccgagccccccattggcgtgcaaatcgtggattatctgctccgtcaggagaaggtgactgatcggatggaccactcaaaggttgagactgagactgtgctgtccttcgtggacgacataatatctggcgcaaaaagcccatgcgctatgccgtctcaggtgcccgataaacagctgacgacaatcagcctgataatccgttgcctggaaccggataccatctacatgttcacactgtggggggtggataatacagggcgccgttccagacctagcgatgtgattgtgaagaccccgtgccctgtggttgacgatgttaaggcgcaagaaatcgcggacaaaatttacaacctgtttaacggctacaccagtgggaaagaacaacagactgcatataatactttgctggacctgggttcccccacactgcatagggttctctatcattataaccagcattacgaatcctttggcgagttcacctggcgctgcgaggacgaactgggtccgcggtag

SEQ ID NO: 179601 - DNA, 3657 bp, synthetic construct
  misc_feature 1..3657: note = Description of Artificial Sequence: Synthetic coding sequence
  source 1..3657: mol_type = other DNA
atggccctggccggcctgtgcgccctgctggcctgctgctggggcccggcagctgtgctagccacggctgcaggagacgtggacccaagtaaggagctcgagtgcaaattgaaaagcattacggtgtctgccttgccatttctgcgcgaaaacgatctgtctattatgcactctccttccgcttctgagcccaagctcttattcagtgttagaaacgatttccctggagaaatggtggtagttgatgacctcgagaacacagaactaccctattttgttctggaaatcagcggtaacaccgaagacatcccgctggtacggtggagacagcagtggctggagaacggaactctgctgttccatattcaccatcaggatggcgctccctcactgcctgggcaggaccctactgaagagcctcaacacgagagcgccgaggaggagttaagaatcctgcacatcagtgtgatgggggggatgattgctctgctgctcagtatcctgtgtctagttatgatactctacaccaggagaagatggtgtaaaagacggagggtcccacagccccagaagagtgcctcagctgaggccgccaatgaaatccactatatcccctccgtgctcatcggcgggcacggccgtgaaagtctgcgcaacgcacgggtccaagggcataactccagtggtacgctcagtatcagggaaacaccaatcctggacggatacgaatatgacattaccgacctcaggcaccacttacagcgcgagtgtatgaacggaggggaggacttcgcttcacaggtgacgcgcacccttgatagtcttcagggctgcaatgaaaaaagcgggatggatctcacaccaggatcagataacgctaagctgtcactgatgaacaagtacaaggacaacatcatagccacttctccagttgatagtaaccatcagcaggccacactgctttcacatacctcatcatcccaacgaaagcgtatcaacaacaaggctcgcgcgggcagtgcatttctcaaccccgaaggtgactccggtaccgaggccgaaaacgatcctcaactgaccttttacactgacccaagcaggtcccgccgtagatcccgggttggcagccctcggagccctgttaacaagacgactctgaccctcatatccatcacaagctgtgttatcggactcgtgtgttcctcccatgtgaactgccctctcgtcgttaagattacacttcatgtccctgagcacctgatagcagacggatctcgctttatcctattagagggctcacaacttgatgccagcgattggcttaatcccgcgcaggtggtgctgttcagccagcaaaatagcagtgggccttgggccatggacctgtgcgccaggcggctcttggatccttgtgagcaccagtgcgatccagagaccggcgagtgcctgtgttatgagggatacatgaaggacccggtgcataaacacttgtgtattagaaatgagtggggcacaaaccagggcccttggccctatactatctttcagcgcggattcgacctagtgctcggagagcagccttctgacaagatttttaggttcacatacacgttaggcgagggaatgtggcttccactgtccaagagcttcgttattccccctgcagagttggctatcaatccatcggccaaatgcaagaccgacatgacagttatggaagacgccgtcgaggtccgcgaggagctgatgacttcctccagcttcgactctctcgaggtgctgctggactccttcgggcctgtgcgagactgtagcaaggataacggaggatgttctaagaacttcagatgcatctccgaccgcaagctggactccacagggtgtgtctgcccctctgggctttcgcccatgaaagatagcagtggctgttacgatcgccacattggcgttgactgctctgacggctttaatggagggtgcgagcagctgtgtctgcaacagatggctcctttccccgatgatcccaccctttataatatattaatgttttgcgggtgcattgaggactacaagttgggggtggatggtaggagctgtcagctgataactgagacatgtccagaaggtagtgattgcggggagtccagagagttacctatgaaccagactttgttcggggaaatgttcttcggctataacaaccactccaaagaagtcgcagccgggcaagtcctgaagggtactttccgtcagaacaactttgccaggggccttgatcaacaactgcccgacggacttgttgtagccactgtgcccctggagaaccagtgtctagaggagatatctgagcctactcctgaccctgatttcctgacagggatggtgaatttctccgaggtgagtggatacccagtcttacaacactggaaagtgaggtccgttatgtaccatatcaagctaaatcaggtagccattagtcaagcactatcaaacgctctgcacagcctggacggagcaaccagccgagccgacttcgtggcactgctggatcaattcggcaaccattacatccaggaagctatctatggattcgaggaatcctgctccatttggtacccaaataaacaggtgcaacgtagactctggctcgaatacgaggatatttctaaaggcaactccccaagcgatgagagtgaggaacgggagcgggaccctaaagtactgaccttcccggagtacatcacaagcttgtctgactccggaacaaaacacatggccgcgggtgtccggatggagtgccacagcaaagggcgctgccctagtagttgtcctttgtgccatgtcacgagttcgcctgataccccagccgagccagtgctgttggaagtcactaaggccgctcctatctacgagctcgtgaccaacaaccaaactcagcgcctgctgcaagaagccaccatgtcttctctatggtgcagcgggaccggtgatgttatcgaagattggtgcagatgtgattcaactgcctttggcgccgacggcttaccaacatgtgcaccgcttccgcaacccgtattgagactgtccaccgtgcatgaacccagttccaccctggtggtgctcgagtgggaacactccgagcctccgatcggagttcaaatcgtagactaccttctccggcaggagaaggtgaccgaccgaatggaccattctaaagtcgagacggaaactgtcctgtcattcgtagatgacatcatatctggggcgaagagtccttgcgccatgcccagccaggtgcccgataaacagctgactacaattagcctgattatcaggtgtctcgagcccgacactatctacatgtttacactgtggggcgtagataataccgggaggcgctcccgcccatccgatgtgatagttaaaaccccctgccctgtcgtggatgatgtgaaggctcaagagattgctgataaaatctataacttatttaatggatatacatcgggcaaggagcaacagaccgcctataacacgctgctggacctaggttcacctaccctgcaccgggtactgtaccactacaatcagcattatgaatccttcggtgaatttacttggcgctgtgaagacgagttgggccccaggaaccagtag

SEQ ID NO: 179602 - DNA, 1323 bp, synthetic construct
  misc_feature 1..1323: note = Description of Artificial Sequence: Synthetic coding sequence
  source 1..1323: mol_type = other DNA
atgaacaccctgctgtgcaagggcatgttctgcctgctgagctgggaggcagacagtagggggcggttgggcgagtacacgcttcaacctctttccctccaaactgaagagaccaccgagttgggttccaagaaggagttgaaaagtatgccttttattacctacctgtctggattgctcaccgcccagatgctgtccgacgaccagctgataagcggcgtagagattcggtgtgaggaaaagggccgatgtccgagcacatgccatttgtgccggcggcccggtaaagaacagctatcgcccacacctgtcctgctcgaaattaacagagtggttccgctttataccttgattcaggataatggaactaaggaggcttttaaatccgcacttatgagctcatattggtgttccggaaaaggcgacgtcatcgacgattggtgtaggtgtgatctgagtgcctttgacgctaacggtcttcctaattgtagtcccctcctgcagccagtgctgaggttgtcacccaccgttgagccctcaagcactgttgtatccctggaatgggtggacgtccagccagccataggaaccaaagtgagcgattacatcctgcaacacaagaaggtcgatgaatacaccgataccgacctgtataccggtgagtttctgtccttcgcagatgacttactgtctgggctaggtactagctgcgtagcagccggacggtcccacggagaagtgcctgaagtgtccatctactctgtcatcttcaagtgtctggagcctgacggcctttacaaatttactctctatgcagttgacacccggggacggcacagtgagttaagcaccgtgaccttaagaaccgcctgtccgttggttgatgataacaaagccgaagagatcgcagacaaaatctacaacctatataatggttacacgtccggaaaggagcagcaaatggcatacaacaccctgatggaggttagtgccagtatgctgttccgagtgcagcatcattacaattcacactacgaaaaattcggggactttgtctggcggagcgaagacgagctgggacccaggaaagcccacctcatcctgagaagacttgaacgcgtctcttcacactgttccagcctgttaagaagcgcctacattcaaagtcgtgtcgagacagttccgtatttgttctgtagaagcgaagaggtccgacctgcgggcatggtgtggtattctatccttaaagataccaagatcacatgcgaggaaaagatggttagcatggcacgcaatacctatggagagtcaaagggtagatag

SEQ ID NO: 179603 - DNA, 4020 bp, synthetic construct
  misc_feature 1..4020: note = Description of Artificial Sequence: Synthetic coding sequence
  source 1..4020: mol_type = other DNA
atggccgccgccggcgcccggctgagccccggccccggcagcggcctgcggggaagaccacgcttgtgtttccaccctggaccaccaccattgcttcctttgcttctgttgtttttactactgctgccgcctcccccgctgctggccggtgctactgcggcggcatcaagggaacctgacagcccttgcagactgaaaaccgtcacggtgtctactctccctgcactgagagagtccgatatcggttggtcgggagcacgtgcaggggcaggcgcgggtacaggagccggggccgcggcagccgctgcatcccccggaagtcctggcagcgctgggacagccgctgagtcgcgattgctgctgttcgtacgcaatgaattacctggtcgaatagccgtacaggatgatctcgacaataccgaactgcctttctttaccttggaaatgagcgggaccgctgcagatatttcactcgttcattggcggcaacaatggctcgaaaatggaacactgtattttcacgttagcatgagcagctcgggccagctagctcaggctactgctcctacattacaggaaccctccgaaatcgtagaagaacagatgcatatcttacacatcagtgttatggggggtctgatcgcactgttacttttgttgcttgtgtttactgtcgctctatacgcccagaggcgctggcaaaaaaggcgccggattcctcagaagtctgcttctaccgaagctacccacgaaattcactatatcccctcagtactgctcggaccccaagctagagaaagctttcggagctccaggcttcaaacccacaattccgtgatcggcgtgccaattcgggagaccccgatcctggacgattatgactgtgaggaagacgaggaacccccacgtcgggcgaaccacgtgtcaagagaggatgaattcggctcccaggttacgcatactctggattccctgggccaccccggggaggagaaagtggatttcgaaaagaaggcagccgcagaggcaactcaagagaccgtggaaagcctgatgcagaaatttaaagaatcctttcgagcgaacacacctatcgaaattggtcagctgcaaccacctctaaggtcaacttccgccggtaagagaaaaaggcgctcgaagagtcggggcggcatttccttcggacgcgctaaaggaacctcaggcagcgaagcggacgacgaaacccagctgactttctatactgagcaatacaggtccaggcgccgctcaaaggggctgctgaagtccccagtcaataaaacagccctgactctgatcgcagtcagtagttgtattttggctatggtgtgcggcagtcagatgagctgtcccctcacagtcaaggttacccttcatgtgccggaacatttcattgccgacggatcatcttttgtggtatccgagggatcctacttggacatatccgattggctcaatccagccaagctgtccctgtactaccagataaacgccacatcaccttgggttcgagatctctgcgggcagagaaccacggacgcttgtgagcagctgtgtgacccagaaaccggggagtgttcatgccatgaggggtacgcgccagacccagtccatagacatctgtgtgtgcgatcagactgggggcaaagcgaagggccttggccttataccacgttggaacgcgggtacgatctcgttacaggagaacaggcaccagaaaagatcctccgctctaccttctccctcggtcagggactgtggctcccagtgagtaagtcattcgtggtgccccccgttgagttgtcaattaaccctctcgcctcctgcaaaactgatgtactcgttactgaagatcccgccgatgttcgggaagaagctatgctatcaacctattttgagacaataaatgaccttctgagtagttttggccccgtgagggactgttctcggaataacggcggctgtactcggaacttcaaatgcgtgtccgaccggcaggtggatagcagtgggtgcgtgtgccccgaggagctaaaaccaatgaaagatggatccggctgttacgatcacagtaaggggatcgactgctctgatggtttcaacggcgggtgtgaacaactgtgcttgcagcagacacttccgctgccttacgacgcaacttcctccaccatattcatgttctgtgggtgcgtagaggagtataagttagcacccgatggtaagagctgtctgatgctcagcgatgtgtgtgaaggccccaagtgcctcaaaccagacagcaagttcaacgataccttattcggcgagatgctgcatggctacaacaatcgtacacagcatgtcaaccagggccaggtgttccagatgactttcagagaaaataattttataaaagattttccacagctggccgacggcctacttgtcatccccctgcctgtcgaagagcaatgcaggggcgtgctctcagagcccctgcccgacctccagctgttaaccggagatatccgctatgatgaagcaatggggtatcccatggtccaacaatggcgagttcggagtaacctgtacagggtaaagctgtctacaatcaccctggctgcagggtttacaaatgtgcttaaaatcctgacgaaagaaagctctcgcgaggaactcctgtcctttatccagcactacgggagccactatatcgctgaggccctgtatgggagcgagttgacatgtattattcatttcccgagtaagaaagtgcaacagcagttgtggctccagtatcagaaggaaaccaccgaattgggcagtaagaaagagctcaaatctatgcctttcatcacatatttaagcgggctcctaactgcccagatgctgagcgatgaccagcttatctccggcgtggaaattagatgcgaggagaaaggaagatgtccctctacctgtcacctctgcagacggccaggaaaggagcagctctcccccaccccggtgctgctggagataaaccgtgtggtgcccttatatacactgattcaggataacggtaccaaagaagcctttaagtctgccctcatgtcttcatattggtgcagtggcaagggtgacgttattgatgactggtgccggtgcgacctgagcgcgtttgatgctaatggactgcctaactgcagtccactcctgcagcccgtgctgcggctgtcccctacagttgagccctcatccacagtagtttcattggagtgggtggacgtacagcctgcaattggtacaaaggtctccgattacatcctgcaacataaaaaggtggacgagtacactgacacagacctgtatacaggggaattcctgtcatttgcggacgacctcttgtcaggactcggtacttcctgtgtggccgcaggcaggagccatggtgaggtgcccgaagtctccatctattccgtgattttcaaatgtctggaacctgatggactttacaaatttactctgtacgccgtggataccagagggcgccactcagaacttagtactgtaacgctccggactgcttgccccttagtcgacgacaacaaggctgaggaaatcgccgacaagatctacaacctgtacaatggatacacgtcagggaaagagcaacagatggcttacaacaccctgatggaggtaagtgcttccatgctcttccgagtccaacaccactacaattcacactacgaaaagttcggtgattttgtctggcgttcagaggacgaactgggacctaggaaagctcacctcattctgcgtcgactggaacgagtgagctctcactgcagtagtctacttaggtccgcttatatacagagccgggttgaaactgtcccatatttgttctgtagatccgaggaagtgaggcccgcggggatggtgtggtactccattctcaaagacactaaaatcacatgtgaggagaagatggtgtccatggcacggaacacatatggagagtcaaaaggaaggtag

SEQ ID NO: 179604 - DNA, 1188 bp, synthetic construct
  misc_feature 1..1188: note = Description of Artificial Sequence: Synthetic coding sequence
  source 1..1188: mol_type = other DNA
atgcccttcatcacctacctgagcggcctgctgaccgcccagatgctgagcgacgaccagttgatcagcggtgtagagattcggtgtgaggagaaaggccgctgtccatccacctgtcacctgtgccgaaggccggggaaggagcagctgtctccgacccctgtccttctcgagatcaacagagtggtgccactatacacactgatccaggacaatggcaccaaagaagccttcaaatctgccctcatgtcttcttactggtgtagcggcaagggagacgtgatcgacgactggtgccgatgcgacctctcagccttcgacgccaacgggctgccaaattgcagtcccctgttgcagccagtgctgcggttgtctccgacagtggaaccgtccagcactgtggtgagcctcgaatgggtagatgtgcagcctgccatcggtacaaaggtgtcagactatattcttcagcataagaaggtagatgaatacaccgatactgacctctacacaggcgaattcctatcttttgccgatgatctgctgtccggcctcggcacgtcatgcgtggccgctgggaggtctcacggggaagtccccgaggtctctatctactcagtaatctttaaatgcttagagccagacggcctttacaagtttaccctgtacgccgtggatactcgtggcagacattctgagctgtctaccgtaacattacggacagcctgtccactggttgatgataacaaagcggaggaaatcgcagacaaaatttataatttatataacggctacacaagcggaaaggagcaacagatggcctataacaccctcatggaggtcagcgcaagtatgctcttccgtgtgcagcaccactataatagtcattatgagaaattcggtgatttcgtctggcggagcgaggacgaactcgggcctcgaaaagctcaccttatactaaggcgactggagcgtgttagctctcactgcagtagcctcctacggtctgcatatatccagtcaagagttgagacagtgccttatctcttttgcagatcggaggaggtgcgacccgctggtatggtgtggtacagcattctgaaagacacaaagattacatgtgaggaaaagatggtgtcaatggcccggaatacctactatctcacccttagcaaggtttctccgttctag

SEQ ID NO: 179605 - DNA, 585 bp, synthetic construct
  misc_feature 1..585: note = Description of Artificial Sequence: Synthetic coding sequence
  source 1..585: mol_type = other DNA
atgcccttcatcacctacctgagcggcctgctgaccgcccagatgctctcggacgaccagctgatcagtggtgtcgagatccggtgcgaggaaaaaggacgctgcccctcaacctgtcacttgtgcaggcggccaggcaaggagcagctctcccccacccctgtgctacttgagataaatcgcgtggtgccactgtacaccctgatccaagataacggcaccaaagaagcttttaagtccgccctgatgtcatcgtactggtgcagcggaaaaggtgacgtgatagacgactggtgtagatgtgatctctctgcttttgatgccaatggacttccgaactgttccccgctcctgcagccagtgttgcgactttcacctacagttgaacccagttctactgtagtctcccttgaatgggtcgacgtgcagccagcaatcgggacgaaggtaagcgactatattttgcagcacaagaaagtggacgaatacacagacaccgatttgtatacagtatattgttggatcaccttcatcgatctgaggattttaaaccaaccatgcatccctggaatgaagcccacttag

SEQ ID NO: 179606 - DNA, 3867 bp, synthetic construct
  misc_feature 1..3867: note = Description of Artificial Sequence: Synthetic coding sequence
  source 1..3867: mol_type = other DNA
atggccgccgccggcgcccggctgagccccggccccggcagcggcctcaggggtcgtcccagactttgcttccaccctggccctcctccactgcttcctctgctgctgctatttctcctcttgttgccccccccacccctgctcgcaggcgccaccgccgctgcctcacgtgagcccgactcaccctgccggttaaagacggtcacagtgtcgacactgcctgctctgcgtgagtccgacattggatggagcggcgcacgcgcgggcgccggggcgggcacaggcgccggagccgctgctgctgccgctagtcctggcagcccaggttccgccggaactgctgcagagagccgtctgctcttgttcgtaaggaatgaactgccaggccgcattgctgtgcaggatgatcttgacaatactgaactgccctttttcactttggaaatgtctggcaccgctgccgacattagcttggtccactggagacagcagtggctggagaatggaaccctttattttcacgtttctatgtcgagcagtggccagctggctcaggccaccgcacccactctgcaggagccgagtgagatcgtggaagagcagatgcatatactgcatatcagcgtgatgggagggctgatcgctttgcttttgctgctgctcgtattcacagtagccttatacgcacagcgaaggtggcagaaaagacggcggattccacagaaatcggctagtacggaagccactcacgaaatccactatattccatccgtgcttttgggtcctcaagctagggagagctttaggtctagtcgcttacaaacccacaattccgtgatcggggtgcccattagagagactccaattttggacgactatgattgcgaggaggacgaggagcctcctaggcgggccaaccacgtctccagggaagatgaatttgggagtcaagtaacacatacactggactcactcggacaccccggcgaagagaaagtagacttcgaaaaaaagggcggtatatcattcggacgcgcaaaagggacttcaggcagcgaggcagacgatgaaacccaactgaccttttacacagagcagtatagatctcgcaggaggagtaaaggactcctcaagtccccagtgaacaaaactgctttgacacttatcgctgttagttcatgtatccttgctatggtctgtggctcccagatgagttgcccgctaactgtgaaggtgaccctgcatgttccagagcacttcattgcagatggaagctcttttgtggtatccgaaggaagctacctggatataagtgattggctaaaccctgccaagctgagcctgtactaccagatcaatgccacaagcccttgggtcagggacctctgtggtcagaggactaccgatgcttgcgagcaactctgcgatccagagacaggggagtgttcgtgccatgaaggctacgctccagatccggtgcataggcacctctgcgtgaggagcgactggggacagtcggaaggcccgtggccctacactacgctcgaaagaggatatgacctggttacaggggaacaagccccagagaagattctgagatccacattttccttggggcagggcctctggctcccagtgtctaagtctttcgtcgttccaccggtggaactgtcaattaatccactggccagttgcaaaaccgatgtcctcgtgacagaagatccagctgacgtcagagaggaagcaatgctcagtacatactttgagaccatcaatgatctactgtcctcctttggtcctgtgagggattgcagtcggaacaatggcggctgcaccaggaacttcaagtgcgtttccgatcgacaggttgactcctccgggtgcgtgtgtcctgaagaattaaagcctatgaaagatggtagcggctgctacgatcacagtaaaggcatcgactgttctgacggatttaatgggggctgcgaacagctgtgtctccagcagactttgccccttccctacgatgccacaagctctacaatctttatgttctgcggatgcgtggaagaatacaagttggcccccgatgggaaaagttgcctgatgctgagtgatgtctgcgagggccccaaatgcttgaaacccgacagcaagtttaacgacaccctttttggtgaaatgttgcacggttacaataatagaacccaacacgtaaaccagggccaggtgttccagatgacatttagggagaacaatttcataaaggattttccccagctggccgacggcctcctggtcattcccctgcccgtcgaggaacagtgccgcggggtgctaagcgagcccctgcccgacctgcagctcctcaccggtgacatccggtacgatgaggccatgggctaccccatggtgcagcaatggcgtgttaggtctaatctgtatcgtgtcaaattgtccactataaccctggcggctggattcactaacgtactcaagatcctaactaaagagagttctcgagaggagttactcagttttatccaacactacggctcccactacatagcagaggctctgtatggatccgagctcacgtgcattatccatttccctagcaaaaaagtgcaacagcaactgtggctccagtatcagaaagaaacaaccgaattgggctcaaaaaaagagctcaagagcatgcctttcatcacatatctaagcggcctcctaactgcacagatgttgagtgatgaccagctaatatccggcgtagaaattagatgcgaggagaaaggcagatgtccctcaacgtgccatttatgcaggagacccgggaaagaacagctttcccctacccccgtgctgctagaaatcaatagagtggtgcctctttatacactgatccaagataatggaacaaaggaggcctttaaaagtgcactgatgtcgagctactggtgctccggaaagggcgacgtgatagatgactggtgtcgttgcgacctttccgctttcgatgcaaacgggctccctaactgcagccctttactccaacccgtgttacgcctctcccccactgtggagcctagtagtacggtagtgagtttagagtgggtggacgtgcaacctgccatcggcactaaggtctccgactatatcctgcagcacaagaaagtggacgaatacaccgacacggatttatacaccggcgagtttctgtcttttgccgacgatctgctgtcggggcttgggacgtcgtgtgtcgctgctggacgttctcacggagaggtccccgaggtctccatttatagtgtcatttttaagtgtttggagcccgacggactgtataagttcacactctatgccgttgacacaagagggcgccacagcgaactgtctacggtgactctccgaaccgcttgtccactcgttgacgacaataaggccgaggagattgcggacaaaatttataacctgtacaatggctacactagcggaaaggaacagcaaatggcctacaacaccttgatggaggtgagcgcctctatgttatttcgcgtgcagcatcattataacagccactacgagaagtttggagattttgtttggagatcagaagacgagctcgggccccgaaaggctcatttgatcctgcggcggctggaaagagtttcttcccattgtagtagtttactgaggtcagcgtacattcagtcgcgcgttgagactgtcccatacctgttctgcaggagtgaagaggtgagacccgcaggcatggtgtggtatagtatcctgaaggatactaagatcacatgtgaggagaagatggtctccatggctagaaatacctatggagaatcgaaaggcagatag

SEQ ID NO: 179607 - DNA, 1188 bp, synthetic construct
  misc_feature 1..1188: note = Description of Artificial Sequence: Synthetic coding sequence
  source 1..1188: mol_type = other DNA
atgcccttcatcacctacctgagcggcctgctgaccgcccagatgctctctgacgatcagttgatctctggcgtggagattcggtgtgaagagaagggcagatgccccagcacgtgccatctgtgccgtcgtccaggaaaggaacagctctcgcctacacctgtgctgctggaaatcaacagagtggtacctctttatactctgatccaggataatgggacaaaggaggcctttaaatccgccctgatgtcttcatactggtgttctgggaagggggacgtgatagacgattggtgccgctgcgatctgagtgctttcgacgcgaacggactccccaactgttcccctttactgcagccagtgctgcgcctgtccccgactgtcgagccctccagcactgtggtgtcattggaatgggtcgacgtccaacccgctatcggtactaaggtgtccgactacatactacaacataagaaagtcgatgaatataccgacacagacctctacacaggggaattcctttccttcgccgatgacctcctgtcggggctggggactagctgtgtggctgcaggcagatctcatggtgaagtcccggaggtgtcaatctattctgtcatatttaaatgcctggaacctgacggactctataagtttacactatacgcggtggatacaagggggagacattccgaactttccactgtcacactgaggactgcttgtccactggtcgatgataataaggctgaagaaattgccgacaagatctataatttatacaacggctatacttctggtaaggagcagcagatggcgtacaatactctaatggaagtgtccgcaagtatgttgttccgcgttcaacaccactataatagccattatgagaagttcggggactttgtgtggcgttccgaggatgagctgggtccaaggaaagctcatttaattctacggcggctggagcgggtttcatctcactgcagctctcttctgagaagtgcgtacatccagagtcgggtggagaccgtaccatacctcttttgccggtccgaggaggtgcggcccgccggaatggtatggtattctatcttgaaggataccaaaattacatgcgaagaaaaaatggtgagtatggctaggaatacgtactacttgaccctctccaaggtctctcctttttag

SEQ ID NO: 179608 - DNA, 4008 bp, synthetic construct
  misc_feature 1..4008: note = Description of Artificial Sequence: Synthetic coding sequence
  source 1..4008: mol_type = other DNA
atggccgccgccggcgcccggctgagccccggccccggcagcggcctccgaggacggccgcgtctctgctttcaccccggacctcccccactgctgcctctgctccttctattcctgctcctgcttccccctccccctctgctcgctggagcgaccgccgccgccagtcgcgagccagacagcccctgcaggcttaagacggttacagtgagcaccctaccagccctgagggaaagtgatatcggatggtccggggctcgggctggggcaggagcagggaccggagccggggccgccgcggccgccgcgtcacccggctccccagggtctgctggaacagcagcagagtctcgtctgttgctgtttgtgcggaacgaactgcccggtcgaatagccgtacaagatgacctcgataacacggaattgcctttctttacactggaaatgtccggaacagccgcggatatttctctggttcactggagacagcagtggctggagaacggaacactttattttcacgtctcaatgagctcctccggccagctcgctcaagcgaccgctcctaccctgcaggagccgagtgaaatcgttgaggaacagatgcacatcctccacatctcggtgatgggaggcctcattgcgctgctgctgctactcctcgtgttcaccgtcgccttgtacgcgcagcgtcgctggcaaaaacgtaggagaattccacagaagtctgcttccaccgaggctacccatgaaatccactacattccttcggtcctgctgggcccccaggcgcgtgagtcctttagaagttcgcggttacagacccacaactcggttatcggggtgcccattagggaaactcccatcctcgacgattacgactgcgaggaggacgaagagcctccacgtcgagccaatcacgtatcccgagaagatgaatttggcagtcaagtgacgcacaccctggattctcttggacatcccggagaggaaaaggtagattttgagaaaaaggctgctgccgaggctacacaagaaactgtggaatccctgatgcagaaatttaaagaaagcttcagggccaacactcctatagaaattggccagttacagcctccacttagatccacgagtgctggtaaacgtaagcgacggtccaaatcccgcggcgggatttcatttggtagggccaagggtacttcaggtagcgaagccgatgacgagactcagcttacattttacacagaacagtaccgttcgagacgacgcagcaagggactgctcaaaagcccggttaataagactgccttaacactaatagcggttagttcttgtatcttggcgatggtttgtgggagtcaaatgtcatgccctttaacagtaaaggtgactttacacgtgcccgagcatttcatcgccgatggaagtagcttcgttgtatctgaaggttcctacctggatatctctgattggctgaatcccgcaaagctgagtttatactaccaaattaatgctacttcaccttgggtgcgagacctgtgtgggcagcgtacgaccgacgcctgcgagcagttgtgcgacccggaaaccggcgagtgttcttgccatgagggttatgcccccgatcccgtgcatcgccacctgtgcgtgcgttcagactgggggcagagtgagggtccgtggccttacacaacgctggagaggggatacgacctagtcactggggagcaggcccccgagaagatcctttcactcgggcaggggctctggcttccggtgtcgaagtcttttgtggtgcccccggtggaactaagtataaacccgctcgcaagctgtaaaacagacgtgctcgtcactgaagatccggcagacgtcagggaggaggccatgctgtccacatatttcgagaccataaacgatctcctgtccagctttggtccagtgagagactgttctcggaacaatggaggctgtacacggaattttaagtgtgtttcggacagacaggttgacagctcaggttgcgtatgccccgaggaattaaaaccaatgaaagacggcagcgggtgttatgaccacagcaaaggtatcgattgtagtgacggcttcaacggcggatgtgagcagctctgcctacagcagacactcccactcccatatgatgccacttcttcaactattttcatgttttgcggctgcgtagaagagtacaagttagcacctgatggcaagtcatgcctgatgttaagcgacgtctgtgaggggcctaagtgcctgaaacccgactctaaatttaatgacaccctctttggcgagatgttacatgggtataataaccgcacccagcacgtgaaccagggtcaagtgtttcaaatgacctttcgggagaataacttcattaaagacttccctcagctcgcagatggactcctggttattccactgccagtggaggaacagtgtagaggagtgctgagtgagccgctgcccgatctgcagttattaactggcgacataaggtatgacgaagccatggggtaccccatggtacagcagtggagagtgcgcagtaacttgtaccgtgtgaaactctcaaccattactctagccgccggttttacaaatgtgctgaaaatcctaaccaaggaatccagcagggaagaactgctgtcgtttatccaacattatggctcacactatatcgcggaggcgctctacgggagtgagctgacttgtatcattcactttcctagcaagaaggtccagcagcagctgtggctgcaatatcaaaaggagacaactgaactcggttctaaaaaggagttgaagtctatgccattcatcacatatctgagcgggttacttacagcccagatgctgtcggatgatcagcttatctcaggagttgaaatccgctgtgaagaaaagggacgctgtccttctacttgccatctctgcagaaggcctggaaaggagcagctgagccctactccagtgctgctggagataaatagggtggttccgctctacacacttatccaggacaacggcactaaggaagctttcaagagtgcattaatgtcctcttactggtgctctggcaagggcgacgtgatagacgattggtgtcggtgcgacctgagcgcatttgacgccaacggactcccaaactgctctccgctcctgcagcccgtccttcggttaagccctacagtggaaccctcctcaaccgtagtgtcgctagaatgggttgacgtgcaaccagccatcgggactaaggtaagcgactacatcctccagcacaagaaggttgacgagtacacagataccgacctgtatacaggcgaattcctgagcttcgcagacgacctcttgagcggcttgggtacaagttgtgtagcagccggtagatctcacggagaggtaccggaagtgagcatttacagcgttatctttaaatgtctggagcctgacgggctatacaagttcacattgtatgctgtcgacacacggggcaggcactcagaacttagtactgttaccctccggacagcctgccctttagtggacgacaataaagcagaagagattgccgacaaaatctacaacctttataacggttatacctctgggaaggagcagcagatggcgtataacacactgatggaggtgtccgccagcatgctctttagagtgcagcaccattataattctcactacgaaaagttcggtgattttgtgtggcggtctgaggacgagctggggcccagaaaagcgcacctcattctgcgcagactggagagagtatccagccattgctcctccctattaaggtctgcatacatccaaagtagggtggaaaccgtgccctaccttttctgtcggtcagaggaagttcgcccagcaggcatggtttggtacagcatcctgaaggacactaaaataacatgtgaagagaaaatggtttccatggctcggaatacctacggcgaaagtaaggggagatag

SEQ ID NO: 179609 - DNA, 297 bp, synthetic construct
  misc_feature 1..297: note = Description of Artificial Sequence: Synthetic coding sequence
  source 1..297: mol_type = other DNA
tgaatggcctacaacaccctgatggaggtgagcgccagcatgctgttccgggtgcagcaccattataacagccattacgagaagtttggcgacttcgtgtggcgaagcgaggatgagctgggtccctccttactggaaagttttatgtcattgcaagacatcaatctgctcgaacgccgccccggcaggccacagcgccccggaaaccccctctctaacgtgtcctggcggatatctgaaatcgcgccaacctcacacacagacatgagcgctggaataaaggagactgccagctag

SEQ ID NO: 179610 - DNA, 6828 bp, synthetic construct
  misc_feature 1..6828: note = Description of Artificial Sequence: Synthetic coding sequence
  source 1..6828: mol_type = other DNA
atggccgccgagcggcggtgcggcagcatgcgggacctgcgggcccaggtgacctcaggcttgctgccctttccagaagtgacactacaagccctgggtgaggatgagatcactctagaatcagtcctgagaggaaaattcgctgctggcaaaaacggtttggcctgtctggcctgcggaccccagctggaggtcgtgaattcaatcacaggtgaacgtctgtcagcctacaggttttccggggtcaatgaacagccccctgtggtgcttgctgtcaaggagttttcatggcaaaaacggacaggcctgctgatcggactggaagaaaccgagggctccgtgctgtgcctctacgaccttggtatttccaaagtggttaaggcagtggtcctgcccgggcgggtgactgccattgagcccattattaaccacggcggagctagcgcgtccacccagcatctccacccatctctcaggtggctttttggagtggctgcggtcgtgactgatgtcggccagatactgctcgtcgatttgtgtctggatgatctgtcatgcaatcagaacgaagtggaggcatccgatctggaggtgttgacagggatcccggccgaagtcccgcacatccgtgagtcggtcatgagacagggccggcacctgtgctttcagcttgtgtcccccaccggcactgccgtgtcgacactgagctacatcagtcgcaccaaccaactcgccgtggggttttcagacggatacctggccctctggaacatgaaatctatgaagcgtgagtactatatccaactggagtctggacaggttcctgtatatgctgttacctttcaagagcctgagaacgatcctcgcaattgctgttatctctgggcagttcagtctacccaagattcggaaggtgatgtgctcagtttacatctgcttcagttagcttttggaaatcggaaatgcttggcatctgggcagatcctctacgagggcctcgaatactgtgaggaacgatacaccctcgacctgaccggaggaatgtttccgctccggggccaaacgtccaacaccaagctgttaggctgtcagtccattgagaagtttcgcagccacggggaccgggaggagggtgtaaatgaggctctgagtcctgacacttccgtttccgtctttacatggcaggtcaacatatacggccaaggaaaaccctcggtgtacctgggcttgtttgacatcaacaggtggtaccacgcccaaatgcctgactctctcagatctggggagtatctgcataattgtagctacttcgccctgtggagcctggagtcagtcgtgtcgagaacatcaccgcatggcatcctcgatatcctcgttcacgagagatctttgaatcgaggcgtgccccctagctaccctccccccgaacagttctttaatccgtctacatataattttgacgccacgtgcctcctgaattccggggtggtccacttaacctgtaccggattccaaaaagagacactaacattccttaaaaaatcgggacccagcctcaatgagctaatacccgacggatacaacaggtgtctcgtggctgggctgctgagccctcgcttcgtcgatgtgcagcccagctcgctcagtcaggaagagcagctggaagctattctctccgctgctatacagacgtcttccttgggactgctgacaggctatatcaggagatggattaccgaggagcagcccaatagtgcaactaacctccgcttcgttttagaatggacatggaacaaggtcgtcctgaccaaggaagaattcgaccggctttgcgtccccctgtttgacgggagctgccatttcatggatccgcagacaattcagagtattcagcagtgctatcttttattatctaatcttaatattgtgctgagctgcttcgcctctgaagccagagagatcacagaacgaggactcattgacctgtccaataaattcgtggtgtcacatctcatttgccaatacgcccaagtagtgctgtggtttagccactctggcctgttgccagagggtatcgacgactctgtgcagctctcaagattatgctacaactacccagtcatccagaactattacacctcgagacggcaaaaattcgagagattatccagaggcaaatggaatccagattgtttaatgattgacggcctagtgtcacagctgggcgagaggattgagaaactctggaagagggatgaagggggcaccggaaagtatcctccagcatctttgcatgccgtgttagacatgtatttactggatggcgtgactgaggctgccaaacattcgatcaccatatacttgctactcgacataatgtatagcttcccaaacaaaactgatacaccgatcgagtcttttcctaccgtgttcgcgatcagctgggggcaggtgaagctaattcaggggttttggttgatcgatcacaatgattatgagagcggcctggacttattgttccaccccgcaacggccaagccactgtcctggcaacactccaaaatcatccaggcgttcatgtcacagggtgagcacagacaggccttacggtacattcagactatgaagccaacagtgtcaagcggtaacgatgtgatccttcacctcactgtgctcttgttcaatagatgcatggttgaggcttggaatttccttcgacagcattgtaacaggctcaacatcgaggaattgttaaagcacatgtatgaggtatgccaggaaatgggtctgatggaggacctgctgaaactaccatttacggataccgaacaggagtgtttggtgaaatttcttcagtccagcgctagtgtgcagaatcatgagtttttgctggtccaccacctgcagagagccaattacgttcccgcgctgaaattaaaccagaccctgaaaattaatgttatgaatgatagggaccccaggctgcgagagagatccttggcccgaaactctatactggatcaatatggcaagattcttcccagagtgcaccgaaagctggccatcgaaagagccaaaccatatcatctgtccacatcttccgtgttccggctggtgagtaggcccaagcccctaagcgccgttcccaagcaggtggtcactggcacagtgctaacaaggagtgtgtttatcaataacgtgttaagcaaaatcggagaggtgtgggcaagtaaggagcctatcaattctaccacaccctttaattccagcaaaattgaagagccatctccaatcgtgtatagcctgccagccccggagctgccagaagcgttttttggaacccccattagcaaggccagtcagaagatctcccggctcctagatctggttgtccagcccgtccctcgcccaagtcaatgtagtgaatttatccagcagtcttctatgaagagtcccctctacttggtgagtcgttccctgccctcgtcaagtcagctaaagggatcaccacaagcaatatcgcgggcttccgagctgcatctattggagactccgctggttgtgaaaaaagccaagtcgcttgctatgtcagtgactacaagcggattcagcgaattcaccccccagtctattctgaggtctactctcagatccacacctctcgcgtctcctagcccttcccctggacgcagcccgcagagactgaaggaaactagaatctctttcgtcgaagaggacgtccaccccaagtggattcctggcgccgctgacgatagcaaactggaggtattcactactcccaaaaagtgtgcagtcccagttgagactgaatggctgaagtccaaagaccggaccaccagtttcttcctgaactcccccgaaaaggagcaccaagagatggatgagggctcacagtccctcgagaaactggacgtgtccaagggaaacagcagtgtgagtataacatccgacgaaacaaccctggaataccaggatgcccctagtccagaagatctggaagagacagtatttaccgcttcaaagccgaagtcaagttctactgcactgaccacaaacgttaccgaacaaacggaaaaggacggcgacaaagacgtgtttgcctccgaagtgaccccttctgacctacaaaagcagatggggaatctcgaggatgccgagactaaggacctgctagtggccgccgaagctttcagtgaactcaaccacctatccccggtgcaagggactgaagcgtcactgtgtgccccttctgtatatgaagggaagatctttacacagaaatcaaaggtaccagtgctcgatgaaggcctgacatccgttgagacctatacccccgcaatccgcgccaatgataataagagtatggccgatgtgcttggcgatggagggaactccagtctgacaatttctgaaggccctattgtctctgaaagacgcctgaatcaagaagtcgccttgaatctcaaggaagaccatgaagtcgaggttggagttctgaaggagagcgtggacttgcctgaggagaaattgccaatatctgactctccacctgacactcaggaaattcacgtgatagagcaagagaagcttgaggcccaggacagtggggaggaagcgagaaacttgtcattcaacgagctgtatcccagtggcaccctgaagctgcagtataatttcgatacaattgatcaacagttctgcgacttggctgataataaagacactgccgagtgtgatattgccgaagtggacggagaactctttgtggcccagagtaacttcacattaatcttggaaggagaggaaggcgaggtcgagccaggtgacttcgctagcagtgatgtgctgccgaaggctgcaaataccgcgaccgaggaaaaacttgtctgtagcggagaaaatgacaaccatggccaaatagctaacctgccgagcgcagtgaccagcgatcagaaaagtcagaaggtggacacgctgccttacgtcccggagcccatcaaagtcgctattgccgagaatctgcttgatgtcatcaaggatacccgcagcaaagagattacttccgacactatggagcagtccattcatgaaacaatccccctcgtatcacagaacataatgtgtcctactaagctcgtgaagtccgccttcaaaacagctcaggagacaagtactatgacaatgaacgtgtctcaagtggacgatgttgtgtcctctaaaactcgcaccagaggacagaggatacagaacgttaatgtgaagagcgcccaacaagaagcctcagctgatgtggctacgcccaaaatgccagggcagagcgtccgaaagaaaacccgtaaagccaaagagatttctgaagctagtgaaaatatctacagtgacgtccggggcctctcacagaaccaacagattccgcagaactccgtgaccccaagacgcggccgcaggaagaaagaggtgaaccaggatatcctcgagaataccagctccgtagagcaggagctccaaataaccacaggtagagagagcaaaaggctcaaatcgtcacagcttctagagcctgccgtggaagaaacgactaagaaagaggtcaaggtgtcttctgtgactaagcggacaccccgacgcatcaagaggagcgtggagaaccaggaatcagtggagatcattaatgacctgaaagtgtcaactgtgacctctcccagccggatgattcgaaagttaagatcaactaatctcgacgcaagtgaaaacacgggcaataaacaagatgacaagtcttccgacaaacagctccgaatcaagcacgtgaggcgggtgcggggtagagaagtctctccgtccgatgtgagagaagactcaaatctggaaagctcccagttgacagtacaggctgagttcgatatgagtgcaataccacgcaagagaggtcgtcctcgcaaaatcaacccatctgaggacgtcggtagcaaggctgtgaaggaagagcggtcacctaaaaagaaggaggccccatcaattcgacgcaggagtactcgaaatacccccgccaagagcgagaatgtggacgtgggaaagccggccttaggcaagtcaatcctggtgcccaacgaagagctgagcatggtcatgtccagtaaaaaaaagctaaccaagaagactgagtcccagtcacaaaagaggagcctccactcagtgtctgaggagaggactgacgagatgacccacaaagaaacgaacgagcaggaagaacggttgctggcaacagcttcgttcaccaagagctcccgctcctctcgtactaggagcagtaaggctatcctgttgccagacctctcagagccaaataacgagcccctgttcagcccagccagcgaggtgccgcgtaaagcgaaagcgaaaaaaatcgaagtcccagcccaactgaaggagttagtatcagatttaagttcccagtttgtgatcagcccacccgccctccggtcaagacagaaaaacacatcaaacaaaaacaaattagaagacgaactaaaggacgatgcacaatccgtcgaaactctgggtaagcccaaggccaaacgcattcgaacatccaagacaaaacaggcctcaaaaaacacggagaaggagagtgcatggagtcccccccctatagaaatccgactaatcagtcccctcgcctctccagctgatggcgtgaagtccaagcctaggaaaacaacagaggtgacagggaccgggctaggcaggaacagaaagaagctttcatcctatcccaagcagattttgcgacgaaagatgctctag

SEQ ID NO: 179611 - DNA, 6906 bp, synthetic construct
  misc_feature 1..6906: note = Description of Artificial Sequence: Synthetic coding sequence
  source 1..6906: mol_type = other DNA
atggacagcctggccggcctgagcccccgggaggccgccggcgtgctctccctctcttgcgtgggagtgtgttctacttgcgcgtgggcatggccccacggctccatgagggatctgagagcacaggtcacttctgggctgctgccgttcccagaggtgaccctacaggccctcggggaggatgaaattactctcgagagcgtgctacgaggaaagttcgctgccggcaaaaacggacttgcttgcttggcctgtggaccccaacttgaggtcgtaaactccatcaccggggagcgcctgagcgcgtatcgtttcagcggcgtgaatgagcagcctcccgtagtgctggcagtgaaagagttctcatggcagaaacgaacagggctgcttatcggcctcgaagagaccgagggtagtgtcctgtgcctgtatgacttggggatcagcaaggtggtgaaggcggtagtgttacccggcagagtcacggccattgagcccatcattaatcacggcggggcgtccgcctccactcagcacctacatccgtctctgagatggttgttcggtgtcgccgccgtagtgacagatgtgggacaaattctcttagtcgacctgtgcctcgacgacctctcgtgcaaccagaacgaggtcgaagcatctgatctggaggtccttaccggtatcccggccgaagttccccatattcgtgagtctgtcatgaggcagggtaggcatttgtgcttccagctggtttcccccacagggactgctgtgagcaccctgagttacatttccaggactaatcaattggcagttggttttagcgacggatatctggccttgtggaacatgaagtccatgaagagggagtactatatccagcttgaatctggccaggtccccgtgtacgccgtgacgttccaggagcctgaaaatgacccccggaactgctgttacctgtgggccgtgcagtccactcaggatagtgaaggggacgtcttgtctctccatctcctacaacttgcctttgggaatcggaaatgtctggcctcaggacaaattctgtacgaaggcctggagtactgcgaggaacgatatactctggacctgaccggggggatgttcccattgcggggacagacctcaaataccaaactgctgggatgccagtctatcgagaagttccgtagccatggggatcgtgaagagggggtgaatgaagcactgagccctgataccagtgtgtctgtctttacatggcaggtaaacatttatggacagggcaagccttctgtttatttaggcctattcgatattaatcggtggtaccacgcccaaatgccggactccttacggagtggagagtacctgcacaactgttcttatttcgccctgtggagcttggagtccgtggtgagcagaaccagcccgcacgggattctggacattctggtgcacgagcgatcactcaatcggggggtgcccccaagttaccccccacccgaacagttctttaacccttctacttacaactttgatgctacttgcttgctgaactctggggtggttcatctcacctgcaccggctttcagaaggaaacactcaccttcttgaagaagtctggaccctccctgaacgaactgatccccgatggctacaaccgctgtctcgtggcggggctgctgtctcccagatttgtggacgtacagccaagttcactgtcacaagaggagcagcttgaggccatcctctctgccgccatacaaaccagctcgctgggactgttgactggttatattcgtagatggatcactgaggagcagccaaattctgctactaatttaagatttgttctcgaatggacgtggaataaggtagtactgaccaaagaggagtttgataggctgtgtgtgcctctgtttgacggttcctgtcactttatggacccccagacgatccaatccattcagcaatgttatttacttctaagcaatctgaatatcgtgctttcctgcttcgccagtgaagcccgggagattacagaaaggggcctgatcgatctctcaaataaatttgttgtctctcacttgatttgtcagtacgcccaagtcgtcttatggttttcacactctggactccttccagaaggcattgacgattccgtccaattgtctagactctgctataattacccagtgattcagaactactatactagtagacggcagaagttcgagcgcttgtccagggggaaatggaaccctgactgcctgatgatcgacgggctggtgagccagctgggggaaagaatcgagaagctgtggaagcgggacgaaggaggtacaggaaagtacccacccgcatctctgcacgctgttttggatatgtacctgctcgacggtgtgaccgaagcagcgaaacattcaattaccatttatttgctgttggatattatgtacagcttcccaaataaaactgacactcctattgagagcttcccgacagtgtttgcaatatcttgggggcaggtgaaactcatccaggggttttggctgatcgaccacaacgattatgaaagtggcctggacctgctgttccaccctgccacagctaaaccgctgtcctggcagcactcaaaaatcatccaggcttttatgtcccaaggcgagcatcggcaagccctgcgctacatacagactatgaagccaactgtgtcttcagggaatgatgttatcctgcatctgaccgtactgctgttcaatagatgtatggtggaagcttggaacttcttgaggcagcattgtaatcggctcaacatagaagaactgctgaagcacatgtacgaggtgtgccaggagatgggattgatggaagatctccttaaattgccctttacggacacggagcaggagtgtctcgtgaaatttctgcagtccagcgcctctgtgcagaatcacgaattcctgttggtccaccacctgcagagggccaactatgtgcccgctctgaagctgaatcagaccctaaagatcaatgtgatgaatgatcgcgacccccggttgagagaacgtagcctggcccgaaactcgatcttagaccagtatggcaaaatcctccctagagtgcatcgtaagcttgcaatagaaagagccaagccgtaccacttgtccacaagctcagtgttcaggctcgtctctcgcccgaagccattaagtgcagtccctaaacaggtggtgaccgggaccgtgctaactaggtcagtgttcatcaataacgttctaagtaagattggcgaagtctgggccagtaaggaacctatcaacagcacaacgccattcaactcatcaaaaatcgaggagccgagtcctatcgtgtacagtttgcctgcccctgagctccctgaagcttttttcgggactcctatctccaaggcatcacagaagatcagcagattgctagacttagtggttcagccggtcccacgacctagtcagtgctctgagtttatccagcagagcagcatgaaatcccctctatacttagtcagcagatccttgccctcctcctcccagctgaagggctctccccaggccatttctagagcgtctgagctgcatcttctggaaacgcccctcgtcgtgaagaaggctaagtcgctggccatgtctgtcacaactagtggattttcagagttcactccgcagtcaattttacgttcaacactgcgaagcacgcccctggcctccccctccccatcgccaggcagaagcccccagcgtcttaaggaaaccagaatcagcttcgtagaagaggatgtgcatccgaaatggatcccaggcgcagccgacgacagcaagctggaagtgttcacaacacccaaaaagtgcgcagtacctgtggagaccgagtggttgaaatccaaagataggacgacaagcttttttctgaacagtccagaaaaggaacatcaggaaatggatgaaggtagccagtctctggagaaacttgacgtttccaagggaaacagctctgtctcaatcacaagcgatgaaacaacactggaataccaggacgctccgagtcctgaggacctcgaggaaacagtcttcactgccagcaagcccaagtccagcagtacagcactcaccaccaacgttacggagcagaccgagaaagacggcgacaaagacgtgttcgcatctgaggtcactccgagcgacctccagaaacagatggggaatctagaggatgcggaaactaaggatctgcttgtggcagccgaggcgttctcggaactgaaccacctctcccctgtgcagggcacagaggcttcgttgtgcgccccatctgtgtatgaaggaaaaattttcactcaaaagtcaaaggtgccagtccttgacgagggcctgacaagcgtcgagacatacacacctgctatccgtgctaacgacaacaagagcatggctgatgtgctcggtgacggcgggaatagctccctgacaatctccgagggtccgatcgtctccgaaaggaggctgaatcaagaggtagccctgaatctcaaggaggatcacgaggttgaggtgggcgttttgaaggaaagtgtggatctgcctgaggagaaattgcccatctctgactctccccctgatacccaggaaatccatgtgatcgagcaggaaaagcttgaggcccaggattccggggaggaggcgagaaacctttcgttcaatgagctctatcccagtggaactctcaagctgcagtacaatttcgacactatcgaccagcaattttgtgacttggcagataacaaagacacagccgagtgcgatatcgccgaggttgatggcgaactcttcgttgcccaatccaatttcactcttatcctggagggcgaagaaggcgaagtcgaacccggcgacttcgcaagcagcgacgtcctgcccaaggctgccaatacagctactgaggaaaagctcgtctgctccggagagaacgataaccatggccagatcgccaacctgcctagcgccgtgacatctgaccagaagagccagaaagtcgacactctcccgtatgtacccgagcctatcaaggttgccatcgccgagaatcttctggacgtgattaaggacacgcgaagcaaagagataacctccgataccatggagcagtcaatccacgagacgattcctctggtcagtcagaatattatgtgtcccactaagctggtgaagagcgcattcaagaccgcccaggagacgagcacaatgacaatgaatgtatctcaagttgacgacgtggtgagctctaagactcgcacccggggccagaggatccagaatgtcaatgtaaaatcagcacaacaggaggcttctgccgatgtcgccactccaaaaatgcccggacagagcgtcaggaaaaagactagaaaggccaaagagatttcagaggcaagtgaaaatatatatagtgatgtgcgtggactgtcacagaatcaacagattccacagaactccgtgacgccaaggagaggcaggcgaaagaaagaagtgaaccaggacattctcgagaatacaagctcagtcgaacaggagctgcagataactaccgggagggagtctaaacggctgaagagttcccagcttctggaaccggcagtggaggagaccacaaaaaaagaggtgaaagttagttccgtgacaaaaagaacccctcgacgcattaagcggagcgtggaaaaccaggaaagcgtggaaatcataaatgatcttaaggtgtcgaccgtcacatccccttcccgcatgatccggaagttaaggagcactaacctcgatgccagcgagaatactgggaataaacaagatgataagtcctccgacaaacaactacgcatcaaacacgtgagaagagtgagggggcgagaggtgtctcccagtgatgtgcgagaggattcaaaccttgaaagcagccagctgaccgttcaagcagaattcgacatgagcgctatacctcgcaagcgcggccgtcctcgcaaaattaatccgtccgaggatgtgggcagtaaggccgttaaagaagagaggagccctaagaagaaggaggctccaagcatccgaaggcgtagcaccaggaatacccccgccaagagcgagaatgtcgacgtgggaaaacctgctctcgggaaatctatcctagttccgaatgaagaactttccatggtcatgtcatcaaagaaaaaactgaccaaaaagactgagagccagtctcaaaagcgcagcctgcatagcgtgtccgaagagaggaccgacgagatgacacacaaggaaacaaatgaacaggaagaacgcctgctggcaaccgcatcctttaccaaatcttcaaggagctctagaactcgaagctctaaggcaatccttctgcccgacctttccgaaccgaataacgaaccccttttttcccctgcaagcgaggttcctcggaaagccaaagccaaaaaaattgaagtgcccgcacagctgaaggagctggtgtcggacctcagcagccaattcgttatatcaccacctgccctgcgcagtagacagaaaaatactagcaataagaacaaactggaggatgagctgaaggatgatgcccagagcgtcgagactctgggaaagccaaaagcaaaacggattaggaccagcaaaaccaagcaggcgtccaagaatacagagaaggagtctgcctggagccccccccccatagagatacgtttaatttctccgctagccagcccagcggatggagtgaagtcgaagcccaggaagaccacggaagtgacagggaccgggctcgggaggaacaggaagaaactgagctcctatccgaagcagatcctaaggagaaagatgctgtag

SEQ ID NO: 179612 - DNA, 6801 bp, synthetic construct
  misc_feature 1..6801: note = Description of Artificial Sequence: Synthetic coding sequence
  source 1..6801: mol_type = other DNA
atgcgggacctgcgggcccaggtgaccagcggcctgctgcccttccctgaggtaacactgcaggcactaggtgaggacgagattacgctggagtccgtgcttcggggtaaattcgcagctggaaaaaatggcctggcctgcttggcctgcgggccacagctggaggtagtgaacagcatcacaggcgaacgcctctccgcttatcggttctctggtgtcaatgaacagccccctgttgtgttagcggtcaaagaattcagttggcagaaacggacagggttactaattgggctcgaagaaacagaggggtcggtcctctgcctgtacgacctgggaatatcgaaggtcgtgaaggccgtcgtgctgccgggccgcgtgacagctatagaacctattattaaccatggcggggcatcagcttcaacacagcacctgcatccatcgcttcgctggctgtttggcgttgctgcagtggtcactgatgtgggtcagatactgctagtggacctatgcctagatgatctgtcttgcaaccagaacgaggtggaagcttctgatctggaggttctgacaggaatacccgctgaggtaccacatatccgtgagtctgtgatgcgacaagggcgccatctgtgctttcagttggtgtctcccaccggcactgcagttagcactctaagctacatcagtagaacaaatcagttagccgtgggcttctcagacggctatttagcattgtggaatatgaaatccatgaagcgggagtattatattcagctcgagtccggccaggtccctgtgtacgctgtgacctttcaagaaccggaaaacgaccctcgcaactgctgttacctatgggctgtgcaatccactcaggactcagagggggatgtcctgtctctccacctgctccagctggccttcgggaacagaaaatgcctcgcatctggacagatcctgtatgaaggcctggagtactgtgaggagcgctatacactggatctcacagggggaatgttccccctccgaggacagactagcaacacaaaattgctgggctgccagagcattgaaaagttccgaagccacggggacagggaggagggggtcaacgaggccttatctcccgacacctctgtgtccgtgttcacctggcaggtcaacatttatgggcagggtaagccttcagtttatctgggtctgttcgatatcaataggtggtatcatgcccagatgcccgactctctccgcagcggtgagtacctgcataattgctcctatttcgccttgtggtcacttgaatcggtggtgagcagaacgtcacctcatggcatacttgacatcctcgtacacgaaaggtccctcaatagaggagtgccaccaagctaccccccgccagaacagtttttcaaccccagcacctacaatttcgacgccacgtgcctcctcaatagcggggttgtgcatttgacatgtacaggattccagaaggaaacactcacctttctgaagaagtccggccccagtctgaatgagttgatacccgacggatacaacagatgcctggtcgcgggcctcctttcacccaggttcgtggatgtgcagccctcttccctttcacaagaggaacaattggaggccatcctgagcgcagctatacaaacgagttcgctggggctgttgacgggctatattcgtcggtggattactgaagaacaacctaactccgccactaatctgcggttcgtccttgaatggacatggaacaaagtggtattgacaaaggaggagtttgatcgactgtgcgtgcccctcttcgacgggagctgtcacttcatggacccacaaaccatccagagcattcagcagtgttacttacttctaagtaatttaaacatcgtgctatcctgctttgcctctgaggcgcgagaaataaccgagcgcggcctgatcgatcttagcaacaaattcgtcgtgagccaccttatttgtcagtatgcacaggtagtgttgtggttctctcacagcggtctccttcccgaggggattgacgattccgtgcagctgtccagactgtgctataattatcccgtaatccagaactattacacttcacgccggcagaagtttgagcgcctgagtcgcggtaaatggaaccccgactgcctgatgattgacggacttgtgagtcaactcggtgaaaggattgagaagctttggaagagggacgaggggggcacgggcaagtatcctcccgcgagcctacatgccgttctggacatgtatctgttagacggcgttaccgaagccgcgaaacacagtataactatttacctcttactggatattatgtactctttccctaacaagacagacacccctatcgaatctttccctacagtgttcgcgattagctggggtcaagtaaagctgattcagggattttggctcattgatcataatgattacgagagtggcctggatcttcttttccatccagcaacagccaaacctctgagttggcagcattccaagattatccaggcatttatgtcacagggcgagcaccgccaggccctccggtacatccagaccatgaaacctacggttagttcagggaatgatgttatcctgcacctcaccgtccttttgttcaataggtgcatggttgaagcttggaattttttacgccagcattgtaatcggctcaacatagaagagctgctgaagcacatgtacgaggtgtgccaagagatgggactgatggaggacctcctgaagctgcccttcaccgacaccgagcaggaatgcctcgtgaagttccttcagagcagtgctagcgtacaaaaccacgagttcctgttggttcaccatctacagcgggctaactacgtgcctgctctgaaactcaatcagactttgaagatcaacgtgatgaatgatagggatcccagactaagagaacgaagcctagctcggaacagtattctggatcagtacggcaaaattcttccccgtgtgcatcgaaagctggcaattgagagggcgaaaccctaccacctgagcacaagtagcgtttttcggctggtcagtaggccgaaacctctctccgctgttcccaagcaggtcgtaacagggacagttctgacaagatccgtgttcattaataacgtattaagcaagatcggcgaggtttgggcctctaaggagccaatcaactcgaccactccatttaactcatccaagattgaggaaccaagtcctatcgtgtatagcctgccagcaccggaactgccagaggcgttcttcggcacgcccatctccaaagcttcccagaagatcagccgactgttggaccttgtggttcaacccgtgcctagaccatcccaatgtagtgagtttatccagcaatcttccatgaaaagcccactatatctcgtctcaaggtctctccctagtagctcgcagcttaagggatcaccacaggcaatttccagggcctccgagctgcaccttctggaaaccccactcgtagtgaagaaagccaaaagcctcgctatgtctgtcaccaccagcgggttcagcgagttcacacctcaatcgattctacgatctacactgcgttcgaccccactggcttcaccgagcccttctcctggtcggtctccccagcgcttgaaggaaacccgaattagcttcgtagaggaggatgtgcatcctaaatggatccccggagccgccgacgacagcaaactggaagtgtttacgaccccaaaaaagtgtgctgttccagtggaaaccgaatggctcaagtccaaagaccggaccacctcctttttcctaaactcgccagagaaggagcatcaggaaatggacgaggggagtcaatctctcgaaaagttggacgtgagcaagggtaactcctctgtttcaatcacaagtgacgagaccacgctcgaataccaggatgcccccagccccgaggacctggaggaaacagttttcaccgcctctaagccgaagagctcttccacggcacttactaccaatgtcactgagcagacggagaaagatggggataaggatgtgtttgcatccgaggtaacaccatcagacctccagaagcagatgggaaacttagaggatgccgagaccaaagaccttcttgtggcagccgaagcctttagcgagctcaatcacctctctcccgtgcagggaaccgaagcttccctttgtgcgccaagcgtgtatgagggcaagatcttcacccagaagtctaaggtaccagttctcgacgagggcctgacaagcgtcgagacctatactccagccatacgggccaatgacaataagtctatggcggacgtgctgggggatggcggtaatagttcccttacaatatccgaaggcccgattgtctcagagcgcagattaaaccaggaagtggccctcaacctcaaagaggaccacgaggtggaggttggcgttctgaaagagagcgttgatttgccagaggagaaacttcctatatcagattccccacccgacactcaggagatccacgtgattgagcaggaaaaactcgaggctcaggacagcggtgaagaggcccgaaacttgtcctttaacgaactgtacccaagcggaacgctgaagctccagtataacttcgatacaatcgaccagcagttttgcgatttggcggacaataaagacactgccgagtgcgacattgctgaggtggacggggagctctttgtggcacagtcaaacttcacattaatcctggagggagaagagggtgaagtagagcctggcgacttcgccagcagtgacgttctgcctaaggcagctaacacggcaacagaggaaaagttggtttgctcaggcgaaaacgataaccacggccaaatagccaacctaccctcggcggttacaagcgaccaaaaaagccagaaggtcgacactttgccttacgtgcctgaaccgataaaagttgctatcgccgaaaacctgctagacgttattaaagatacaagatccaaagaaataaccagcgacaccatggagcaaagtattcacgagactattccgctcgtatctcagaacatcatgtgcccaactaaactggtgaagtcagctttcaaaactgctcaagagacatcaaccatgacaatgaacgtaagtcaagtggatgatgtggtatctagcaagacccgcaccaggggacagcgaattcagaacgtgaacgtcaaaagtgcccagcaggaggcatcagccgatgtggccactcctaagatgcctggacagagcgtgcgcaaaaaaacaaggaaagcgaaagaaatctcagaggctagtgagaatatctacagtgacgtgagaggccttagtcagaatcagcaaataccccaaaattccgtcactcctcggaggggcagacggaaaaaagaagttaaccaagacatcctggagaacacatcttctgtggaacaggaattgcagatcaccaccggaagggagtcaaagagactcaagtcctcccagctcttggagccagccgtcgaggagacaactaaaaaggaagtgaaagtgagttctgtgactaagcgaacaccacgcagaatcaagcgctccgttgagaaccaggagagcgtagaaataattaacgacttgaaggtttctacagtcaccagtcccagcaggatgatacgtaagctgcggtccacaaatctggacgcctccgaaaatactgggaataaacaggatgacaaatccagtgataaacagctgcgtataaaacacgtgcgcagggtacgggggcgcgaggtcagcccgagtgatgtgcgcgaagatagcaacctggaatcatctcagttaacagtgcaggctgagttcgacatgtctgccatccctcgaaagcgcggccggcctcgcaaaataaatccttccgaagatgtgggaagcaaggccgttaaggaagaacgctcccccaaaaaaaaagaggctccttctatcagaaggcgctcaacccggaacaccccagccaagtcagagaatgttgacgtgggaaaacctgctctcggaaaatccatcctggtccccaacgaagagctgtctatggtcatgagcagtaagaaaaagttgacaaaaaagacagagtcacagagccagaaaaggtccctgcattccgtgagtgaagagcggacagatgagatgacgcataaggagacaaacgagcaggaagagcggctcctagcaaccgcatcattcacaaaatctagccggtcgtcccgaacacgatcatctaaggccattttactacccgacctctctgagcctaataatgaaccgctattcagccctgcctcggaagtgccaagaaaggccaaggccaaaaaaattgaagttcccgcacagctcaaagaactggtgagtgatctttcatcacagttcgttatctcgcccccagctctcagatccagacaaaagaacacgtccaacaagaataagcttgaagacgaactgaaagatgacgcccagtccgtcgagacactgggaaagcccaaggcaaaacgcatacggacctctaagacgaaacaggccagtaaaaacaccgaaaaagagagcgcctggagtccccctcccatagagatacgcctaattagtccactcgcctcccctgctgatggcgtgaagagcaaacctaggaaaactacagaagtaactggaacaggtctgggacgtaatagaaagaaacttagtagctaccccaagcagattctgcggcgtaaaatgctctag

SEQ ID NO: 179613 - DNA, 3567 bp, synthetic construct
  misc_feature 1..3567: note = Description of Artificial Sequence: Synthetic coding sequence
  source 1..3567: mol_type = other DNA
atgaaggccgccgacgagcccgcctacctgaccgtgggcaccgacgtgagcgcgaagtacaggggggctttctgcgaagcgaaaattaagactgtgaagcgcttagtgaaagttaaggtactgctgaaacaggacaatacgacgcagctggtccaagacgaccaggtgaaaggaccacttcgcgtcggcgccatcgtggagacgcgcaccagtgacggctcgttccaggaagcaatcattagtaaattgaccgacgcctcctggtacacagtcgtcttcgacgatggggatgaacgtacactcaggcggacatcactctgcttgaagggcgagaggcacttcgcagagtccgagacactggatcagctgcctctgacaaatcctgaacatttcgggacccccgtcatcgctaaaaaaacgaaccgggggagacggtcttcccttcccgttactgaagatgagaaggaagaggagtcctccgaggaagaagacgaagacaagcgaaggctgaacgacgaactcttgggaaaagtcgtttccgtggtttccgctactgagcgcacagaatggtatcccgcgctggtcataagcccaagctgtaatgatgacattaccgtcaaaaaggaccagtgtctggtgcgttcgttcattgattctaagttttattctatcgcacggaaggacattaaagaagtcgacattttaaaccttcctgaaagcgaactgtccactaagccaggactgcagaaggccagtatcttcctgaaaacccgcgtcgtgcccgataactggaaaatggacattagtgagatactcgaatcaagttctagcgacgacgaagacggcccagccgaggagaatgacgaggagaaggaaaaggaagccaagaaaaccgaggaggaggttccagaggaggagctggatccggaggaacgtgacaatttccttcagcagctgtacaagttcatggaggaccggggcactccgattaacaagccacccgtcctgggctacaaggatctcaacctttttaagttgtttcgcttggtgtaccaccagggcggctgcgataacattgattctggtgcggtctggaaacagatttacatggacctgggcattcccattttaaactccgcggcttcctacaatgttaagacagcctacagaaagtatctttacggttttgaggagtactgcaggtcagccaacatccagtttagaaccgtccaccaccacgagccaaaggtaaaggaggagaagaaggacttggaggagtccatggaggaggccctgaagctggaccaagagatgcctctaactgaagtgaaatccgagcccgaagaaaacattgattccaactctgaaagcgaaagagaggagatcgaactcaagagcccgagaggtagacgaagaatcgcacgagatgttaatagcatcaagaaggagatagaggaggagaaaactgaggacaagctgaaagacaatgacacggaaaataaagacgttgatgatgactacgagacagcggagaaaaaggagaacgagttactgctgggccgcaaaaataccccaaaacagaaagagaagaagattaagaagcaagaggattctgacaaggacagtgatgaggaggaggagaaatcacaggaacgcgaagagaccgagtctaaatgcgatagcgagggagaggaggatgaagaagatatggagccctgtttgacggggacaaaagtgaaggttaaatacggccgagggaagacgcaaaagatttacgaggcatcaatcaaaagcaccgagattgacgatggagaggtgctgtacctggtacactactatggctggaacgtccggtacgacgaatgggtaaaggcagatcggatcatttggcctctggacaaaggagggcctaagaaaaagcagaagaagaaggctaagaataaagaggacagcgagaaagacgagaagagagatgaggaacggcaaaagtctaagaggggacgccccccactcaaaagcaccctgtcaagtaatatgccttatggtctgagcaaaactgcgaacagcgagggtaagagcgacagttgtagcagtgactctgagactgaagacgctttggagaaaaacctcatcaacgaggagctgtccttgaaggatgagctggagaaaaatgagaatctgaatgacgacaaattagatgaggaaaaccccaagatctctgcccatattctgaaagagaatgataggactcagatgcaaccacttgagaccctaaagctggaggtgggagaaaatgagcagattgtacagatcttcgggaacaagatggagaagaccgaggaggttaagaaagaggccgagaagagccctaaaggtaagggacggagatctaagacaaaggatctgtccctggagattatcaagataagctccttcgggcagaacgaagctgggtcggagccccatattgaagcacattcgctcgagctttctagcctcgacaataaaaacttctctagtgcaactgaagatgagattgatcagtgtgttaaagagaaaaagttaaagcgcaaaatactgggccaatcctcgcccgagaagaagattcgtatcgagaatggcatggaaatgacaaatactgtttcccaggagagaacatcagattgtatcggaagtgagggcatgaagaacctcaattttgaacagcactttgagcgcgagaacgaaggcatgccgtcactaattgcagaatcgaaccagtgtatccagcagttgacaagcgagcgctttgacagcccagctgaggaaacagttaatattccattaaaggaggacgaggacgccatgcccctcattggcccggaaactttggtgtgccacgaggtggacttggatgatctggacgagaaagataaaaccagcattgaggacgtcgccgttgagagtagtgaaagcaacagtctggtatcaatccccccagccttgcctccagtggttcagcataacttctctgtggccagccccctcacactcagtcaagatgaaagccggtctgtcaagtccgagtcggacatcacaatcgaagttgattctatagcagaggaatcccaggaaggcttgtgtgaacgcgagagcgccaacggatttgaaacaaacgtagcctctggaacctgctccataatcgtgcaggagagagagtcgagggagaagggccagaagagaccttctgatggcaacagcggcttaatggccaagaagcaaaagcggactccaaagcggaccagcgccgccgccaagaacgagaaaaacggaactgatgaactagacaatatgaatagcacagaacgtatttcctttctgcaggagaaattgcaggaaatcagaaaatactatatgtcactgaaaagcgaagtggctaccatcgacaggcgccgaaaaagattgaagaagaaggacagagaggtgtcccacgccggagcctctatgtcgtccgcctcttctgatactgggatgtcacctagtagcagtagtcctccacaaaatgtactcgctgtggaatgtaggtag

SEQ ID NO: 179614 - DNA, 3774 bp, synthetic construct
  misc_feature 1..3774: note = Description of Artificial Sequence: Synthetic coding sequence
  source 1..3774: mol_type = other DNA
atgaaggccgccgacgagcccgcctacctgaccgtgggcaccgacgtgtccgccaagtatagaggcgctttttgcgaggctaagattaagaccgtgaagaggctggtgaaagtgaaagtcttgcttaaacaggataacacaacccaactagtgcaggacgatcaggtcaagggtcctttgagggtcggtgctatcgtggagacaagaacaagcgacggttccttccaggaagcgatcatatctaagctcacagacgcctcatggtatacggttgtttttgatgatggcgacgaaaggacactgcgtcgcacaagtctgtgcctgaagggggaacggcatttcgctgagtctgagactttggatcagctaccacttactaaccctgagcatttcggaacccctgtaatcgccaagaagactaatcgaggcaggaggtcctccctgcccgtcactgaggacgagaaagaggaagaaagcagcgaagaggaagatgaggacaagagacgtttgaatgatgaactgcttgggaaagtggtttcggttgtgagcgccacggagcgaaccgaatggtatccggctttggtgatttccccctcatgtaacgacgatattacagttaagaaggaccagtgcctggtgaggagcttcatcgatagtaaattttattctatcgcccggaaagacattaaggaggtggacatcctaaacctccctgagtccgagctctctactaaaccgggtctccaaaaggctagcatctttctcaagacccgagtcgtccctgataattggaaaatggatataagcgagattctggaatcatctagttcagatgacgaagatgggccagccgaggagaatgatgaagagaaagaaaaagaagcgaagaaaaccgaggaagaggtgcctgaagaagagctcgatcccgaggaacgagataacttcctccaacaactttacaagttcatggaagatcggggcacacctatcaataaacctccggtcttagggtataaggatctgaacttgtttaagctatttcggctggtataccaccaaggcggttgtgacaatatagatagcggcgccgtctggaagcagatctatatggatctgggaattcccatcctcaactccgccgcttcatacaatgtgaaaactgcgtataggaaatatctgtatggatttgaagaatactgtagaagcgctaacattcagttcagaaccgtgcaccaccacgaacccaaagtcaaagaggagaagaaggacctggaggagtctatggaagaggcactgaagctggaccaagagatgcccctgaccgaagttaaatctgaacccgaggagaacatcgattcgaattccgaaagcgaacgagaggaaattgagttgaagtctccacgaggccgcagacgaatcgcacgcgatgtcaactcaatcaaaaaggaaatcgaggaggaaaagaccgaggacaagctgaaagacaacgatacagagaacaaggacgttgatgacgactacgaaacagcagagaaaaaggaaaatgagttgcttctaggtcggaagaatactcccaagcagaaagaaaagaaaataaagaaacaggaagactctgataaggactctgacgaggaagaagaaaaatcccaagagcgcgaggagacggagtctaagtgcgacagtgaaggagaggaagacgaggaggacatggaaccgtgcctgacaggcacaaaagtaaaagtgaagtacgggcgagggaaaacccagaagatctacgaagcttccatcaaaagcacagaaattgatgatggagaggtactatatcttgtgcactactatggctggaatgtgcggtacgatgagtgggtgaaagctgatcgcattatatggccacttgataaaggcgggccgaagaagaaacaaaaaaaaaaggccaaaaataaggaagacagtgagaaagatgagaaaagggacgaggagaggcagaagtccaagcgcggcaggcctcccctgaagagcaccttgagttccaatatgccgtatggcctgtcaaagacggcgaactctgaggggaaaagtgattcatgtagctccgacagtgagacagaggacgccctcgagaagaatttgatcaacgaggaactgagtcttaaagatgagctcgagaaaaatgagaatctgaacgacgataaactggacgaggaaaatccaaagatctcagcgcacatccttaaagagaacgacagaacccagatgcagcctcttgagactctgaagcttgaagtaggtgagaatgagcagatagtgcagatctttggaaataaaatggagaaaacagaggaggttaaaaaggaagccgaaaagtccccaaaagggaaagggcggcgctccaaaaccaaggacctgagcctggaaattatcaagatatcctcctttggtcagaacgaggccggcagcgaaccccacattgaagcacatagtctcgagttgtcatcactggacaacaagaacttcagtagcgcaaccgaagatgaaatcgaccagtgcgtgaaagagaaaaaactgaagaggaagatactgggccaatcatcacctgagaagaaaattcgtatcgagaatggaatggagatgacaaatacggtctctcaggagcgtaccagcgattgtatcggctctgagggaatgaagaacttgaatttcgagcagcactttgaaagagaaaacgagggtatgccctcgctgatcgccgagagcaaccaatgtatacagcagcttacttctgagcggttcgattcgccagccgaggagacagttaatattccacttaaggaagacgaagacgccatgcctcttatcggacccgagacactcgtctgccacgaggtggacctggatgatctggacgagaaagataagacaagcatcgaagacgttgcggtggagtcttctgagagcaacagcctagtgtctattccaccggctctaccaccagtcgtgcagcataatttcagtgttgcatcccctttaaccctgagccaggatgagagcaggtcggtcaaaagcgaatccgacattacaatagaagttgattccatcgccgaggagtcccaggaagggctgtgtgaacgcgagtccgcaaacggttttgagacaaatgtcgcatctggcacgtgctccatcatcgtgcaagaaagagaatccagagagaaaggccagaaaaggcccagtgacggcaatagtgggctaatggctaaaaaacaaaaacgcacccccaagaggacttccgcggccgccaaaaatgagaaaaatggaactggacagtcaagtgattcagaggatttacccgtgttggacaactccagtaaatgcacaccagtgaagcacttaaatgtatcaaaaccacagaagctggctaggagccctgcccgaatctcgccacatattaaagacggtgaaaaggacaagcatcgcgagaaacaccctaattctagtccccgcacttataagtggtctttccagctcaacgaactagacaacatgaattccacggagaggattagtttcttgcaggagaagctccaggaaattaggaagtactacatgtcactcaaatcagaggtcgccacgatcgataggcggcgcaaacgccttaagaagaaggatagggaggtgtctcatgccggggcaagcatgagttcggcatctagcgacaccggcatgagtccttctagcagtagtccacctcagaatgtgctggccgttgagtgccggtag

SEQ ID NO: 179615 - DNA, 3612 bp, synthetic construct
  misc_feature 1..3612: note = Description of Artificial Sequence: Synthetic coding sequence
  source 1..3612: mol_type = other DNA
atgaaggccgccgacgagcccgcctacctgaccgtgggcaccgacgtcagtgctaaataccggggcgcattctgtgaggcgaaaatcaagacagtgaagcggctggtgaaggtcaaggttctgttgaagcaggacaatacaacacaactggtgcaggatgaccaagttaagggaccgttgagagtaggagctatcgtggagacgcgaacgtccgacgggtcatttcaggaagcaataatctccaaactcaccgatgctagctggtataccgtcgtttttgacgacggggatgaacgcaccctcaggaggacatctctgtgtctcaaaggagaaagacacttcgcagaaagcgagactctggatcagttgcctctaacgaatcccgagcatttcggcaccccagtcatcgccaagaagacaaatcgcgggagaagatcttctcttccagtgacggaggacgagaaagaagaagagtcctcagaggaagaggacgaggataagcgccggctgaacgacgagttgttggggaaggttgtctctgtggtctcagccacagagcgtactgaatggtaccctgcactggtcatcagcccgagttgcaacgatgatattaccgtgaagaaggaccagtgtttggtcaggtcttttattgacagcaaattctattctatcgccagaaaagacataaaagaggtcgacatcctcaatctgcctgaatccgagttgtcgaccaaaccggggctgcaaaaggcaagcatcttcctgaagacaagggtcgtgcccgacaattggaagatggacatctctgaaatactggaaagcagcagctccgacgacgaagatggaccagctgaggagaatgatgaggaaaaagaaaaagaggcgaaaaaaactgaggaggaggtccctgaagaagaactggatccagaagagcgggacaacttcctccagcaactttataagtttatggaggacagagggacgccgatcaataaacctcccgtcttgggctacaaggatcttaacctgtttaagttgtttcggttggtgtaccaccagggcgggtgcgacaacatcgactccggagctgtgtggaaacagatttatatggacctggggatccctatcctgaacagtgcagccagctacaatgtgaaaaccgcatatcgtaaatacctatacggatttgaggagtactgcagatcagctaatatccaatttcggacggtgcaccaccatgagccaaaagttaaagaggagaagaaagaccttgaggaatccatggaagaggccctgaaactggaccaggaaatgccgctgaccgaggtgaagtccgaacccgaggaaaatatagacagcaatagcgagtctgagagggaggagatcgagcttaaatcccctagagggagaagacggattgcacgggatgtcaacagcatcaagaaagaaatcgaagaggaaaagaccgaggataagctgaaggacaacgataccgaaaataaagatgtggacgacgactacgagaccgccgagaaaaaagagaatgagctgctgctcggacgcaagaacactcccaaacagaaagaaaaaaagattaaaaaacaggaagactctgataaagactccgatgaggaggaagagaaatcacaggaacgagaggagaccgagagcaagtgcgactccgagggtgaggaagacgaggaggatatggagccctgtcttactggaacaaaagtgaaggtaaaatacggaaggggtaagacccagaaaatctacgaggccagcatcaagagcacagagattgacgacggtgaagtcttgtacctggtgcattactatggctggaacgtgcgatacgacgagtgggtgaaggctgacagaattatttggcctcttgataaaggtggacctaagaagaaacagaaaaagaaagcgaagaacaaggaagacagtgaaaaggacgaaaagcgcgacgaagagaggcagaaaagcaagcgtggcagaccgccactcaaatccaccctgagttccaatatgccatatggcttatcaaagacagccaatagtgaggggaagtctgatagctgctcctctgattcagaaaccgaggatgccctcgaaaaaaatttgatcaacgaggaactgagtctcaaggatgaactcgaaaagaacgaaaacttaaatgatgataagctggatgaagagaacccaaagatctccgcccatatactgaaggagaatgacagaactcagatgcagcctctcgaaacacttaaacttgaggtgggcgagaacgaacaaattgtgcagatcttcggaaacaaaatggagaaaactgaagaggtcaaaaaagaggccgagaagtcccccaaggggaaggggcgccgtagtaaaactaaggatctctccttagagatcataaaaatctcttccttcggacagaacgaggccggctcagagccccacatcgaggcgcacagtttagagctgtccagcctagataataagaacttttctagtgccactgaggacgaaattgatcaatgcgtcaaggagaagaaactgaagcgcaaaatactggggcaaagtagcccggaaaagaaaatccggatcgagaacggaatggagatgaccaacacagtctcacaagagagaacaagcgactgcataggctccgagggaatgaaaaacctgaatttcgagcagcattttgaaagagagaacgaaggtatgccatctttgatagcagaaagtaaccagtgcatccagcagttgacttctgaacgctttgactcaccagctgaagaaactgtgaatattcccctcaaagaggatgaggatgccatgcccctgattgggcctgagactctcgtgtgccatgaggtggatctagacgaccttgacgaaaaggataagacttcaattgaagatgtcgctgttgaatcatccgagagcaatagccttgtttcaataccacctgccctgcctcctgtggtccagcacaacttttccgtggccagtcccctcacacttagccaggacgagtccagaagcgtcaagagcgaaagcgatatcaccatagaagtggattcaatcgccgaagagagccaggagggtctttgtgagagggaaagcgccaacggattcgagactaatgtcgcctcgggaacctgtagcatcatcgtacaggaaagagagagcagagaaaaaggccagaagagaccttccgacgggaacagtgggctcatggcaaagaaacagaaacgcacccccaaacgcacaagcgctgccgctaaaaatgagaagaacggtacgggacaatcttccgacagcgaagaccttccggttctcgacaacagtaatgaattagacaacatgaacagtaccgagaggatcagcttcctgcaggagaagctccaagaaatacgaaagtactacatgtccctgaaatcagaggttgctacaatcgaccgccggcgaaagagactgaagaagaaagaccgggaagtgtctcacgccggcgcgagtatgtcgtccgcaagttctgacaccggaatgtcccccagctcatccagtcccccccagaatgtgcttgcagtcgagtgtagatag

SEQ ID NO: 179616 - DNA, 165 bp, synthetic construct
  misc_feature 1..165: note = Description of Artificial Sequence: Synthetic coding sequence
  source 1..165: mol_type = other DNA
atgaaggccgccgacgagcccgcctacctgaccgtgggcaccgacgtgagcgccaaataccgcggcgcgttctgcgaggctaagatcaagacagtaaaacgtcttgtcaaggttaaggtgctgttgaagcaggacaatactacacagctggtccaggatgactag

SEQ ID NO: 179617 - DNA, 3567 bp, synthetic construct
  misc_feature 1..3567: note = Description of Artificial Sequence: Synthetic coding sequence
  source 1..3567: mol_type = other DNA
atgaaggccgccgacgagcccgcctacctgaccgtgggcaccgacgtgtccgcgaagtaccgaggcgccttctgtgaggcgaaaataaaaactgtaaaaaggttagttaaagtgaaagtcctgctcaagcaggataataccacccagctggtccaggatgaccaggtgaaaggccctctgcgtgtgggtgccatcgtggagacccgaacctcggatggatcattccaagaagctatcatcagcaaacttactgatgcatcttggtacaccgtggtcttcgatgacggcgatgagcggaccctgcgacggacctccctgtgcctaaaaggcgagaggcacttcgccgagtccgaaactttggaccagctgccactgacaaaccctgaacactttggaacaccagtgatcgccaaaaaaactaatagggggagacgttcatcactgccagtgactgaagatgagaaggaggaagaatcctctgaggaagaggatgaggataagagaagactaaacgacgagctgctgggcaaagtggtgtcagtcgtgagcgcgaccgaaaggaccgaatggtaccctgcattggtaatttccccaagttgcaatgatgatatcaccgtgaaaaaagaccagtgcctggtccggtcatttatcgatagcaaattctacagtatcgctagaaaagatataaaggaggtggacatattaaatttaccagaaagtgagctatccaccaaaccgggattgcagaaggcctcaatcttcctgaagactcgggttgtgcctgacaactggaaaatggacattagcgaaatcctcgagagcagctcatctgacgacgaggacggcccagccgaagaaaacgatgaagaaaaagaaaaagaggccaagaagacagaagaggaagtacccgaggaggagctggaccctgaggagagagacaactttctgcagcaactgtataaatttatggaagatcggggtactcctatcaataaacccccggttcttggctataaggaccttaacttgttcaagctattccgactcgtctatcaccaggggggttgcgataacatcgactctggcgcggtttggaagcagatatacatggacctcggaatccctattttaaattcagcagcctcctataacgtgaagactgcataccgcaaatatctctatggatttgaggaatattgtcggtcagctaacatacagttcaggactgtgcaccaccacgaacctaaggtgaaggaagaaaagaaggatctcgaagagtctatggaggaagctcttaaactagaccaggaaatgccactgaccgaagtgaaatctgaacctgaagagaacattgactctaattcggagagtgaacgagaggaaatcgagctcaaatcgcccaggggaagacggagaatagcccgtgacgttaactctattaaaaaagaaatcgaggaggagaagaccgaggacaaacttaaggataacgatactgaaaataaagacgtcgatgacgactacgaaacagcagagaaaaaggagaacgaattgctgctgggacggaagaataccccaaaacagaaggaaaaaaaaatcaagaagcaggaagattctgataaggactcagatgaagaggaagaaaaaagccaggagagagaggagaccgagagtaagtgcgactcggaaggtgaggaggatgaggaggacatggagccctgcctcaccgggacgaaggtgaaagtaaagtatggcaggggaaagacccagaagatctatgaggcctcaatcaaaagcaccgagatcgatgatggggaggtgctctacttagtgcactactatggctggaatgtcaggtacgatgagtgggtgaaggcggacaggatcatctggccacttgacaagggaggccccaaaaagaagcagaagaagaaggcaaaaaacaaagaggacagcgaaaaagatgagaagcgtgatgaggagcgtcagaaatctaaaaggggcagaccccctctgaaatcaaccctatcaagtaatatgccctacggtttgtctaaaacagcgaattccgagggcaaaagtgatagttgttccagtgacagtgaaacagaggatgcactggaaaagaacctcatcaatgaggagctgtccctaaaagacgagctcgagaaaaatgagaatctgaatgacgataagctagacgaagaaaaccctaaaatttcggcccacattttgaaagaaaacgaccgcacccagatgcagcccttggagaccctaaagctggaagtgggagagaatgaacagatagtgcagatatttggtaacaaaatggagaagaccgaggaggttaaaaaggaggccgagaaatccccgaaagggaaggggcgccggtccaaaaccaaagatctgtctctcgaaatcataaagatcagctctttcggccagaatgaggccgggtcagaaccacacatcgaggcccacagcctcgagctgtcctcactggacaataaaaatttcagttccgcaacagaagatgagattgaccagtgtgtgaaagagaagaagctgaagcgaaagatccttggccagagttcaccggaaaaaaagattcggatcgagaacgggatggagatgacaaacactgtgagtcaggaacgaacaagcgactgtatagggtcagaaggcatgaagaacctgaattttgaacagcactttgaaagggagaatgagggcatgccatctctcatcgctgaaagtaaccaatgtatccagcagctgacgtcagaacgcttcgactcccctgccgaggaaacagtgaacattcctttgaaggaggacgaagacgccatgcctctgattggacccgaaacactggtatgtcacgaggttgacttggatgatcttgatgagaaagacaaaacctctattgaggacgtagctgttgaaagtagcgaatccaactccctcgtgagcatcccacctgccttgcctcccgtggtacagcacaacttctctgtggcatctcccttaacactgagtcaagatgagagcagatctgttaagtcagaaagcgacataactatcgaagtggatagtattgcagaggaatcccaggaaggtttgtgtgaacgggaaagtgcaaacgggtttgaaaccaatgtagcctctgggacctgtagtatcatcgtccaggaacgtgaatctcgcgaaaaaggacagaagcgcccttctgacggcaacagcggacttatggctaagaaacaaaaaaggaccccaaaacgtactagcgccgccgccaagaacgagaagaacgggaccgacgagctcgacaatatgaacagcaccgaacgaattagctttctacaggagaagctacaagagatccgaaagtactacatgagcttgaaatccgaagtggcaaccatcgataggaggcgcaagaggttgaagaagaaagacagggaggttagtcatgcaggggcaagcatgtcgtccgcgtcaagtgatactggaatgagccctagcagttcctcccctccccagaacgttctcgcagtggagtgccgatag

SEQ ID NO: 179618 - DNA, 3939 bp, synthetic construct
  misc_feature 1..3939: note = Description of Artificial Sequence: Synthetic coding sequence
  source 1..3939: mol_type = other DNA
atgaaggccctggacgagcccccctacctgaccgtgggcaccgacgtctcagccaagtacagaggtgccttctgcgaggccaagattaaaaccgccaagcgcctggtaaaggttaaagtcactttccgacatgattccagtacagtagaggttcaagacgatcatataaagggacctcttaaggttggtgccatcgtcgaagtcaagaatttggacggggcctaccaggaggcagttatcaacaagctcacagacgcgagctggtatactgtggtatttgatgacggcgacgagaagacactgcgtcgctcctctctatgccttaaaggggagcgacattttgccgagtccgaaaccctggatcagttacctctgactaatcctgagcactttggaacacccgttattgggaagaaaacgaacagaggtaggaggtcaaaccatatccctgaggaagaaagttcttctagtagctctgatgaagacgaggacgacaggaaacagattgacgagctccttggtaaagtcgtctgtgtcgactacatttccctggacaaaaaaaaggccctttggtttccagctttggtcgtttgtccagattgtagtgatgagatagccgtgaagaaagacaacatccttgttcgttctttcaaagacgggaagtttacgagtgtcccgcgtaaagatgtacacgagataacctctgatacagccccaaaaccagatgcagtccttaaacaggcgttcgagcaggcattggaattccataagtctagaacgatcccagcaaattggaagaccgaactgaaggaagactccagcagtagcgaggctgaagaagaggaagaggaggaagacgatgagaaggagaaagaagacaacagcagtgaggaagaggaagagatcgagcctttccctgaagagcgagagaattttctccaacaactctacaagtttatggaggacagagggacaccaattaataaacggccagtgctggggtacaggaacttaaatctttttaagctctttcgactagtacacaagctggggggattcgacaacatcgagtctggggccgtgtggaagcaggtctatcaagacctgggaatcccagtgttaaacagcgctgcaggctataatgttaagtgcgcctacaaaaaatatctctatggatttgaggaatactgccgcagcgcaaatatcgagttccagatggctctgcctgaaaaagtggtcaataagcagtgcaaggagtgtgagaatgtcaaggaaattaaggtcaaagaggaaaacgagactgagattaaggaaataaaaatggaagaagagagaaacatcatcccccgggaagagaaacccattgaggatgaaattgagcggaaggagaatatcaaaccatccttaggaagtaagaagaacttgctggagtctattccaacgcatagcgaccaagagaaagaggtgaatatcaaaaagcctgaggacaacgaaaaccttgatgataaggatgatgacacgacccgggtggacgagagtctgaacatcaaggtggaggcagaggaggagaaggccaagtctggggatgagactaacaaggaagaggatgaagacgacgaagaagctgaagaagaagaggaggaagaggaagaagaagaggacgaagacgatgatgacaacaacgaagaggaggaattcgagtgctatcccccaggcatgaaagttcaagtaaggtatggcagagggaaaaaccaaaaaatgtatgaggctagtataaaggactccgacgttgagggaggagaggtactgtacctagtccactactgcggctggaacgttcgttacgacgaatggatcaaggcggataagatcgtgcggcctgcggacaagaacgtacctaagatcaaacacagaaagaagataaagaacaagttagataaagaaaaagacaaggacgaaaagtacagtcccaaaaactgcaagctcaggagactgtccaagccccccttccagacgaatccttcaccggaaatggtcagcaagctggacttaactgacgctaagaactcagacacagcccatatcaagtcaattgaaattaccagcatacttaacggactgcaggctagcgagtcatccgctgaggactccgaacaggaggacgagcggggagcccaggatatggacaacaatggaaaggaggagtctaaaatcgatcacctgacaaacaaccgaaatgatttgataagcaaggaggagcaaaacagcagcagccttctggaagagaacaaggtgcacgctgacctggtgatttccaagcctgtgagtaagtctcctgagcggcttcgtaaggacatcgaagttttgtctgaggataccgactacgaagaagatgaggttaccaaaaagaggaaggacgtgaagaaggacaccaccgacaagagttccaaaccccagataaaacggggcaagaggcgctactgtaacactgaggagtgcctgaagactggatcacccggcaagaaagaagaaaaagccaagaacaaggaaagtctctgcatggagaatagttccaactccagctctgatgaagacgaggaggagacaaaagccaagatgactcctaccaagaagtacaatggacttgaggagaagcgcaaatccctgcggactactggattttactccgggttctcagaggtagccgagaagaggatcaaactactgaataactctgatgagcggctgcagaactccagggccaaggaccgcaaggacgtgtggagttctatccaaggccaatggcccaagaaaactttaaaggaactgttttctgactcagataccgaagccgcagcctccccaccacacccggcacctgaggaaggtgtggctgaggagtcacttcagaccgtagcagaggaggaaagctgcagcccatctgtggagcttgagaaacctccccctgtgaatgtagactccaagccaatcgaggagaagacagtcgaggttaatgacaggaaggcagaatttccttccagtgggtccaacagcgtgttaaatacccctcccactacacctgagtccccctcctccgtaaccgtaactgagggctctcggcagcagtcatctgtgacagtgtctgagcccctagctccgaatcaggaggaggtcagatctataaaaagtgaaaccgacagcactattgaggttgattccgtggctggcgagctccaggatctccagtcagaaggaaatagctcccccgccggctttgacgcatctgtcagtagctcttcctccaaccagccagaacctgagcatcccgaaaaggcctgcactggccagaagcgagtcaaggatgcccaaggcggcggatcaagttctaaaaagcaaaagaggtctcacaaagcgacagtcgtgaataacaagaaaaagggaaaaggaaccaactcgtcagatagcgaggagctgtcggcaggggagtcgataactaagagccagcctgtgaagtcagtgagtacaggaatgaaatcccacagtaccaagagcccagccaggactcaaagcccaggaaagtgcggtaaaaatggagataaggacccggatctgaaggagcccagcaataggctgcctaaggtctataaatggtcttttcagatgtccgatttggaaaacatgactagcgctgaaagaattactatcctccaggagaagcttcaagaaattcggaaacactacttgagcttgaaaagtgaggtcgcaagtatagatcggcgcagaaaacgtctgaagaagaaggagcgggaatcagccgccactagcagctcttcatcgtctccctccagctcctccattactgctgccgtcatgctgacgctggccgagccatccatgtcatcagccagccaaaatggcatgagtgtggagtgtcggtag

SEQ ID NO: 179619 - DNA, 3681 bp, synthetic construct
  misc_feature 1..3681: note = Description of Artificial Sequence: Synthetic coding sequence
  source 1..3681: mol_type = other DNA
atgaaggccctggacgagcccccctacctgaccgtgggcaccgacgtgtcggcaaagtatcggggtgccttctgcgaagcaaagatcaagactgcgaaaaggctcgtcaaggttaaagttactttcagacatgacagtagtactgtagaggtgcaggacgaccatataaagggcccccttaaagtcggcgccatcgtggaggtcaagaaccttgacggcgcataccaggaagcagtaataaacaaactgactgatgcttcgtggtatacggtcgtgttcgatgacggagatgaaaagacactgcggcgctctagtctctgcctgaagggtgagcgtcacttcgccgagagcgagaccctggaccagctgccgctcacaaacccagagcattttgggacaccggtaatcggcaaaaaaaccaatcgtgggaggaggagcaatcatattcctgaggaggagtcttcctcttctagctccgatgaagatgaggacgatcgtaagcagattgatgagctgcttggcaaggtcgtctgtgtggactatatttctctagataaaaagaaagctctgtggttccctgctttggtcgtttgtcctgattgctcagatgaaattgccgtaaagaaggataatatcctcgtgcgttcgtttaaggacggaaaatttaccagcgttccgagaaaagacgttcatgagatcaccagcgacaccgcaccaaagccagatgccgtattaaagcaggccttcgagcaagcccttgagttccacaaaagccggaccatacctgctaactggaagaccgaattaaaagaggactctagctcctctgaggcagaggaggaggaggaggaggaagatgacgagaaggaaaaggaagacaactcttctgaagaggaagaagagattgagccttttcctgaggaacgcgagaatttcctgcagcagttgtacaagtttatggaggatagggggacacccatcaacaagagaccagtactcggctatcgaaacctgaatctgtttaagctgtttcgtctggtgcacaagctggggggcttcgacaatatcgaatccggcgcggtctggaaacaggtataccaggatctcggcataccagttctgaattctgccgccggctacaacgtgaagtgcgcttataaaaagtacttgtacggctttgaggaatattgccggtcggcaaacatcgagttccagatggccctgcctgaaaaagtggtgaacaaacagtgtaaggaatgtgaaaatgtcaaagaaatcaaggttaaggaggagaacgaaactgaaattaaggagatcaagatggaggaggaaagaaatatcattccacgagaagagaagccgatcgaagatgaaatcgagcgcaaggagaatatcaaacctagtctcggatcaaaaaagaatcttcttgagtctattcccactcattctgatcaagaaaaagaggtcaacattaaaaagcctgaggacaatgagaatctggacgataaggatgatgacaccacacgggtggatgagtctttaaacattaaggtggaggcggaggaagaaaaagccaaatctggttatgatgagtggattaaggccgataagatagtgaggccagccgataagaatgtgccgaaaattaagcaccggaaaaagattaaaaataagctggacaaagagaaggataaagacgaaaagtactccccaaaaaattgtaagctgcgtaggctttctaaacccccctttcaaaccaatccttcgccagaaatggtcagcaagctcgacctcaccgacgcaaaaaactccgacaccgcacacataaagtcaatcgaaatcacttccattctgaatggcctccaggcctccgagagttcagccgaggattcagaacaggaggatgaaaggggggcccaagatatggataacaatggcaaggaggaaagcaaaatcgaccaccttaccaacaaccgtaacgatctcatatctaaggaagagcagaactcaagttcgctgctagaagagaacaaggtgcacgctgatcttgtcataagcaaacctgtctccaaatctcccgagcgtcttcggaaggacattgaagtcctgtccgaggacacagattacgaggaagacgaagtcacaaaaaaacggaaagatgtgaaaaaggataccacggacaagagcagtaagccccagataaagagagggaaaagaaggtactgtaataccgaggagtgcctcaagactggctctcccggcaagaaagaagagaaggccaaaaacaaggagtccctatgcatggagaattcatccaacagcagttctgacgaagacgaggaggagacaaaagccaaaatgacacctaccaaaaagtacaatggcctggaagagaagcgtaagtccctgcgcacgactggcttttatagcggattcagcgaagtcgctgaaaaaaggattaaactcctgaacaactccgatgaacgcttacaaaacagcagggcaaaggacaggaaggatgtgtggtcctcaatccaaggacagtggccaaaaaaaaccctaaaggagttgttttcagatagcgataccgaagccgcagcctcacccccccaccctgcgccagaagagggagtggcggaagagtccttgcagaccgttgctgaagaagaatcttgctccccttctgtggagctcgagaaacctccacccgtgaatgtggatagtaagcccatcgaggagaaaacagtcgaggtgaacgatagaaaggcagaatttcccagctctggctcaaattccgtgctgaacacacctcctacaacccctgaatccccaagctcagtaaccgtgacagagggaagccgacaacaatcttctgtcaccgtgagcgagcctttagcaccaaaccaggaggaagtgagatccatcaaaagcgaaacagactccacaattgaggtcgatagcgttgcgggggagttacaggacttacagtccgaagggaattccagccccgccggatttgacgcctccgtgtcatcttcctctagcaaccagcccgagccagagcacccagagaaggcctgcaccggacaaaagagagttaaagacgcacaaggcggcggatcctctagtaagaaacagaaacggtctcacaaggccactgtcgttaataataaaaaaaagggcaagggcactaacagtagcgacagtgaagaactctcggcaggcgagtccatcaccaagagtcagccggtgaagtccgtgtcaacgggcatgaaatcccactcaaccaaaagtcctgccagaacccaatcccctggcaaatgtggtaaaaatggcgataaggacccagatctgaaggaaccgagcaaccgacttccaaaggtgtacaagtggagcttccagatgtccgatctggaaaatatgacctccgcggagcgcattacgatcctgcaggaaaaactgcaggaaatccggaaacattatctgagtcttaaatccgaagtggcgagcatcgaccgccgccgcaagagactgaagaagaaggagcgcgaatctgctgccacaagctcatcaagcagtagcccctctagctcctccattactgcagcggttatgctgacactggccgaacccagtatgtcatccgcctcccagaacgggatgtcggtggaatgccgttag

SEQ ID NO: 179620 - DNA, 3939 bp, synthetic construct
  misc_feature 1..3939: note = Description of Artificial Sequence: Synthetic coding sequence
  source 1..3939: mol_type = other DNA
atgaaggccctggacgagcccccctacctgaccgtgggcaccgacgtgtctgccaagtaccgaggcgctttctgtgaggccaagatcaagaccgctaagagactcgtgaaagtaaaggtaaccttccgtcatgattcttcgaccgtggaagttcaggacgaccatataaaaggcccactgaaggtaggggccatagttgaggtcaaaaatctggatggggcttatcaggaagctgtgattaataagcttaccgacgcatcttggtacactgtggtattcgacgacggagacgaaaagacactgagaaggtcaagtctctgcctgaagggagaacgtcacttcgccgaatccgaaaccctagaccaactcccattgaccaatccagaacactttgggactccggtcataggtaagaaaaccaaccgcgggaggcgttcaaatcatatcccagaggaggagtcctcctcttcatcatcagacgaggacgaggacgatcgtaagcagattgatgaactgttggggaaagttgtttgcgttgattatatctctttagataagaagaaggccctgtggtttcccgctctggtagtgtgccctgactgtagtgatgagatcgcagtgaaaaaggacaatatactcgttcgcagtttcaaagacggtaaattcacgagcgtccctaggaaggatgtgcacgagatcactagtgatacagcacctaagccagacgccgtgcttaaacaggctttcgaacaggccctcgaattccacaaaagcaggaccatacctgcaaactggaaaaccgagcttaaggaggatagctcttcatctgaagctgaagaggaagaggaggaggaagatgacgagaaggaaaaagaagataactcctcggaagaagaggaagagattgaaccttttcccgaggaacgcgaaaattttctgcaacagctttataaatttatggaggatcgcggtacccctatcaataagcggcctgtgcttggttatcggaacctgaatctgttcaaactgtttcgcttagtgcacaagctaggtggctttgataacatcgaaagtggcgccgtgtggaaacaggtttaccaagacctgggtatccccgttctaaacagcgctgcgggatacaacgtaaaatgtgcctacaagaaatacctctatggcttcgaggagtactgtcgcagcgctaacatcgaattccagatggcgctgcccgagaaagtggtgaacaaacagtgcaaagaatgcgagaacgtgaaggagattaaggttaaggaagaaaatgagactgagataaaggaaatcaagatggaagaggagcgcaatatcatcccacgtgaggaaaagccaatagaagatgagatagagcgtaaggagaacatcaagccatccttgggttcaaagaaaaatctgctagagtctatcccgactcactccgatcaggaaaaggaggtgaacattaaaaagccggaggataatgaaaacttggacgacaaggacgacgacacaactcgggtcgatgaatccctgaatatcaaagtggaggcagaagaggagaaggctaaatctggggatgaaacgaacaaggaagaggatgaagacgatgaagaggccgaagaagaagaagaagaggaggaggaagaagaggacgaggacgacgacgataacaacgaggaagaagagttcgaatgttacccacccggtatgaaggttcaggtacgatacggacgaggaaaaaaccaaaagatgtatgaagcctctattaaagacagtgacgtagaaggcggcgaggtgctgtacctcgtgcattattgcggatggaatgtgcgttatgacgaatggattaaagctgacaagatcgtgcgcccagcggacaagaatgtccccaaaattaagcatcgcaaaaagattaagaataagcttgacaaggaaaaggacaaagacgaaaaatacagccctaagaactgcaagttgagaaggctgagtaaaccgccctttcagacgaaccctagccccgagatggtctccaagctggatctgactgacgcaaaaaactctgatacagcgcacatcaaatcgatcgagatcaccagtatcttgaatggactccaagctagcgagtcctctgcagaagattccgagcaggaggacgaacggggtgcccaagacatggacaataacggcaaagaggagtctaagatcgaccacctgactaacaatcgcaatgatttgatttctaaggaggagcagaacagttccagcctcctggaggagaacaaggtacacgccgatctcgtgatatctaaaccagtcagtaaaagcccagagagactccgaaaagatattgaagtactctccgaagataccgactatgaggaagacgaggtgacaaagaagaggaaggacgtgaagaaggataccacagacaaatcctccaagcctcagataaagcgaggcaagcgccggtactgcaatactgaagaatgtctgaagactggcagcccaggcaaaaaggaggagaaagccaaaaacaaggagtctctgtgcatggagaactcctcaaactcatcgtcggacgaggacgaagaggaaacgaaagccaaaatgacaccaacaaaaaagtataacggccttgaagagaaacgaaagtcactccgcaccaccggattctactctgggttttctgaggtggctgaaaaaagaatcaagctgcttaataacagtgacgaacgcctgcaaaattcgagagctaaagaccgcaaggatgtctggtctagcatccagggccagtggcctaagaaaaccctgaaagagctcttttctgattccgacacagaggccgccgccagccctccacacccagccccagaagaaggcgtggcagaggaaagcctgcagacggtggctgaggaagaatcctgttcgccctcagtggaacttgaaaagccaccacctgtcaacgttgactcgaaacccattgaagagaagactgtggaggtcaacgatcgaaaagccgagttcccttcatccggtagcaatagcgtgctgaacacgccccctacaacccccgagtcacctagctctgttaccgttactgagggcagccgccagcagtcctccgttactgtgtcagaacctctggcgcccaaccaggaagaggtgcgttctatcaaaagcgaaactgactctacaatagaagttgactctgttgccggcgaattgcaggacctgcagtctgagggtaattcttctcccgctggctttgatgcatccgtttcatcctctagcagcaaccaacctgagcccgagcaccccgagaaggcttgtaccggccagaagcgcgtcaaggatgctcagggtggaggcagctctagtaagaaacagaagcgatcgcacaaagcgactgtcgtcaataacaagaagaaaggcaagggcacaaatagctccgactccgaggaactcagcgccggggaatcgatcacaaagtctcagcccgtaaaatccgtgtccaccggcatgaagagccactcaacaaagtctcccgcccgcacgcaaagccccggaaaatgcggcaagaatggggataaggacccagacctgaaggaaccatccaaccgcttgcccaaagtgtataagtggtcattccaaatgtctgatctggaaaatatgacatccgctgagagaattaccattttacaagagaagctgcaggaaatacgcaaacattatctgtccctgaagtccgaagtggcttccattgacagacggcgcaagagactgaagaagaaagagagggaaagcgccgccacttctagctcatcttcatctcccagttccagcagtatcaccgcagctgtgatgctgaccctggctgaaccgagtatgtcttctgccagccagaacgggatgtctgtggagtgccggtag

SEQ ID NO: 179621 - DNA, 3462 bp, synthetic construct
  misc_feature 1..3462: note = Description of Artificial Sequence: Synthetic coding sequence
  source 1..3462: mol_type = other DNA
atgaaggccctggacgagcccccctacctgaccgtgggcaccgacgtcagcgccaaatatcgcggggctttttgcgaggcaaagattaaaactgccaagagactcgtgaaggtgaaagtgactttccgtcacgactcaagcactgtggaggttcaggatgatcacatcaaagggcctcttaaggttggggcaatcgtcgaggtgaaaaatctggacggggcctaccaggaagcggtcatcaataagctcaccgacgccagctggtataccgtggtcttcgacgacggggatgaaaagacactgcgtcgcagcagcctttgtttaaagggcgagcgccatttcgctgagtccgagacacttgaccaacttccactaacgaatcccgagcacttcggcaccccagtgataggtaaaaagacaaatagaggacgtcgaagcaaccacatcccagaagaggagagcagttcctccagctccgacgaggacgaggatgatcgcaagcaaattgacgagctcctgggaaaggttgtgtgtgttgactacatctcattagataagaaaaaagctctgtggtttccagctttggtcgtctgtcctgactgctcagatgagatcgccgtgaaaaaagacaatatcctggtccggagttttaaggacggcaaatttacatcagtgccgagaaaggatgttcacgagatcacctccgataccgcacccaagccagacgccgtgctcaaacaggcttttgagcaggctctcgagtttcacaaatcccgtacaatacccgcgaattggaaaaccgagttgaaggaggattctagctcttcagaagctgaggaagaggaagaagaggaggacgatgaaaaagagaaggaggataactcatctgaagaagaggaggagatagaacctttccccgaagagagagaaaacttcctgcagcaactgtataaatttatggaggatagaggaacccctataaacaagcgccctgttttagggtatagaaacctgaacctttttaagctcttccgccttgtccataagctcggaggatttgacaacatcgaaagcggcgcagtctggaagcaggtttaccaggatcttgggatccccgtgctgaactccgccgcgggctataatgtgaagtgcgcatataaaaaatacctgtacggcttcgaggaatattgtaggagcgctaacatagaatttcagatggcgctgcccgaaaaggtcgtgaacaaacagtgtaaggaatgtgagaacgtgaaagagattaaagtaaaagaagaaaacgagacagagattaaagaaattaaaatggaggaggaaaggaatattataccccgagaggaaaaacccatagaagacgagattgagcggaaggagaacattaaacctagcctcgggagcaagaaaaaccttctggagtcgatacccacgcactcggatcaggagaaggaagtcaacatcaaaaaacccgaggataacgaaaatttggatgacaaagatgacgatacaaccagggtggatgaatccctgaatattaaagtcgaggccgaagaagaaaaagctaagtcaggcgacgaaaccaataaggaggaagatgaggatgatgaggaagctgaggaagaggaagaggaagaagaggaagaggaggatgaagacgatgacgataacaatgaagaggaggagttcgagtgctaccccccaggaatgaaggtccaagtccggtatgggcgcggcaagaatcaaaaaatgtatgaagcaagcattaaagactcggatgtagagggaggtgaggtgctttacctggtgcattattgtgggtggaacgtgcgatatgatgagtggataaaagctgacaagatagtgagaccagctgacaagaacgtcccaaaaatcaagcacagaaagaaaatcaaaaacaagctagataaagagaaggataaagatgagaagtacagtcccaagaactgtaaactgcgccggctcagcaagccaccctttcaaacaaatcccagtccagagatggtgtcaaagttggacttgacagatgctaaaaattccgacaccgcgcacataaagagcatcgagattacctccatcctgaatggtcttcaagcctcagaatcgtctgctgaggacagtgagcaggaagatgagagaggcgcccaggacatggacaataatggaaaagaagagagtaagatcgatcacctgacaaataacaggaacgatttgatttcaaaggaggagcaaaattcctcatccctgttggaagaaaacaaagtccatgccgatctcgtcattagtaagccagtgagcaagtctcccgagagactcagaaaggacattgaggtattatctgaagacactgactacgaggaggacgaggtgacgaaaaagaggaaggacgtaaaaaaggatactaccgacaaatcatccaaaccacaaatcaaacgcggtaaacgaagatattgtaatacagaagagtgcctcaaaaccggaagtccagggaagaaagaggagaaagctaaaaataaggagtctctgtgtatggaaaattcgtcaaattcaagttcagatgaggacgaggaggagactaaggccaagatgactcctacaaagaaatacaacggactggaggagaaacgcaagtcactgcggacaacaggattctatagtggcttcagcgaagtcgccgaaaagaggattaagttgctgaacaactccgatgaacggttacagaattcccgagcaaaagaccgcaaggatgtgtggagttccatccagggtcagtggcctaaaaagaccctgaaggagcttttctccgattccgacactgaggccgcagcctccccgccacatcccgcccctgaagaaggcgtggctgaagaatcccttcagacagtggctgaagaagagagctgctcacccagtgttgagctcgagaagcctccacctgttaatgtggattctaaacccatagaagaaaagactgtcgaagtgaatgatagaaaagccgaattcccctcgtctggtagtaattctgtgctcaatacaccgcccacaacgccagaatccccgagttcggttacggtaaccgaaggctcccgccagcagagtagcgtgactgtgtccgaacccctggcccctaaccaagaggaggtgcgtagtatcaagtccgaaacagattctacaatcgaagttgattcagttgctggagagctccaggacttacagagtgagggcaactctagtcccgccggttttgacgcatcagtcagtagctcttcttctaatcagcctgaacccgagcacccagagaaggcctgcactggccagaaacgggtcaaagacgcacagggtggaggctcttcatccaaaaagcagaaacggagtcacaaagctaccgtggttaataacaagaaaaaggggaagggcatccttccccattag

SEQ ID NO: 179622 - DNA, 1452 bp, synthetic construct
  misc_feature 1..1452: note = Description of Artificial Sequence: Synthetic coding sequence
  source 1..1452: mol_type = other DNA
atgaaggccctggacgagcccccctacctgaccgtgggcaccgacgtgtccgcaaagtatcgtggggctttctgtgaagctaagattaagacagccaagcggctggtcaaggtgaaagtgacgtttagacatgacagttccaccgtcgaggtgcaagacgatcatattaaaggtcccctcaaggtgggggcgatcgtggaagttaagaacctggacggggcctatcaggaagcggtaattaacaagctgactgatgcatcctggtacacagtggtgtttgacgacggcgacgaaaagactttgagacgcagctcactctgcctcaagggggaaagacactttgctgagtcagaaacactggaccagttgcctctgacgaaccctgagcattttggcacgcctgttattggaaaaaagacgaatcgtggacggaggtctaatcatatccccgaagaggaaagcagcagctcaagctctgatgaagacgaagatgatagaaagcagatcgatgaattgttggggaaggtggtgtgcgtggactacatcagtctggataagaagaaggcactatggttcccagccctggtggtgtgccctgattgtagcgatgagatcgctgtcaaaaaggacaacattctcgtcagaagttttaaggacgggaagttcacatctgtccccaggaaagatgtgcacgaaataactagcgatacagctccaaagcccgatgctgtattaaagcaggcattcgaacaggctcttgagttccacaagtccagaaccatccctgctaattggaaaaccgagctaaaggaggattctagcagcagcgaggccgaggaagaggaagaagaagaggatgatgaaaaggagaaggaggacaattcatcagaagaggaagaagagattgagccatttccagaggagagggagaattttctgcagcagctatacaaattcatggaggacagagggaccccaattaacaagcgaccagtcctgggctacaggaacctcaacctgttcaagctcttcagactcgttcacaaacttggcggtttcgataatatcgagtcgggagccgtctggaagcaggtctaccaggacttggggattcctgtccttaacagcgcggcaggatacaatgtgaagtgtgcctataaaaagtatttgtacgggttcgaggaatactgccggagtgcaaacatcgagttccagatggctctgcccgaaaaagtggtcaataagcagtgcaaggagtgtgagaacgttaaggaaatcaaggtgaaagaggaaaatgaaaccgaaataaaagagattaaaatggaagaggaaagaaacatcattccgcgtgaggagaaaccgattgaagacgagatagagcgcaaagagaatatcaaacccagcctggggtcaaagaagaatcttctagaatctattcccactcactcttag

SEQ ID NO: 179623 - DNA, 1968 bp, synthetic construct
  misc_feature 1..1968: note = Description of Artificial Sequence: Synthetic coding sequence
  source 1..1968: mol_type = other DNA
atgaaggccctggacgagcccccctacctgaccgtgggcaccgacgtgagcgcaaaataccgcggggcattttgtgaggcgaagatcaagactgccaagcggctcgtcaaggtgaaagtgacctttcgccacgattcctccactgtcgaagtgcaggacgatcacattaaggggccacttaaggtgggggctattgttgaggtgaagaaccttgatggcgcatatcaagaggccgtcatcaataagctaacggatgcttcttggtatactgttgtgtttgatgatggcgatgaaaaaacactgcggcggtcatctttgtgtctcaaaggggaaaggcactttgccgagtcagaaacgctggaccagctccctttgacaaatcctgagcacttcggaaccccagtgatcggtaagaaaacaaacaggggtagaagatcaaatcatatccctgaagaagagtcctctagcagcagctcagacgaagatgaggatgataggaaacagattgacgaactgctcggtaaggtagtatgcgttgactacatctcactggataagaagaaagccttgtggtttcccgctctagtggtgtgccctgactgcagtgatgagattgccgtgaagaaagacaacattcttgtgcggtcatttaaagatgggaagtttactagtgtgccaagaaaagatgtccatgagataacatctgacacggcacctaagccagatgctgtgctaaagcaggcattcgaacaagcactggagttccacaaatccaggaccatccccgcgaattggaaaaccgagctgaaagaagactctagttctagtgaggcagaggaagaggaggaagaggaagatgatgagaaagagaaagaagataactcgtccgaagaggaagaagaaatcgagcctttccccgaggaacgtgaaaacttcctacagcagttatacaaatttatggaggaccgggggactcctatcaataagcgaccggttctgggttaccgcaacttgaatcttttcaaactgtttcgactcgtccacaagttgggagggttcgataatatagaatctggcgctgtttggaagcaagtctaccaagacctcggtatccctgtgctcaatagcgccgccggttacaatgtgaaatgcgcctacaaaaagtacctgtacggattcgaggagtactgtcggtcggccaacatagagtttcaaatggcgctgcctgaaaaggttgttaataagcagtgtaaggagtgtgagaacgtgaaggagattaaagtgaaagaagaaaacgaaaccgaaatcaaagaaattaagatggaggaagagcgaaacatcatccccagagaagaaaagccgattgaagacgagatcgagcgcaaggagaacatcaaaccctcattgggtagcaagaagaatctgctggagtccattccaactcattccgatcaggagaaggaggtgaacataaagaaaccggaagacaatgagaacctcgatgataaagatgatgatacaacaagagtcgatgagtccctgaacatcaaggtggaggccgaggaggagaaagcaaagtctggtgatgaaaccaataaagaggaggatgaggatgacgaggaggccgaagaagaggaagaagaggaagaggaagaggaggacgaggacgacgatgataataatgaggaggaggaatttgagtgttacccccccggtatgaaggtccaggtgcgatatggcaggggcaagaatcaaaaaatgtatgaggcctctatcaaagattcagatgttgaaggaggggaagtgttatacctcgtacattactgcggttggaatgtgcgatacgacgagtggattaaggctgacaagattgtgcgacctgccgataaaaatgtgcccaagatcaagcatcgcaagaaaatcaagaacagcgtgtataaaaaaaagaagaaaaagaaaaacaaatag

SEQ ID NO: 179624 - DNA, 1785 bp, synthetic construct
  misc_feature 1..1785: note = Description of Artificial Sequence: Synthetic coding sequence
  source 1..1785: mol_type = other DNA
atggccgcccccgtgaagggcaaccggaagcagagcaccgagggcgatgccctggaccctcctgcctcaccgaaaccagccggcaagcagaacggaatccaaaatcctatttccctggaggactcccctgaagcaggaggcgagagggaagaggagcaggaacgggaagaagagcaggccttcctagtttctttgtacaagttcatgaaagagaggcatacccctatcgaaagagtgccccacctggggtttaagcaaattaatttatggaagatctataaggcagtcgagaaactcggagcttacgaactagtgaccggcagaaggttgtggaagaatgtatacgacgagctcgggggatccccgggcagcacttctgcagcaacctgcacccgtaggcactatgaaagactcgtgctcccttatgtgcgccacctcaagggcgaggatgataaacctttacctacatcgaagcctaggaagcaatacaaaatggctaaggagaatcggggcgatgatggtgctacagagcgcccaaagaaggcaaaggaagagaggagaatggatcagatgatgccaggaaagactaaggccgacgctgcagaccccgcccctctgcctagccaggaaccccctagaaacagcacagagcagcaggggcttgcctctggcagtagcgtctcattcgtgggtgcatctgggtgcccggaggcttataagaggctactgtcctccttttactgtaaaggaactcacggaataatgtctccactcgcaaagaaaaagttgctggcccaggtgtcaaaggtggaagccctgcagtgtcaggaggagggatgtaggcatggcgcagaacctcaagcgagtcctgcagtccatctgcctgagagccctcagtcacctaaaggactaactgagaactctcgacaccgtctcaccccccaggagggtcttcaggcccctggagggagcctgagagaagaggcccaggcgggcccctgccccgcagcgccaatctttaaaggttgcttctacacccaccctacagaggtgctgaaacccgtctcacagcatccaagggactttttttcccggctcaaggacggggtgcttcttggccctccaggtaaagaagggctctcagtgaaagagccacagctggtgtgggggggcgacgccaaccgcccctctgccttccacaaaggaggctccaggaaaggaattctctacccaaaacccaaggcttgttgggtctcgccaatggctaaggtacctgccgaatccccaaccctgccccctacctttccaagctctcccggcttgggaagtaagcggagtttggaggaggagggcgctgcacattctggaaaaaggctgagggctgtcagtccctttctgaaggaggcggacgcaaaaaagtgcggggctaaaccagccggctctggattggtaagctgcctgctgggaccagccctgggtccagttcctcctgaggcctatcgaggtactatgttgcactgtcccctcaacttcaccggcactcccggtcccctgaaaggccaggcggccctccctttctcaccgttagtgattccagcctttccagcccatttcctcgcaactgcgggcccgtcacccatggctgcaggtttgatgcatttccccccaacgtcgtttgacagcgcgctgcgtcatcgcttgtgcccagcctcaagcgcttggcacgcaccaccggtcaccacctacgccgcccctcactttttccatttaaataccaagctgtag

SEQ ID NO: 179625 - DNA, 1917 bp, synthetic construct
  misc_feature 1..1917: note = Description of Artificial Sequence: Synthetic coding sequence
  source 1..1917: mol_type = other DNA
atggccgcccccgtgaagggcaaccggaagcagagcaccgagggcgacgcattggacccccctgcatctcccaaaccagccggtaagcagaacggcatacagaacccaatctcgttagaggacagtccagaggccggcggcgaacgtgaagaggagcaggaacgggaagaggagcaggcatttctcgtgagcctgtataagttcatgaaggaacgccacacgcccatcgaacgggtgccacatctgggcttcaaacaaatcaacctgtggaagatttataaggccgttgagaaactgggcgcatatgaactggtgacgggccgccggctctggaaaaacgtttacgatgagttgggagggtcgcccgggtcaaccagtgcagccacctgcacaaggcggcactacgaacgattagtgctcccctatgtccggcatctgaagggggaggacgataaaccattacctacctcaaaaccccgcaagcagtacaaaatggcgaaggaaaataggggggacgatggtgccaccgaacgaccaaagaaggcaaaagaggaaaggaggatggatcaaatgatgcccgggaaaacaaaggcagacgccgcagatccggcacccctgccttcccaggaaccacctagaaatagtaccgaacaacagggtcttgcgtcggggtcttctgtgtcctttgtcggcgcttcagggtgcccagaggcctataagcggctccttagttcattctattgcaaggggacacacggtataatgagcccattggctaaaaaaaagctgcttgctcaggtcagcaaggtagaagccctccaatgccaggaggagggttgtagacacggcgcagaaccacaagcatctccagctgtacacttgccagaaagcccgcaaagccctaagggcctgaccgaaaactcacgccaccggttgacaccgcaagagggcttgcaagctcctggaggctccctgagagaggaggcgcaagcagggccgtgccccgctgcaccaatctttaaaggttgtttttacactcatccaactgaagtcctgaagcccgtgtcacaacatcccagggatttttttagtagacttaaagatggcgtgcttcttggaccccctgggaaagagggcctgtctgtgaaggagccccaactcgtgtggggaggagacgcaaaccgtcctagcgcttttcacaaaggtgggagtcggaagggcatcctctaccccaaacccaaggcctgttgggtaagtccgatggcaaaggtgcccgcagagtcgccaaccctaccacccacttttcctagttcccccggcctcggaagcaagcgatccctggaagaagaaggtgccgcccattccggcaaacgcctccgggccgtgagcccattcttgaaggaggccgatgccaaaaagtgtggcgcaaaaccagcaggctcaggcttggtatcctgtctgctaggaccagcactgggacccgtccccccggaagcgtataggggcaccatgctgcattgtccactaaattttactggcacgcaccaccaatcacagcccatgcagcggcccacgtcaagcacgtcgacgccgtcttgccgccctgcccatggagtcgtctacactgtggaaagtactggcgcctataacaggcaagtcctgctgcctgggggatcagaactggttcctgctactcaagataccagggccatgcctctcgccgggcagccaggcacctcggaggaagaagggtctgggaagacagggttcatatcgcgccagcagccagagcccaggagccggggaccgagctgttacaaggctcttggggaagacgggcagctgccccttccccagagtggggctcgtagtacccaagtggctcacggaaaatcaaacaaaaaaacccctgtttag

SEQ ID NO: 179626 - DNA, 1581 bp, synthetic construct
  misc_feature 1..1581: note = Description of Artificial Sequence: Synthetic coding sequence
  source 1..1581: mol_type = other DNA
atgaaggagcggcacacccccatcgagcgggtgccccacctgggcttcaaacaaattaatctctggaagatatataaggcggtggagaagctgggggcatacgagctggttacaggcagaaggctctggaagaatgtctatgatgaactggggggatcccctggcagcacctccgctgcaacgtgcacacggaggcattacgagcgcctggtgcttccctatgtgcggcatttgaaaggggaagacgacaagccactccccaccagcaaacctcgaaagcagtacaaaatggccaaggaaaatcgaggcgacgacggagccacggaaaggccaaaaaaggccaaggaggaaaggcggatggatcagatgatgccagggaaaactaaggcagacgccgcagacccggcccctctgccatctcaggagcctcccaggaattctactgaacagcagggcctggcctcagggagctccgttagcttcgtgggcgcctcaggttgccccgaggcctacaaacgcttgctgtccagcttctactgcaaaggaacccacggcattatgagtccactggccaaaaagaagctgttagctcaggttagcaaggttgaggctctccagtgccaggaggagggctgccgacacggagctgagccccaggcaagccctgccgttcacctgccagaatccccacagtctcctaaggggctcacggaaaacagcagacatcggcttacaccccaggaaggtcttcaggcccccggaggcagtctaagggaggaggcacaggcgggaccctgccctgctgccccaattttcaagggatgcttctatacgcatccgaccgaggtgcttaaacccgtgagtcaacatcccagagactttttcagtcgactaaaggatggtgtgctgctggggccacctggcaaagagggcttgagtgtgaaagagcctcaactggtgtgggggggcgatgccaatcgtccttccgcctttcacaagggagggagtagaaaggggatcctgtaccctaagccgaaagcctgttgggtgtcgccgatggcaaaggtgcctgccgaaagccctaccttgccaccaacgttcccctccagccctggattaggaagtaagaggtcactcgaggaggaaggggccgcccatagcgggaagcggctaagagcggtaagcccgttcttgaaggaagccgacgcaaagaagtgtggtgccaagccggctggctccgggctggttagttgtttgttgggtccagctttggggccagtaccacccgaggcctatcgtggtaccatgctccattgcccacttaactttacaggtacaccggggccacttaagggccaggcagcactgccgttttccccattggtgatccctgcgttcccagcccacttcctggccactgcaggaccttctccaatggcagccgggcttatgcattttccaccaacaagcttcgatagtgcactaaggcaccggctgtgccctgcaagtagcgcatggcacgcgccccctgtcaccacctatgctgcaccccatttttttcacctcaatacaaaactttag

SEQ ID NO: 179627 - DNA, 3567 bp, synthetic construct
  misc_feature 1..3567: note = Description of Artificial Sequence: Synthetic coding sequence
  source 1..3567: mol_type = other DNA
atggagcccaacagcctgcagtgggtgggcagcccctgcggcctgcatggcccgtatatcttctataaggctttccagtttcacctggagggcaagccccgtattctgtccctgggagacttctttttcgtgcgttgcacccccaaggatcccatctgcattgccgaattgcagctgctgtgggaagagcgaacttcccgccaacttctgagctcatccaagctgtactttctgccggaggatactccccagggcagaaacagcgaccatggtgaagacgaagtaatcgccgtcagcgagaaggtcatcgtcaagctcgaagaccttgttaagtgggtgcattcagacttctcaaagtggagatgcggttttcacgccggtcccgtgaaaaccgaggccctcggaaggaacggacagaaggaggcgctgttaaaataccgtcagagcacactgaattcaggcctgaactttaaagatgtcctgaaagagaaggcggatctgggagaggatgaagaagagactaatgtgatcgtgttaagttaccctcagtactgcagatacagatcgatgttaaagcgcatccaggacaaaccttcaagtattctcacagaccaatttgccctggctctcgggggaatagccgtcgtgtctcggaatcctcagattctgtattgccgggatacattcgaccaccccacactaatcgaaaatgaaagcatctgtgacgagttcgcccctaatctgaagggaaggcctcgcaagaagaagccctgtcctcagcgaagagacagcttttccggcgttaaggactccaataacaatagtgatggcaaagccgttgccaaagtcaaatgcgaggcgcgctctgcactgaccaagccaaagaacaaccataactgcaaaaaagtgtctaacgaggagaagcctaaagttgcaataggtgaagagtgcagagccgatgaacaggcctttctggtggccttgtataagtatatgaaggagcgcaaaacgcccatagaaagaatcccgtatctgggattcaagcaaataaatctctggaccatgtttcaagcggcccagaagctgggaggatacgagaccatcaccgctcgccgtcagtggaagcatatatacgatgagctgggaggaaaccccggtagcacctccgctgccacctgtactcgcaggcattacgagagactgatccttccttatgaacgtttcatcaaaggtgaagaagataagcccctgccaccaatcaaaccaaggaaacaagagaacagttcgcaggaaaacgagaataagaccaaggtttccggaactaaacggatcaaacacgagatcccgaagtccaagaaggagaaggagaatgcaccaaagccccaggatgcggccgaggtgagcagcgagcaggagaaggagcaagaaacgctgatctcacagaaatccattcccgaacccctgcccgccgctgacatgaaaaagaagatcgaaggataccaagaattctccgccaagcccctggccagccgggttgacccagagaaggacaatgaaaccgatcagggctcaaactccgagaaggttgccgaggaagctggggaaaaggggccaacaccccctctgccaagcgccccactggcgccagaaaaagacagcgcattggtgcccggcgcatcgaaacaaccactcacatccccgtccgccctcgtagacagtaagcaggagagtaagctgtgctgtttcacagagtcacccgagtcagaacctcaggaggccagcttccctagcttcccgactacgcagcctcccctggctaatcagaatgaaacagaagatgacaagctgccagcgatggcagactacattgcaaattgtacagttaaagttgaccaactgggctcagatgatattcacaatgccctgaagcagacgccaaaggtattggtggtgcagtcttttgatatgttcaaggataaggatttgactgggccaatgaacgaaaaccatggacttaactataccccattgctctactctaggggcaatcccggtatcatgtctcccctggccaagaagaagctgctgagtcaggtatccggcgcgtccctgagctcgagctatccctacggttcacccccacctctcatcagcaaaaagaaactaatcgcacgcgatgacctttgttcctccttgtcgcagactcaccacggtcagtccacagatcacatggctgtgtcgaggccttccgtcatacagcatgtccagagttttcgctcaaaaccatcagaagagagaaagacaattaatgacatcttcaagcacgagaaactatctcgctccgaccctcatcgatgctctttttctaaacaccatctgaatccactagcagatagttacgtacttaagcaggaaattcaggaagggaaggacaagctgctggagaagagggctctaccacactcgcacatgccttcctttctggccgacttctacagcagtccacaccttcatagcctgtataggcatactgaacatcatctgcataatgagcaaacaagcaagtacccctccagggacatgtatagagaaagcgagaattcatctttcccctcccaccgtcaccaggaaaagctccacgtaaactatctgacgagtctccatctacaggataagaaatccgcagccgcggaagcgcccacggatgaccagcccacagacctttcacttccaaaaaatccgcacaagcccactggcaaagtccttggcctggcgcattcgacaactggtccacaagagtctaagggaatttctcagttccaggtgttgggcagccagtcacgcgactgtcatcctaaggcctgccgggtgtcccctatgactatgtctgggccgaagaagtatccagagtccctgtctcggtccggtaagccccatcatgtccgcctcgaaaacttccgtaagatggagggcatggtccacccaatactccacagaaagatgtcaccccagaatattggagctgcccggcccattaaacgttcccttgaagacttggatctggtcattgcgggaaagaaggcacgggcagtctctccgctggacccaagcaaagaggttagcggtaaggagaaagcttccgaacaagaaagcgagggatccaaggccgctcacggcggccacagtggtggagggagtgaaggccataagctgcctctctcatccccaatatttccagggctttacagtggtagcttatgcaactctgggctcaacagtagactccctgctgggtactcccactccttacagtacttgaaaaaccagacggtactttcccctctgatgcagccgttagcttttcattctcttgtaatgcagagagggattttcactagcccaaccaactcccagcagttgtaccgccaccttgcggcggccactccagtggggagctcctacggcgatctcctgcacaactctatctaccccttggcagcaataaaccctcaggctgccttcccatcctctcaattgtccagcgtgcatccgagtacgaagctctag

SEQ ID NO: 179628 - DNA, 2838 bp, synthetic construct
  misc_feature 1..2838: note = Description of Artificial Sequence: Synthetic coding sequence
  source 1..2838: mol_type = other DNA
atggcccccaacctgaagggccggccccggaagaagaagccctgcccgcagcggagagattcattcagtggtgtgaaagactccaataacaatagtgatggaaaggctgtggccaaagtgaaatgtgaggctaggagcgccctgactaagcccaagaataaccataactgcaagaaggtatctaacgaggaaaagcccaaagttgcaattggcgaggaatgcagggccgacgagcaggcttttctcgtggccctgtataagtacatgaaggaaagaaagacccccatagaaagaataccctacttgggcttcaagcaaatcaatctgtggacaatgtttcaggccgcacaaaaactcggaggatacgaaaccattacagctaggcgccagtggaaacatatttatgacgagctgggcggtaatccaggcagcacttcagccgctacctgcacccgccggcactacgagagactgattttgccctatgagcgctttattaaaggggaggaggataaacccctgccacccataaagccaagaaaacaggagaattcctctcaggaaaatgaaaacaaaaccaaagtctccggcacaaaaaggatcaagcacgagatccctaaaagcaaaaaagaaaaggaaaacgccccaaagcctcaggatgccgccgaagtttccagcgagcaagaaaaggagcaagagacgctcattagccagaagagcatcccagagcctttgcccgctgcggacatgaaaaagaagatcgagggctaccaggagttctctgccaagccgctggctagtcgcgtggacccagagaaggataacgaaaccgaccagggaagcaattcagaaaaggtcgccgaagaggccggcgagaaggggcccacaccacctctcccctcagccccactggctccggagaaagatagtgcactcgtgcccggagctagtaagcagcccctgacgtctccgagcgcattggtagattcaaagcaggaatccaaactgtgctgtttcacagaatctcccgaaagcgaacctcaggaggcgtcctttcccagcttcccaacgactcagcctccgctggccaatcagaatgaaactgaagacgacaaactgcctgcgatggcagattatatcgctaattgtactgttaaagttgatcagctgggatcagacgatatacataatgctctcaagcaaacacccaaggtcctggttgttcagtcctttgatatgttcaaggacaaggatttgaccggccccatgaacgagaatcacggcctaaattacactcctctgctctattcacgcggaaatccgggcatcatgtcccctcttgccaaaaaaaaactgctgagccaagtaagcggagccagcctcagtagtagttacccatacggaagcccacctcctctcataagcaagaagaaattgatcgcgcgggacgatttgtgctccagtctcagccagactcaccacggacagagcaccgatcacatggccgttagcaggccgtctgtgattcagcacgtgcagtctttcaggagcaaaccgtctgaagagaggaagactataaatgatatctttaagcacgagaaactctcaagaagcgatccccacaggtgttccttttctaaacaccacctcaatcctcttgccgactcgtatgtccttaagcaagagatacaggaaggaaaagacaagcttctagagaagcgcgctctccctcactcacatatgcctagcttcttagccgacttttatagctcaccccacctgcatagcctataccgacacaccgaacatcaccttcataatgagcagaccagcaagtatccttctagggatatgtatcgggagagcgagaactcttctttcccctcccatcggcaccaagagaagttacatgtgaactacctgacatccctgcacctccaggacaagaagtccgctgccgcggaagctcctacagatgaccagccaacagatctctcactccctaagaacccccacaagccaactggtaaagtgctcggtctcgctcacagtaccactggcccccaggagtccaagggaattagtcaattccaggtactgggaagccagtcccgtgactgccatcctaaggcttgtcgagttagcccaatgaccatgtccggtcctaaaaagtatccagagtctctttcgaggtcagggaaacctcaccatgttcgattggagaattttagaaaaatggagggcatggtgcatcccattttacaccgaaaaatgtcaccacaaaatatcggggctgcccgccccataaagcgcagtctggaggacctggacttagttatcgcagggaaaaaagcccgtgccgtcagcccattggacccaagcaaggaagtgtctggcaaagagaaggcgagtgaacaggaatctgagggttccaaggccgcacacggcgggcatagcggcggaggctccgaaggacacaagctgcccttatcaagcccaattttccccggactgtattccgggtccctgtgcaacagcggcttgaacagccgccttccagccggttacagccactccctccagtatttgaaaaaccagaccgtgttgagccccttaatgcagcccctcgcgttccactcgctggtgatgcagaggggcatctttacatcgccgactaatagtcagcagctctaccgccatctcgcggccgccacccctgttgggtcttcttatggcgacttgcttcacaattccatctaccctttggccgctattaaccctcaggctgcattcccatcttctcagctttcatccgtgcatcctagcacgaagctttag

SEQ ID NO: 179629 - DNA, 1134 bp, synthetic construct
  misc_feature 1..1134: note = Description of Artificial Sequence: Synthetic coding sequence
  source 1..1134: mol_type = other DNA
atgggcaccaccgaggccaccctgcggatggagaacgtggacgtgaaggaagagtggcaagatgaagatctcccgagaccactgcccgaggagacgggggttgagctgctaggctcccccgtagaggacacaagctcacctcctaatactttgaacttcaatggtgcacatcgtaaaaggaaaactctcgtcgccccagaaatcaatatctcgctggatcaatccgagggatccctgctatctgatgactttcttgatacacccgacgaccttgacataaacgtcgacgatatcgaaactcctgatgaaactgattctttagaattcttaggcaatggcaatgaactcgagtgggaagatgatactcccgtggcgactgccaagaacatgcccggagatagcgccgatctctttggcgatgggactactgaagatggctccgccgcaaacgggaggctgtggaggacagttatcattggcgaacaggagcacaggatcgacttacacatgatccgaccctatatgaaggtggtcacccatggaggatattatggagaaggccttaatgcgatcatagtattcgctgcatgttttctgccagattcttctctccctgactaccattacattatggaaaatctttttctgtacgtcatttcatctctggagctattggttgcagaggactacatgatagtctacctgaatggggccaccccccggaggcggatgcccgggattgggtggctcaagaagtgctatcagatgatcgataggcgattacgaaagaacctgaagagcctcattatagtccaccccagttggtttatcagaaccgttctcgccatctccaggcccttcatttctgtaaaatttatcaacaaaatccagtatgtccacagtttagaggacctggagcagttaattcctatggagcatgtgcagattcctgattgcgtactgcagtatgaggaagagagacttaaagcaagacgcgaatccgcgcgacctcaacccgagtttgttctcccaaggtccgaggagaagcctgaggtggcccccgtcgagaaccggagtgccctggtctccgaggatcaagagacgagcctgcaacctctgcatagatcttcatag

SEQ ID NO: 179630 - DNA, 1116 bp, synthetic construct
  misc_feature 1..1116: note = Description of Artificial Sequence: Synthetic coding sequence
  source 1..1116: mol_type = other DNA
atgggcaccaccgaggccaccctgcggatggagaacgtggacgtgaaagaggaatggcaggatgaggacctcccacgccctttgcccgaagagaccggcgtcgagctattgggctcacctgtggaagacacttctagtccacctaacacgttaaacttcaatggggcccaccgaaagcggaagacactcgtcgctccagagatcaacatttcattggatcaatccgaggggtctctgttgtctgacgatttcctggatacacccgacgacctcgacatcaacgtggatgacattgaaactccagatgagaccgacagcctcgagttcttggggaatgggaatgaacttgagtgggaggatgacaccccggtggccacagccaagaacatgcccggcgatagcgccgatctgtttggagacgggactacagaagacggcagtgccgctaacggtcgattgtggagaacagtcatcatcggggaacaggagcatcggatagatttgcatatgatcaggccatacatgaaggttgtgacgcacggaggctattacggagaaggtcttaacgcgattattgtgtttgctgcgtgctttctgccagattctagcctgccggattaccactacattatggagaatctgttcctgtacgttatcagtagtctcgagcttctggtagccgaagactacatgatcgtgtacctcaatggggccacgccccggagaaggatgcctggtatcgggtggctgaagaaatgctaccagatgattgatagaaggttaagaaaaaatctgaagtcccttatcattgtgcacccgtcttggtttattaggacagttttggccatcagccgcccctttattagtgttaagttcatcaataaaatccagtatgtgcactcacttgaagacttagagcagctgattccaatggagcatgtgcagatccccgactgtgtgctgcagtacgaagaggaacggctgaaggctcgtcgggaaagtgcgaggccccagcctgaatttgttctcccacgatctgaggagaagcctgaagtagcacccgttgaaaacaggtctgctctcgtgagcgaagatcaggagaccaggatgtcttag

SEQ ID NO: 179631 - DNA, 1134 bp, synthetic construct
  misc_feature 1..1134: note = Description of Artificial Sequence: Synthetic coding sequence
  source 1..1134: mol_type = other DNA
atggccggccggcggagcagccagcccggcatcgccctgcacaaccctgggaatcaccaggtgcagaaccctcagggtaggctggagacagtgcggcccttgccagaagagaccggagtggagctgctaggcagccctgttgaagatacctcctctccaccaaatactttgaactttaacggcgctcaccgcaagagaaaaactctggtagcacctgagattaacatttcgctcgaccaatctgagggctctctcctgtctgatgacttcctggacacacccgatgatctggacatcaacgtggacgatatcgagactccagatgagacggacagcctggaatttctcgggaatggaaatgaactcgagtgggaagatgatactcccgtggctactgctaagaatatgcctggcgacagcgctgacctgttcggcgatggcacgacagaggacggaagcgccgctaacggtcgcctgtggaggactgttattatcggggagcaagagcacaggatagaccttcatatgattagaccatacatgaaagtggttacacatggaggatattacggggagggcctgaatgctataatcgtgttcgctgcatgtttccttccggactcatcgctcccagactaccattacatcatggagaatttgttcctctacgttatctcaagtctcgaactgctggtggccgaagattatatgatcgtttatctcaacggagcgaccccccggagaaggatgcccggcatcggctggcttaagaagtgttaccaaatgattgatcgccggctgcgaaaaaatctgaagagcctcataatcgtccaccccagttggtttatcaggactgtcctggctatcagtcgcccttttatctccgtcaagttcataaacaagatccaatacgtacactccttggaagacttagagcagctgatacccatggaacacgttcagatcccagattgcgtgttacagtacgaggaagagcgacttaaggcccgcagggaatcagctagaccacagcctgaattcgtgctcccccggagcgaagagaagccagaggtagctcccgttgaaaatcggagtgccctggtttcagaggaccaggagaccagcatgtcttag

SEQ ID NO: 179632 - DNA, 1116 bp, synthetic construct
  misc_feature 1..1116: note = Description of Artificial Sequence: Synthetic coding sequence
  source 1..1116: mol_type = other DNA
atgggcaccaccgaggccaccctgcggatggagaacgtggacgtgaaagaggagtggcaggatgaagacctcccacgacctttacccgaggaaaccggagtcgaactcctgggctcacctgtcgaggatactagctcgccacccaacaccctgaatttcaacggcgcgcataggaagcgtaagacactggtcgccccagagattaacatctctctggaccagtcagagggttcgttattgtcagacgatttcctcgatacccctgatgatttggatataaatgtggacgacattgaaactccagatgaaactgatagcctggaattcctaggcaacggaaacgagttagagtgggaggatgatactccggtcgccacggccaagaacatgcccggcgacagcgccgatctttttggagacggcactacagaagacggaagtgcggcaaacggaagactttggaggacggtcattattggagaacaggagcataggatcgatctgcatatgatccggccctacatgaaagtggtgacccatggcgggtactatggggagggtctgaacgccattattgttttcgctgcatgttttctgcccgattcttctctgcctgattaccactacatcatggagaatctctttctgtacgttatcagttcattggaactactcgtggctgaggattacatgatcgtttatcttaatggcgccactcctaggaggcggatgccaggaatcgggtggctgaagaaatgctatcaaatgatcgacagaagactgagaaaaaatcttaaaagcctgatcattgtgcatccttcatggtttatcagaacagtgctcgcaatttcccgaccatttatcagtgttaaattcatcaacaaaatccagtatgtgcacagcctggaagatttagaacagctgattccaatggagcatgtgcagattccggactgcgtgttgcaatatgaggaagagcgcctcaaggcccgccgagagagcgcaaggccacaacccgaattcgtcctgccaagatctgaagagaagcctgaggtcgcacccgtcgaaaacaggtcagctctagtgtctgaagatcaggaaacctcaatgtcctag

SEQ ID NO: 179633 - DNA, 1050 bp, synthetic construct
  misc_feature 1..1050: note = Description of Artificial Sequence: Synthetic coding sequence
  source 1..1050: mol_type = other DNA
atgggcaccaccgaggccaccctgcggatggagaacgtggacgtgaaggaggaatggcaagacgaggaccctccaccaaacaccctcaacttcaacggcgcccacaggaagaggaagaccctagttgcccccgagatcaatatttcgctggaccagagcgagggcagcctcctgtctgacgactttctcgatacaccagatgatctggacattaatgtagatgatattgaaacacccgacgagactgactcactggagttcttggggaacggaaatgagttagaatgggaagacgatacgccggtggcaacagcaaaaaatatgcccggggacagtgcagacctgttcggagacgggaccacagaagacggatccgctgccaacgggcgcctgtggcggactgtgattattggtgagcaggaacaccgaatcgacctccacatgatcaggccctatatgaaagtcgtaacccacggcggctactatggtgaggggctcaatgcgattatcgtttttgctgcttgctttttgccggactctagtcttccggactaccactatataatggaaaacctcttcctgtatgtaatatcctctctggaactgctcgtcgccgaagattatatgattgtatacttgaatggcgctactccacggagaaggatgcccggaattggttggcttaagaagtgttatcagatgatcgaccggaggctcaggaaaaatctgaaatctttgattatagttcacccatcctggttcatccggactgtcctggcaataagcaggccattcatctctgtgaagtttatcaacaagattcaatacgtccatagcttggaagacctggaacaactgattcccatggagcacgtgcaaatccctgattgcgtgctgcagtacgaagaagaacgcctcaaagcgcggcgggagtccgcccgaccccagcccgagtttgttttgccccggtccgaggaaaagccagaggtggctcctgtggagaacaggagcgctctggtttcggaagaccaggagacccggatgagctag

SEQ ID NO: 179634 - DNA, 2448 bp, synthetic construct
  misc_feature 1..2448: note = Description of Artificial Sequence: Synthetic coding sequence
  source 1..2448: mol_type = other DNA
atgaagagcaaccaggagcggagcaacgagtgcctgccccccaagaaaagggagatccccgctacatcccgcagttcagaggagaaggcacctactctgccaagcgataaccaccgagtggagggaaccgcatggctccctggcaaccccgggggcagaggtcacggcggcggaagacatgggccagcagggacaagcgtcgagctaggcttacagcagggcatcggccttcataaagctctgtccaccggcctggactactctcccccctccgcaccgcgctccgtccctgttgctacaactctccccgcggcctatgctactcctcaaccaggcacaccagtgagcccagtgcagtatgcgcatctcccacatacctttcagtttatcgggagctcccaatactcaggcacctatgcctcctttatcccatcccagcttatcccacccaccgccaatcccgtcactagcgcagttgccagtgcagctggcgcgacaacacctagccagagatcacaactggaagcctacagtacccttctggcaaacatgggctctttgagccaaactcccggccacaaggcggagcaacagcagcagcaacaacaacagcagcaacagcagcatcagcatcagcaacagcagcagcagcaacagcagcaacaacagcagcagcacctgtccagggcaccaggactcataacgcccgggtctcccccacccgcccagcagaatcagtatgttcatattagcagctctccccaaaatactgggcggaccgcgtctcctcccgccattcctgtgcatctccatccacatcagacaatgattccgcataccctcactctcggcccgccctctcaggtcgtcatgcaatacgctgattctgggagtcattttgtgccaagggaggcaaccaagaaagcagagtccagtaggctgcaacaagcaatacaggccaaggaggtcctgaatggagaaatggagaaatcacgccggtatggggccccttccagtgccgacctgggcctgggcaaggccggcgggaaatctgtgcctcatccttacgagtcacgccatgtggtggtacatccatcaccctccgactactccagtagagacccatctggggtcagggcctcagttatggtcttgcccaattctaatactcctgccgccgacctggaagtgcagcaggccactcaccgcgaagccagcccatccacattgaatgacaaatcaggtctgcacctggggaagcctgggcacagatcttacgctctttctccacataccgtgattcagaccactcactcagcctctgagcctctacccgttggcctcccggctacagcattctacgcgggcacccagccccctgtgataggctaccttagtggtcagcagcaagctattacatacgccggctccctgccccaacacctggtgatccctggaacgcaacctcttctcatccccgttggatctactgacatggaggccagtggagcggctcctgcaatagtaacttctagtccccaattcgcggctgtccctcacacattcgtgacaactgctctccctaaatcagagaatttcaatcctgaagcccttgtaactcaggccgcttatccagccatggtgcaggcccagattcatttgcccgtggttcagtccgtggcctctcccgctgcggcccctcctaccctgcccccctattttatgaaaggttcaattattcagctggccaatggcgaactcaaaaaagttgaagacctaaaaacagaggactttatccaatcagcggaaattagcaatgatcttaaaatcgatagttccactgttgaaaggatcgaggattctcacagtccaggagtggccgtcatacagtttgcagtgggagagcatcgggcccaggtgtctgtagaagtcctggtggagtaccctttttttgttttcgggcagggatggagctcctgctgccctgaaagaacatcccagctgttcgatctgccctgttctaagctttccgttggagacgtgtgtatatccctcaccttaaaaaacttgaagaacggaagcgtcaaaaaaggtcagccagtcgatcctgcgtctgtgctgctgaaacactcaaaagccgacggactggctggctccaggcatagatacgcagagcaggagaatgggatcaatcagggatctgcacagatgctctcagaaaatggcgagctgaaatttcccgagaagatggggttgccagctgcccccttccttactaaaatagaacctagtaagccagcagctacccgaaagagacgatggtccgcccccgaatcccggaaactggagaagtccgaagatgagccccccctaacactcccgaaaccctcattgattccacaggaggtcaagatctgcatcgagggtagatccaacgtggggaagtag

SEQ ID NO: 179635 - DNA, 2448 bp, synthetic construct
  misc_feature 1..2448: note = Description of Artificial Sequence: Synthetic coding sequence
  source 1..2448: mol_type = other DNA
atgaagagcaaccaggagcggagcaacgagtgcctgccccccaagaaacgggagatccccgccacctctcggtctagcgaggaaaaagcaccaacactaccctctgacaatcatcgggtcgaagggacagcatggttacctggtaaccccgggggcaggggacatgggggaggaagacacgggcctgcgggtaccagtgtcgagttgggtctccagcaaggtatcgggctacataaagcgctaagcactggactggattactctcctcctagtgctcctcgcagcgttcccgtggctactacactgccagccgcttatgcaactcctcagcctgggactccagtttcaccggtgcaatacgcccacctaccgcatacattccagttcattggatctagccaatactctggaacttacgcgtcatttattccttcccagctgatcccgcccacggccaacccggtcacttctgcagtagccagtgccgccggagccacaacaccctcacagagaagccaactggaggcctattcgaccttgctggccaatatgggctctctgtcacagacgcccggacataaagcagaacagcagcaacagcagcagcagcagcaacagcagcagcatcagcaccaacagcaacaacagcagcagcagcaacagcagcagcaacagcatctctcccgcgcccccggcctaattactccaggaagccccccgcctgcccagcagaatcagtacgtacacatctcttctagcccccagaacaccggccggacagcgtccccacccgccattcctgtgcaccttcatccccatcagactatgataccacataccctaactctcggacccccgtcacaggtagtgatgcaatacgccgacagtggttcccactttgttcccagagaggcaacaaagaaagccgagtccagtaggctccaacaggcgattcaggccaaggaggtgttaaacggcgagatggaaaagtctcgacggtatggcgctcctagttctgcggacctgggtctcggtaaggcaggaggtaagagtgttccacacccttacgaatctcgccatgtcgtggtgcacccctcaccatccgattacagctcccgcgacccgagtggtgtgagagcaagcgtcatggtcctgcccaatagcaacacacccgcggctgatctggaagtacagcaggccacccaccgggaagcgagcccaagcaccctcaatgacaaatcaggcctgcacctcggaaaaccagggcataggagctacgccttgtcaccacacacagtaatacagacaacccatagtgcttcagaaccactgcctgtgggcctgccagcgacagcattctacgctggaacccagcctccggtgataggatacttaagcggccagcagcaggctattacctatgcaggcagtcttcctcagcatctggtgatccccggaacccaaccgcttttaatccctgtaggttctaccgatatggaagctagcggcgccgcccctgctattgtgacttcctcaccacaattcgccgcggtacctcacacttttgtcactaccgctctcccgaagtcagagaatttcaatcctgaagccctcgtgactcaggccgcataccccgccatggtgcaagcgcagattcacctaccagtggtacagagcgtggcatctccagcagcggcccccccaactctgcccccgtattttatgaagggatcaattatccaattagcgaatggcgagttaaagaaggtcgaagatctgaagacggaggattttatccagagcgcagagatatcaaacgacttgaagatagactcttccacagtcgagcgaattgaggactctcattcccccggagtggcagtgattcaattcgccgtgggcgagcacagggcgcaggtctccgtggaagtgttggttgagtacccgttcttcgttttcgggcaaggctggagcagttgctgtcccgagagaacttctcagttgtttgatctgccgtgcagtaaactttccgtgggagacgtctgcatcagcctgacactcaagaacctaaaaaatggatcggtgaaaaagggtcagcccgtagatccagcaagcgtgctgttgaaacacagtaaagccgatggtctggcaggcagccggcacaggtacgccgagcaggagaatggcatcaaccagggctccgctcagatgctttccgaaaacggggagctgaaatttcctgaaaaaatgggcttgcctgccgccccctttctcaccaagatcgagccatcgaagcctgccgccactcggaagcggcggtggtccgctcctgagtcgcgtaaactcgagaaatccgaagatgaaccccctctgacccttccaaagccttcactgattccccaggaggtaaagatatgtatagaagggagatctaatgtgggcaagtag

SEQ ID NO: 179636 - DNA, 2448 bp, synthetic construct
  misc_feature 1..2448: note = Description of Artificial Sequence: Synthetic coding sequence
  source 1..2448: mol_type = other DNA
atgaagagcaaccaggagcggagcaacgagtgcctgccccccaagaaaagagagatacctgccacctctcggtctagcgaagaaaaagcacctaccttaccatccgacaaccatagggtggagggcacagcttggctgccgggtaacccagggggtcgcggtcacggtggcgggagacacggcccagctgggaccagcgtcgagcttgggctgcagcagggtattggtctacacaaggccctgtccacaggcctggattattccccaccttcagccccaaggtcggtgcctgtggcaacaaccctaccggccgcctacgccaccccccagccagggacccccgtatctccagtgcagtatgctcatctgccacataccttccaatttatcggaagtagccaatactcagggacgtatgcctcgttcattccttcccagctgatcccccccaccgcgaaccccgtaactagcgctgtggcctcagcagccggcgcgacaactccctcgcagcgctcccagctggaggcatatagcacactcctcgccaacatggggtcgctgagtcagacccccggccacaaggcggagcagcagcaacagcagcagcagcagcagcagcagcagcatcagcaccagcaacagcaacagcagcagcaacagcagcagcagcagcagcatctgagtagagcgccagggctgatcacacctggcagcccaccgccggcacagcagaaccagtacgtgcacatctcttccagtccgcagaacactgggcgcacagcctctcctccagcgatacctgtgcacctccatccccaccagactatgattccacacacactcacattgggcccaccttcacaggtagtcatgcaatatgccgactccgggtcccatttcgtgcctagggaggccactaagaaggcagaaagttcacgtttacagcaagcaatccaggccaaggaagtgcttaacggcgagatggagaagtccagacgctatggcgcaccctcaagtgccgacctgggccttggcaaagcagggggcaaaagcgtaccacacccttacgaaagcagacatgtggtggttcatccctccccctcagattattctagccgcgacccctccggggttcgcgcatctgtgatggtccttccaaattcaaacacccccgcagctgacttagaggtgcagcaggcgactcaccgcgaggccagccctagtaccctgaacgacaaaagcggcttacacctggggaagccagggcatcgctcatacgccctgagtccccacacagtcatccagacaacacactcagcaagtgagccgctgcccgtgggcctgcctgctaccgcattctacgctggtacccagcctcctgtgatcggatatctgtcagggcaacagcaggcaattacatacgccggttctctgccccagcatcttgtaatccccggcacacagccgcttttaatccctgtaggcagtaccgatatggaagcctctggcgcggcccctgccatcgtgacctcgtctcctcagtttgcagccgtaccacatacctttgtaactacggctctgccgaagtcggagaactttaaccccgaagccttggtgacccaagcggcctaccctgctatggtgcaggcgcaaattcacttgcccgtagtgcagtctgtggcctcacctgcagcggcccctccgacacttccaccttacttcatgaaagggtcgatcattcaattggccaacggagagctgaaaaaggtggaagatctcaaaacggaagattttatccagagcgcggagataagtaacgatctcaagatagatagcagtacagtggaaaggatagaagattctcattctccaggcgtcgcggtaattcaatttgccgtaggggagcaccgggctcaagtctctgtggaagtccttgttgaatatcccttttttgtttttggccagggctggtcaagctgctgccccgagcgtactagccagctattcgacctcccatgtagcaaactaagcgtcggcgatgtgtgtataagcttaaccctgaaaaacctgaagaatgggtcagtgaagaaaggccagcctgtggaccccgcctccgtgttacttaagcattctaaagccgatggcctggcaggcagtcgccacaggtacgctgagcaggaaaacggcatcaatcaaggcagtgcccagatgctctcagagaacggcgaattgaagtttccagaaaagatgggactgcccgccgctccgtttctgacgaagatcgaaccatcgaaacccgcggcaacgaggaaacggcgatggtctgcaccggagtcacggaagctggagaaatccgaagacgaaccccccttgacgttgccaaaaccctctcttattccacaggaggtgaaaatttgtatcgagggcagatcgaatgtcggaaagtag

SEQ ID NO: 179637 - DNA, 1428 bp, synthetic construct
  misc_feature 1..1428: note = Description of Artificial Sequence: Synthetic coding sequence
  source 1..1428: mol_type = other DNA
atggccgccccccggcccccccccgcccggctgagcggcgtgatggtgccagctccaatccaggacctcgaggcactaagagctcttacggcacttttcaaagaacagagaaacagggagaccgcaccgaggaccatcttccaaagggtcctcgatatactgaaaaagagtagccacgccgtggagcttgcgtgtagggacccatcacaggtcgagaaccttgctagcagtctgcagttaataaccgagtgctttcgatgtctccgcaacgcctgtattgaatgcagcgtgaaccagaattccatccggaatctggatactattggagtagccgtggaccttatactcctgttccgagaactcagggtggagcaggagtcactgctcaccgcctttcgctgtggcctgcagtttctcggaaacattgcttctcggaatgaggattcacagtctattgtgtgggtccatgcctttcccgaactgttcctgtcctgtctgaatcaccccgacaaaaaaatcgtggcatatagcagcatgattctcttcacctccctcaaccacgagaggatgaaggagctcgaggagaacctcaatatcgccatcgatgtcattgatgcctatcaaaaacatcctgagtctgagtggcctttcctgatcattactgacctgttcctcaaatccccagagctggtccaagctatgttcccaaagcttaacaaccaagagagggtgactcttctggatttgatgatcgccaaaatcacgagcgatgagcccctgactaaggacgatattcctgtgtttcttagacacgcggaattaatagcctctacattcgtagaccagtgtaaaacggttctgaagctcgcctccgaggaacctcctgacgacgaggaagctctggctaccattagactcttggatgtgctgtgtgagatgacagtgaatactgaactgctcggttatctgcaggtgtttccgggcctgttagaaagagtgatcgatctgctgcgcgtaatccacgttgcggggaaagagacaaccaatattttttccaattgtggttgcgttcgtgccgagggcgacatcagcaatgtggctaacggctttaaatcacatcttattcgactgatcgggaacctctgttacaagaacaaagataatcaagataaagtcaatgaattggacggcatccctctgatactggataactgcaacattagcgactccaacccatttctcacacagtgggtcatctacgctatccggaacctcactgaagacaattcccagaaccaggatctgatcgctaaaatggaagagcagggcctggctgatgcttcgctccttaaaaaagtgggttttgaggtcgagaaaaagggtgaaaaactgattctcaagagcacacgagatactcctaaaccctag

SEQ ID NO: 179638 - DNA, 1236 bp, synthetic construct
  misc_feature 1..1236: note = Description of Artificial Sequence: Synthetic coding sequence
  source 1..1236: mol_type = other DNA
atggccgccccccggcccccccccgcccggctgagcggcgtgatggtgcccgcgcccatccaggacctcgaagcgttgagagcgctgacagcactgtttaaggagcagcgcaatcggaaccttgacacaattggagtcgcagtcgatttaatcctattgttccgggagctgcgagtcgaacaggaatcattactgacagcattcagatgcggtctgcagttcttgggtaacatcgccagtcgcaacgaggatagccagtctattgtctgggttcacgctttcccggaactgttcctgtcctgcctgaaccaccctgataagaaaatcgtcgcgtatagctccatgatcctcttcacctctctgaaccacgaaagaatgaaggaactggaagagaacctgaacattgctatcgatgtcattgatgcctaccagaaacaccctgagtctgaatggcctttcttgattattacagacctctttctaaagagtcctgagttagtgcaggcaatgtttcccaaattgaataaccaggaacgggtgactctcctggacttaatgattgcaaaaatcacgtcggatgagccacttactaaggacgatattcccgtatttcttcggcatgccgaattaatcgcgagcacctttgtcgatcagtgtaagacggtactgaagctggcctctgaggaacccccagatgacgaggaagccttagcgaccatccgactgctcgatgttctttgtgagatgactgttaataccgagttgttaggttatttgcaggtgttcccagggctgttagaaagggtgattgatctactacgggtgatccacgtcgcaggtaaagagaccaccaacatcttcagcaactgcgggtgcgttcgggcggagggcgacatctctaacgtcgccaacgggtttaagtcccatttgattcgtttgattggcaatctctgctacaagaacaaagataatcaagacaaagtgaacgaactcgatgggatcccgctcatcctggacaattgcaatatcagtgatagtaacccattcctgacgcagtgggtgatatacgccatcagaaatctgacggaggataactcccagaaccaagatcttatcgctaagatggaggaacaggggctggcagatgcgtcacttctgaaaaaggtcggtttcgaagtggaaaaaaagggagaaaaactgattcttaagagtactcgagacactccgaagccctag

SEQ ID NO: 179639 - DNA, 1362 bp, synthetic construct
  misc_feature 1..1362: note = Description of Artificial Sequence: Synthetic coding sequence
  source 1..1362: mol_type = other DNA
atggccgccccccggcccccccccgcccggctgagcggcgtgatggtgcccgcgcctatccaagacctagaagctctccgggccctgacggctctgttcaaggaacaaaggaatcgcgaaactgccccccgaacaatattccagcgggtgttggatattcttaagaagtctagtcacgccgttgaactggcatgccgggacccctcccaagtcgagaacctggcgagtagtcttcagctgattactgaatgttttcgctgtcttcgcaatgcctgtatcgaatgttcagttaatcagaactctatccggaatctggatactataggggtggccgtggatctcatactgcttttcagagagttgcgtgtggagcaggaatcattgctgaccgcttttcgctgcggtttgcagttccttggcaacattgcaagtagaaacgaagactcacagagtattgtgtgggtccacgctttcccggagctgttcttatcttgcctgaatcacccggataagaaaatcgttgcgtactcaagtatgatccttttcaccagcctaaatcatgaacgcatgaaagagcttgaggaaaatctgaacatcgccatcgatgtgattgacgcatatcagaaacatccagagagtgaatggccattcctgatcatcacagatctgttcttgaaaagcccagagctagtgcaggctatgtttcctaagttaaacaatcaggagcgcgtgaccctcctggatctgatgattgcaaagatcacatctgacgaaccgctaactaaggacgatatccccgtcttcctgcgtcacgccgagcttattgctagcacctttgtggatcaatgtaagacagtcctcaaattggcgtctgaagagccgcctgtgatgtacccctatatgcgtatcgttggaaaatttcggctgcttgacgtcttatgcgagatgaccgtgaatacagaactgctcgggtatctgcaggtgttcccaggtctgctggagcgggtcatagatctgctgagagtaatacatgtggctgggaaggaaaccacaaacattttttcaaattgcggatgcgtgcgagctgaaggtgatatctctaatgtggcaaacggcttcaagagtcatctgattagactgattggcaatttgtgctacaaaaacaaagacaatcaggacaaagtgaatgagctggatggaatcccacttatcctggataactgtaacatctccgattccaacccgtgcagcgaccctgtcggagatatctgccaccctaaaccttacagacgccagcagcccaagcccaggttcgactgcaaggacggaggcaccggagctgggaggtgcattccaacctag

SEQ ID NO: 179640 - DNA, 2070 bp, synthetic construct
  misc_feature 1..2070: note = Description of Artificial Sequence: Synthetic coding sequence
  source 1..2070: mol_type = other DNA
atgaagcccgtgcacgagcggagccaggagtgcctgccccccaagaaacgagatctgcccgtgacatctgaagacatgggtcgaaccacaagttgttcgactaaccataccccaagcagtgatgcatctgagtggtcccgcggagtcgtcgtggcgggacaaagccaggcaggagcgcgagtctctctcggaggagatggcgccgaggccattactgggcttaccgtggaccagtacggtatgttgtacaaagtggccgtgcccccagccacattctcaccaaccgggctgccaagcgtggtgaacatgtcacccctgccgccaactttcaatgtggcttcatcattaatccagcatcccgggattcattatcctccgctccattacgctcagctgcctagtaccagtctccagtttatcggctctccctattcccttccttatgctgtgccacctaatttcctccccagccctttactttcacccagcgccaatctggctacctcccatctgcctcatttcgtgccatatgccagccttctcgccgagggtgccacacccccgccacaggccccctctcctgctcattcttttaataaggcacccagcgcaacaagtccttccgggcaattgccccaccactcttcgacccaacctctcgacctcgctcccggccgcatgcctatatattaccagatgtcaaggctgccagccggttacactctacacgaaactccgccagccggtgcatcccccgtccttacgcctcaggaaagccaatccgcactcgaggcggctgctgcaaacggcggtcaacgcccacgggaacgaaatctcgtgagacgcgagagcgaggctctggattccccaaattccaagggcgagggacagggcttggtcccagtcgtcgagtgtgttgtcgatggccaattgttttctgggtcacagacccctcgagtggaagtcgccgccccagctcatcgcggcaccccggataccgatctcgaggtgcagcgggtcgtgggcgccctggcgtctcaggattatcgcgtggtggcagcacagcgcaaggaggaacccagcccactcaatttgtctcaccacacacctgaccaccaaggagagggccgcggatctgccagaaatccagcagagctggcagaaaagagtcaggccagaggcttctatccacagtcccaccaggagcctgtgaagcaccggcccctccccaaagctatggtggtggccaacggtaacctagttcccaccgggactgattcaggtctactgcccgtgggcagtgaaattcttgtcgctagctcactggacgtgcaggctcgggccacattccctgacaaagaacccactcctccacctatcacctcaagtcatttaccatctcactttatgaagggagctattattcagcttgcaacaggcgagctgaaacgggtggaggaccttcagactcaagattttgtgaggagtgctgaagtgagcggcggtctgaagattgactcatccaccgtggttgatattcaggaaagtcagtggcccggatttgtcatgctccactttgtggtgggggaacagcagtcaaaagtgagtatagaggtcccgccagaacaccctttttttgtgtatggtcagggctggagctcctgttcaccaggcagaacgacacagctattttccctcccttgtcaccgattgcaagttggcgacgtgtgtatttcaattagcctccaatcgctcaattccaattcagtgtcccaggcatcttgcgccccccctagccagttggggccaccacgcgagcggccggaacgcaccgtgttgggctctagagagctttgcgactctgagggaaaaagccagccggccggagaaggaagcagagttgtggagccctcccagcccgaatcaggtgcccaggcatgctggcccgctccaagctttcagcggtacagcatgcaaggagaagaggcacgtgcggcgctgctgagaccaagtttcatcccacaggaggtcaagttatcaatcgaagggcgctcaaacgctggaaaatag

SEQ ID NO: 179641 - DNA, 3942 bp, synthetic construct
  misc_feature 1..3942: note = Description of Artificial Sequence: Synthetic coding sequence
  source 1..3942: mol_type = other DNA
atgcggagcgccgccgccgccccccggagccccgccgtggccaccgaatccaggaggtttgctgctgcccgatggcccgggtggcggtcactccagagaccggcccgtcgatcaggaagaggcggtggaggcgctgcaccgggtccttatccctccgccgccccccctccacctggaccgggccctcctccaagcagacaatccagccccccctcagctagcgattgctttggtagtaatggcaacggcggaggggctttccgaccaggcagccggcgcttgttaggccttggaggtcccccgaggccttttgtggtcctcttgctgcccctggcatccccaggagctccaccagccgcccccacccgcgcgagcccgctgggggcccgcgcatcccctcctcggagcggtgttagtcttgcccggccggccccgggctgtccgcgccctgcttgtgagcccgtgtacggcccactcaccatgtctctcaagccccagcaacagcaacaacagcagcagcagcagcagcagcagcagcagcaacagcagcagcagcagcagcaaccccctccagccgccgcgaacgtccgaaagccaggaggcagcgggttgttggcaagccccgccgctgccccatctccatcctcgtctagtgtgtcgtcctcttctgctactgctccatccagtgtggtggcagccacatctggaggaggacgcccaggcctcggccggggacggaactctaataaaggcttaccacagtcaaccattagctttgatggcatctacgccaatatgcgcatggtacacatcctgacatccgtcgtgggctctaagtgtgaagtccaggtaaagaacggtggcatctatgaaggcgtgtttaagacgtactcccccaagtgcgacctggtgctggatgcagctcacgagaaatcgaccgaatcatcgtctggtcctaagagagaagagataatggagagcatccttttcaagtgtagtgatttcgtggtggtgcagtttaaagacatggatagctcatacgccaaacgtgatgcctttaccgattccgctattagtgcaaaagtcaatggtgagcataaggaaaaagatctggaaccttgggatgcaggggagctcacagccaacgaggagctcgaagctctagaaaacgacgttagtaacgggtgggacccaaacgacatgtttcggtataatgaggagaactacggagtggtgtcgacttatgattcatccctgagctcctacaccgtcccccttgaacgggacaattccgaggaatttctaaagagagaggcccgcgccaaccagctcgccgaggagatcgaatccagcgcgcagtataaggcccgggttgctctcgagaacgacgatcgaagcgaggaggagaaatatactgccgttcaaaggaactcctctgagcgagaggggcacagcatcaatactcgcgagaacaagtacatcccacccgggcaacggaaccgggaggtgatttcatgggggtccggccgtcagaatagtccacggatgggacagcccggatctggcagcatgccttcacgtagcacctcgcacactagcgatttcaaccctaactcaggctctgatcagcgagtggtgaatggtggagttccttggccaagcccctgcccctcgccctctagcaggcccccttctaggtatcaatctggtcctaattccctaccacctcgggcggccacccccacacgccccccctcccgtcctccaagcagaccctcccgaccaccttctcacccctccgcccacggctctccagcccccgtctccacaatgcctaagcgtatgtccagcgaaggcccaccacggatgtcccctaaagcccagcgccatcctaggaaccatagagtgtcagcagggaggggctccatctcctcaggcctcgaattcgtgtcccacaatcctccatctgaggctgctacccctcccgtggcccgaacctctccatccggcggaacctggagcagcgtggtgtcaggtgtgcctcgtctctcacctaagacgcaccggccgcggtcaccgagacagaacagcataggtaatacaccttctggtcctgtgctggcctcccctcaagccgggattatccctacagaagcagtggctatgccaattcccgctgcctctcctactcccgcaagtcccgctagtaatcgtgcggtgactccatcatcagaagctaaagactctcgtctgcaggaccaaaggcagaacagtcctgccggtaacaaagagaatatcaagccaaatgaaacatcacctagtttttccaaagctgagaacaagggtatcagccctgtggtgtctgagcataggaaacagatcgatgacctcaagaaattcaagaacgacttccgcctgcagcctagttcaacaagcgagtctatggaccagctgctgaataaaaatagggagggcgaaaaatccagggacttaattaaagacaagatcgaaccatcggccaaggatagttttatcgagaattcaagtagcaattgtacaagcgggagttcaaagcccaactctccttcaatcagcccttccatcctttctaacactgagcacaagcggggtcccgaggtgacgagccagggagtccagaccagttcccccgcctgcaagcaggagaaggacgacaaggaggagaagaaggatgccgccgagcaggtgcgaaagtccacactcaaccccaacgcaaaagaatttaatcccagatctttctcacagcccaagcctagcaccacgccaacctcccctaggcctcaagcacagcccagtccaagcatggtaggccaccaacagcctactccagtgtacacacagccagtgtgcttcgcaccaaatatgatgtatccagttcccgtcagtcccggcgtacaacctctttaccctatccctatgaccccaatgccggtgaaccaggctaagacgtacagggcagtcccaaatatgccccagcagagacaggaccaacaccaccagtctgcaatgatgcaccccgcctccgcagcaggtcctcccatagccgctacacctcccgcgtactctacacaatatgtagcgtacagtccccagcaatttcctaatcaaccattggttcagcacgtcccacattaccagagtcaacacccacatgtgtatagtcccgtaatccaaggcaacgctagaatgatggctccaccaacacacgcccagcctgggctggttagctcctcagcaacacagtatggggcgcacgagcagacccacgcgatgtatgcctgccctaagctgccttacaataaggagacatcaccttctttctattttgccatctctacaggaagcctggctcagcagtatgctcatcccaatgccactttacaccctcacactccccatccacagcccagtgccacccctactgggcagcagcaaagccagcatgggggcagccatcccgcccctagccccgttcagcatcatcaacaccaggcggcccaggcgttgcacctggcgtccccccagcagcagtcagccatctatcacgctggcctggccccaactccaccttctatgacccccgcctctaacacacagtctcctcagaactcatttcctgcagcgcaacaaacagttttcacaatccacccatcccacgtccagcctgcctacaccaacccccctcacatggcccacgtacctcaggcccacgtgcagtcgggaatggtgccatcacaccctaccgcccacgcacctatgatgctcatgactactcagcccccgggcggcccgcaggcggcgctggctcagtctgcgctccaacccatcccagtttccaccaccgctcacttcccctacatgactcaccccagcgtccaggcccatcatcagcagcagctctag

SEQ ID NO: 179642 - DNA, 2988 bp, synthetic construct
  misc_feature 1..2988: note = Description of Artificial Sequence: Synthetic coding sequence
  source 1..2988: mol_type = other DNA
atgcggagcgccgccgccgccccccggagccccgccgtggccaccgaatcccgacgttttgccgccgcccgatggcctggatggagatcacttcaaaggcccgccagaagatctggcaggggaggaggaggtgccgcacccggaccatatccatctgccgcccccccaccacctggccccggcccgcctccatcacggcagtcctctcctcccagcgcctctgactgctttgggtccaacggtaacggaggtggcgcattccgacctggcagccggagacttctcgggctgggcggcccaccccggccctttgttgtgctccttctacccctagccagtccaggggctcccccagcagcacccactcgtgcgtcacccctcggcgcccgagccagcccccctagaagcggagtttctttggcacgacccgccccaggctgcccaaggccagcctgtgaacccgtgtatggtcccctcacaatgtcactcaagccgcaacaacagcagcagcagcagcagcagcagcaacagcagcaacagcaacagcaacagcagcagcagcaaccgcctcccgccgccgctaatgtgcgaaagcccggcggctctggactgctcgcctcccccgccgccgcaccaagcccatcttcgtcctcagtgagtagttcatcggctacagcccccagctccgtcgtggcagccacctcgggcggggggcgccctggcctgggacgaggccggaattctaataaaggcctccctcagtccaccataagttttgacgggatctacgccaatatgagaatggtacatatccttacttctgtagtaggctccaagtgtgaagtgcaagtgaagaatggaggcatctacgagggggtgtttaaaacctatagccctaagtgcgatctggtcctggatgctgcccacgagaagtccaccgaaagttcttccggacccaagcgagaagagataatggaaagtatcctgttcaagtgcagtgattttgtcgtggtgcagttcaaagacatggacagtagctatgctaaaagggatgcattcactgattcggctatctccgctaaagttaacggggagcataaggaaaaagaccttgagccctgggatgctggagaattgaccgctaacgaggagctggaagccctggaaaatgacgtgagtaatgggtgggaccccaatgacatgttccggtataacgaggagaattacggagtagtatctacatatgattccagcctctcatcctacactgtgccattggagagagacaacagcgaggagtttctcaagcgcgaagccagagccaaccagttggcagaggaaatcgagagctccgcccagtacaaagctcgtgtggcactggaaaacgacgatcgctccgaagaggaaaaatacacagctgtacaacgcaactcctccgagcgcgagggacattctattaacacacgcgagaataagtatataccgccaggacagcgtaaccgtgaggtaatcagttggggatccggccgtcagaattctccaaggatgggacaacccggttctggctctatgccctcgcgttccacctctcatacgtccgatttcaacccaaatagtggtagcgatcagcgagtggtcaacgggggagtgccttggccgtcaccatgcccttccccgtcatcccgtccgccatctcgctaccaatccgggcctaattctctgccacctcgagcagctacgcctacacggccaccatcacgacccccatctcggccctctcgcccaccgtctcacccttctgctcacggcagtccagccccagtgagtaccatgcctaagcgcatgagcagtgaagggccgccacgtatgtccccgaaggcccagcgccacccaagaaaccacagagtttcagcgggcaggggctccatttctagtggcttggagttcgtgtcccacaatcccccttctgaagcggcaactcccccggttgcgaggacgtccccaagcggcggcacttggagctctgtggtgtcaggagtaccgcgtcttagccctaaaactcatcggccacggagtccccgtcagaacagcattggcaacacccccagcggcccagttctggcgtcgccccaggccgggattatcccaaccgaggcggtcgctatgccaatacccgccgcgtctccaaccccagctagcccagcttcgaacagggcggtaaccccgtccagcgaggcaaaggacagtcggctgcaggatcaacgccagaatagtccagccggtaataaagagaatataaaaccaaacgaaaccagcccatcattctccaaggctgagaataaaggcatcagtccggtcgtgtcggagcaccggaagcaaattgacgatctgaagaaattcaaaaatgactttcgcctccagccttcgagtactagtgagtccatggatcagctacttaacaagaatcgggagggcgaaaaatcaagggatctgataaaggataagatcgagccctccgctaaggactccttcatcgaaaacagcagtagcaactgtaccagtgggagctctaaacctaattctccttccatatctccgtccattctctctaatacagaacataagagggggccggaggtgacctctcaaggtgtccagaccagtagtcccgcctgtaagcaggaaaaagacgacaaggaagagaagaaagacgccgcagagcaggttcggaaatcaactctgaatccgaatgccaaggaattcaatcctagaagtttctctcagccaaagccgagtaccaccccaaccagccctcgacctcaggctcaaccgagtcctagcatggtaggacaccagcagccgaccccagtctatactcagcctgtgtgcttcgcccccaacatgatgtaccccgtacctgtctcgcctggcgtgcagtaccagatttgtccgaactccggaaaaacatcaataattcgcgtgccctag

SEQ ID NO: 179643 - DNA, 3189 bp, synthetic construct
  misc_feature 1..3189: note = Description of Artificial Sequence: Synthetic coding sequence
  source 1..3189: mol_type = other DNA
atgctgaagccccagcccctgcagcagcccagccagccccagcagccaccacctacgcagcaagctgtcgctcggagaccccctggaggaacgagtcctcccaatgggggtcttccagggccactggcaactagtgcagccccacccggaccccccgctgcagcctctccctgtctggggcctgttgcagcagccggctctggcctgcggaggggtgcagaaggcatcctcgcgccccaacccccgcctccgcagcagcaccaggagagaccaggcgccgccgctattggaagcgctagagggcaaagcacaggtaaaggtccgccacagtccccagtttttgaaggagtctataacaattctcggatgttgcacttcctcacagccgttgtgggaagcacatgcgatgtgaaggttaaaaacggaacgacctacgagggaatatttaaaacccttagctctaaatttgaactcgctgttgacgccgtccataggaaagcctccgaaccagctggagggccacgtcgcgaagacattgtggataccatggtgtttaaacctagcgatgttatgctggttcactttagaaacgtcgacttcaattacgctaccaaagataaatttactgacagcgcaatcgcgatgaattcaaaggtgaatggcgaacataaagagaaagttctgcagcgatgggaaggaggggatagtaactctgatgattacgatctcgaatctgatatgagtaatggttgggaccctaatgagatgtttaagtttaatgaggagaactatggcgttaaaaccacctacgatagcagcttaagcagttacacagtcccgctggagaaggataattcggaagagttccgccaacgagagctgcgcgcagcacagctggcccgagagatagagagctctcctcagtacagactccggatcgccatggaaaatgacgatgggagaactgaggaagaaaagcactccgccgtgcagcgccagggttcaggacgtgagtccccttctctcgcctcccgagagggaaagtacattccactccctcaaagagtacgcgagggccccaggggaggagtgagatgttccagctcccggggcgggcggcctgggctcagttctctcccaccacgcggtccgcaccatctcgacaatagctctccgggtccagggtctgaagccagaggcataaatgggggaccatctaggatgtcccctaaagcccagaggcctctgcggggcgcgaagactttaagttcaccctcaaatcggcccagtggagagaccagcgtgccccctccccccgcagttggcagaatgtacccccctaggtcacctaaatcagccgcccccgctcctatcagcgccagctgcccagagccgcccatagggtccgccgtgcctacgtcctccgcaagcatcccagtcacgagcagcgtgagcgatccaggggtgggttcaattagccccgcctcacccaaaataagccttgcaccaactgatgtgaaagaattatcaaccaaagagcctggtcgtacattggagccacaggaactggctcggatcgccgggaaggtgccgggcctccaaaatgagcaaaagcgctttcagctcgaggagttaaggaagtttggagcccagtttaagctgcagccttcgagcagtccagaaaacagcttggacccctttccaccccggatcctaaaagaggaaccaaaaggcaaggagaaagaggtggacggccttctcacctcggaaccgatgggcagcccagtgtctagtaagactgagtctgtgtctgataaggaagataagcccccattggcaccatccggggggactgaaggtccagagcagcccccccccccatgtccttcacagacagggtccccgccagtcggtctgattaagggtgaggataaggacgagggacctgtcgctgagcaggttaaaaaatctaccctgaaccccaatgctaaggagttcaacccgacgaaacccctactatccgtgaacaagtccacatccacacctacaagtcctggccccaggacccactccactccgagcatccccgtcctgacagctgggcagtctgggctttattcacctcagtacataagctacatccctcagattcatatgggcccggccgtgcaggctccccagatgtatccctaccccgtgagcaactcggtgcccggacagcagggaaagtaccgcggggctaaaggctcactccccccacaacgttccgatcagcaccagcccgccagcgcgcctccaatgatgcaggccgccgcagccgccggtccacccctagttgccgccacaccgtattcttcctacattccatacaatccccagcagtttccagggcaaccggctatgatgcagccgatggctcattatccgagccagccagtgttcgcacccatgctacagtcaaaccccaggatgttgacaagtggttctcacccacaagccatcgtgtcgtcatcgactcctcagtatcccagcgccgaacaacccaccccacaagctctgtatgctactgtgcaccagagctaccctcatcatgcgacgcagctccacgcccatcagccccaacctgccaccacaccaaccgggtcccagccacagtcacaacacgctgcgcctagtccagtgcaacaccaggctgggcaggccccccacctgggctcaggccaaccccagcaaaacctataccaccctggggctctgactgggaccccaccaagtcttcctcctgggccctccgctcagagcccccagtcctccttcccccagcctgctgccgtgtacgcaatccaccaccagcagcttccacacggcttcaccaatatggcacatgtgacgcaggcccatgtccagaccggcatcactgccgcaccaccgcctcacccaggtgctccacaccccccccaagtgatgctgcttcatcctccccagagtcatgggggtccaccacagggagcggttccccagtctggggtgcccgctctgtctgctagcacccccagtccttacccctacatcggtcaccctcaaggcgagcaacctggtcaggccccaggattcccagggggcgccgacgatcgaatcccacctctcccacctcctggggagttaaagattgtccttgccgccacctag

SEQ ID NO: 179644 - DNA, 3228 bp, synthetic construct
  misc_feature 1..3228: note = Description of Artificial Sequence: Synthetic coding sequence
  source 1..3228: mol_type = other DNA
atgctgaagccccagcccctgcagcagcccagccagccccagcagccccctccaacccaacaggcagttgcccgtcggccccctggaggaactagtccaccaaatgggggcttgccaggcccactagccaccagcgctgccccacccggcccgcccgctgccgcatctccttgcctggggcccgtcgccgccgctggcagtggtctcagacgcggagcggagggaatcctggctccccagccccccccgccacagcaacatcaggaacgacctggtgctgcagccatcggatctgcccgaggccagtcgactgggaagggaccgccacagtcacccgttttcgagggcgtgtacaataacagtcgcatgctccatttcctgacagcagtagtgggttccacatgcgacgtgaaagtgaaaaatgggaccacgtacgagggaatctttaaaaccctgtcctcaaagttcgagcttgccgtagacgctgtgcaccggaaggcgtccgagcctgcaggggggccccgtcgggaagatatagtggacactatggtttttaagcccagcgatgtcatgctggtccactttagaaacgttgacttcaattacgcaacgaaggataaattcaccgactccgcaatcgcaatgaattccaaggtcaatggcgaacataaagaaaaagtgctgcagaggtgggaggggggggacagcaatagcgatgattacgatctggagtccgatatgtctaatggatgggaccccaatgagatgttcaaattcaacgaagaaaactacggcgtcaagaccacatatgattctagcctgtctagctatactgtgcctctagaaaaagacaactctgaggaatttcgccaacgagaactacgcgctgctcagctggcaagagagatagagagctccccgcagtacaggttgcgtatcgcaatggagaacgacgacggacgcactgaggaggagaaacatagcgccgtacagagacagggatctggccgagagagcccatccctggcatcccgcgaaggcaaatacattcctctgccccaaagagtgcgggagggtcctagaggcggggtgagatgctcatcttcacggggcggaagaccaggcctttcttcattacccccaagaggtccccatcaccttgacaacagttctccaggaccaggctctgaggcacgaggcattaatggcggcccaagtcgaatgtctccaaaggcccagaggccgctgcggggcgcaaagaccttaagtagcccctcaaacaggccaagcggcgaaacaagcgtcccaccccctcccgccgtaggcagaatgtatccaccacggtccccaaagtctgctgcccctgcccctatcagcgcctcttgcccagagcctcccattgggtctgctgtgcccacaagttctgcttctattccagtcaccagctctgtgtctgatccgggtgttgggtctatctctcccgccagtcccaagattagtctggcccctaccgatgttaaggaattgagtaccaaagaacccggaagaacactcgaaccacaggagctcgctcgcattgcgggtaaggtccccggccttcagaatgagcagaagcgctttcagctggaggaactgagaaagttcggagcccagtttaagcttcagccctccagcagcccggagaattcacttgatccctttcccccacgcatactcaaagaagagcccaaaggcaaggagaaggaggtcgacggccttcttacatccgaaccaatgggatccccagtgtcttcaaagactgagagcgtcagcgacaaagaagataaaccacctttggctcccagcggtgggaccgagggccctgaacagccgcctcccccttgcccctcccagacagggagccctcctgtcgggctaattaaaggggaggacaaggatgaaggacccgtggcagagcaagtgaagaaatctactctgaatccaaacgctaaggagttcaatcctaccaagcctctgctatccgtaaataaaagtacatctaccccaacaagccccgggccacgcacccactcaacacctagcatccccgtgctcactgcagggcaatcagggctgtactctccacaatatattagctacatcccgcagatccacatggggcccgcagtccaagccccacagatgtatccatatccagtctctaacagtgtacccgggcagcaggggaagtatcggggcgcaaaaggcagtctccccccccaaaggtctgatcaacatcaacccgcttcagccccaccaatgatgcaggcagcagccgctgctgggccacccctggttgccgcgacgccctactcatcctacattccgtacaatccccagcaattccccgggcagcctgcaatgatgcagcctatggctcactacccttcccaacccgtgttcgcgcctatgctgcagagcaatcctcggatgctgacttccggaagccatccacaggctatcgtgtcgagttcaacacctcagtaccccagcgccgaacagcccaccccccaggccctctacgcgactgtgcaccagtcctacccgcatcatgccacacagctgcatgcccaccaaccgcagcctgccactacacccactggctctcagccccaaagtcagcatgcagcccccagccccgtccagcaccaggccggtcaagcccctcacctgggttccggccagccccaacaaaacctctatcaccccggagctctcacggggacgccaccatctctcccccctggccccagtgcacagtctccccagagctcgttcccacaaccagctgccgtgtacgcaattcatcatcagcagctgcctcacggcttcaccaacatggcccatgttacccaggcccatgtgcagactggaataaccgccgcgcctcccccccacccaggcgcaccccacccaccgcaggtcatgctgctgcatccgccacagtcccatggtggtccccctcagggtgcggttccccagagcggagtacctgctttatccgcctccaccccctccccctacccctatatcggccacccgcagggggagcagccaggccaggcacccggcttccccggaggagctgacgatcggattcgggagttctccctggcaggcggcatatggcacggtcgcgcggaaggcctgcaggttggccaagacgctcgcgtcctgggcggagagtag

SEQ ID NO: 179645 - DNA, 3135 bp, synthetic construct
  misc_feature 1..3135: note = Description of Artificial Sequence: Synthetic coding sequence
  source 1..3135: mol_type = other DNA
atgctgaagccccagcccctgcagcagcccagccagccccagcagccgcctcccacccaacaggcagttgcccgaagaccacctggggggacttcaccgcctaacggtggtctccctggacctctggccacgtcagccgctcctcccgggccccctgccgccgcctcaccctgccttggtccggtggctgccgctggcagtggtctccggagaggagctgaaggaatactagcaccacagcctccccctccccaacagcaccaagaacgccccggagcagcggcaatcggctctgcgcgagggcaatctacaggcaaaggtcctccccagagtcctgtgtttgaaggagtgtacaataacagtcgcatgctgcatttcctgacggcagtcgtgggctcaacttgtgatgtgaaagtgaaaaatggtacaacctacgagggtattttcaagaccctcagctccaagtttgagctcgctgtggatgctgtccacagaaaagctagtgagccagcaggcggaccgcggcgtgaagacatcgtggatacaatggttttcaagccctcagatgttatgcttgttcatttccgcaacgtagacttcaactacgccacaaaagacaagttcacagactctgccatcgcaatgaattccaaggttaacggggaacataaggaaaaagttctgcaaagatgggaaggcggagattctaactcggacgactacgatctggagtccgacatgagcaatggctgggatccgaatgagatgttcaagttcaacgaggaaaattacggcgtcaaaaccacgtatgattcgtcactgtcaagctacaccgttccccttgagaaggataattcggaagagttcagacagcgcgagcttagagccgcacaattggcgcgtgagatcgaaagctcccctcagtatagactgagaatagccatggagaacgatgacggccgaaccgaggaggagaaacactccgctgttcaacgccaggggtccgggcgggagagccctagcctggcctctcgggagggtaaatatattccactgcctcagcgcgtccgggaaggccctagaggcggcgtacgatgttctagttccaggggaggcaggcccggcctcagttctcttcccccccggggtccccatcacctagataatagctcccccggtccaggatccgaggcaagaggcatcaacggtggcccaagccggatgagcccaaaagcacagcggccgcttcggggcgcgaagaccctgtcaagtccctctaataggcctagcggcgagactagcgtaccaccgccacccgctgttggtagaatgtacccccctcggagtcctaaatcagcagccccagctccaatttcagctagctgccctgagcctccaatcggcagcgctgttccaaccagttccgcctctattcctgtgacctctagcgtttctgaccccggtgtcggtagcatttcacctgcctccccaaagatcagcttggctcccactgatgtgaaggagctttctactaaggagccaggcaggactctcgagccacaggaactagcacgaatcgccggcaaggtccccggactgcaaaacgagcagaagagatttcaactggaagaactccgcaagtttggagctcagttcaagttacagccctctagctcgcctgagaatagcctggatcccttccctccccgaatcttaaaggaagaaccaaaggggaaggagaaggaagtcgatggcttactgacaagtgagcccatgggaagcccggtgtcatccaagaccgaatctgtgtccgataaggaagacaaacctccccttgcaccctccggcggaaccgaaggccccgagcaaccaccacccccttgcccatcccagacaggctcaccgccagtcggcctgattaagggggaggataaagatgaaggccctgtcgccgagcaggtcaagaaaagtacccttaatccaaatgctaaggaatttaacccaacaaaaccactgctgtcagttaataaaagcacctcaacgcccacgagccctggccctagaactcacagcacccccagtattcccgtgctgactgcaggacagtccggcttatatagcccacagtacataagctatatcccacagattcatatgggacctgcagtgcaggcccctcagatgtatccttatccggtgagtaatagcgtgcccgggcagcaaggaaagtataggggtgcgaaaggcagtctgccacctcaaaggtcagatcagcatcagcctgcatctgccccgcccatgatgcaggcagccgctgctgcaggaccaccattagttgccgctacgccctactcctcctatattccctataatcctcagcagtttcccgggcaaccagccatgatgcagcccatggctcattatccttctcagcccgtctttgccccgatgttacagagtaacccacgaatgctgacatccggatctcatccccaagctatcgtgagcagcagtacacctcaataccctagcgccgaacagccaactccacaagctctttacgcgaccgtgcaccagagctacccccatcacgcaacacaactgcacgcacaccagcctcagcccgctacgactccaactggtagtcagccccagtctcagcacgcagcgcccagcccggtgcagcatcaggccggccaagctccccatctaggaagtggacaaccgcagcaaaacctctatcaccctggagccctcacgggaacacccccaagtcttccaccaggcccctcagcccagtctcctcaatccagtttcccccaacccgccgccgtctacgctatccatcatcagcaactgcctcatgggtttaccaacatggcacatgtcacccaggcccacgtgcagactggcataacagcagcccctcccccccacccgggcgccccacatccgccgcaggtcatgctactccatcctcctcagagtcatggaggtcctcctcaaggcgcagtcccccagtcaggggtgcctgcactttccgcatctactccctccccctatccttacattggccaccctcaggtccagtctcatccttcccagcagctgccctttcacccacccggtaactag

SEQ ID NO: 179646 - DNA, 1203 bp, synthetic construct
  misc_feature 1..1203: note = Description of Artificial Sequence: Synthetic coding sequence
  source 1..1203: mol_type = other DNA
atgctgaagccccagcccctgcagcagcccagccagccccagcagccaccgccaactcagcaggcggttgccaggcgtcctcctggcggcacatctcctcctaatggcgggttgccaggccccttggcaactagcgcagcaccccccggcccacctgctgccgcttctccttgcctaggcccggttgcggctgccgggtcagggttacggcgcggagcggaaggaattttggctccgcagcctccaccccctcagcagcatcaggaaagacccggggccgccgctataggcagtgctcgaggacagagcaccggaaaaggcccaccccagtccccagttttcgagggagtgtacaataacagccgcatgttacacttccttactgccgtggtaggctctacatgcgacgttaaggttaagaacgggacaacatacgaaggcatttttaaaactttgagttccaaattcgagttagccgtagacgccgttcaccggaaggcgtctgagccagccggcggccctcgccgggaagatattgttgatacgatggtctttaagccttcagacgtgatgttggtgcacttcagaaacgtggacttcaattacgcaaccaaagataagttcactgactcggccatcgccatgaattccaaagtgaacggtgagcataaagagaaggtcctgcagcgatgggagggaggggacagtaattcggatgactacgatctggaaagcgacatgtctaatggttgggacccgaatgagatgttcaagttcaatgaagaaaactacggggtgaagacgacatacgactcctctctgagtagttacacagttcccctcgagaaagataatagcgaggaattcaggcagcgggagttgagggcagcccagttggcacgagaaatagagtcttctcctcagtatcgcctgcggatcgccatggaaaatgatgacgggcggaccgaagaggagaagcacagcgcagtccagaggcaggggagtggaagggaatcaccttcccttgcttcgcgagagggcaagtatatccccctgccccctcaccgcggccagggacagggaccagccggtgtgggagggtcctgctcagcccctgcccgaccccaccctgttcttccatcccatccactcatctactcacccgcaggtgatggaagaagtttcatcttttattacctgtag

SEQ ID NO: 179647 - DNA, 3135 bp, synthetic construct
  misc_feature 1..3135: note = Description of Artificial Sequence: Synthetic coding sequence
  source 1..3135: mol_type = other DNA
atgctgaagccccagcccctgcagcagcccagccagccccagcagcctccacccacccagcaagccgtggcacgccggccacctgggggaacaagccccccgaacggtggacttcctgggccactagctacgtccgctgctcccccaggaccgccagcagccgcttccccctgcctcgggccagtggctgccgctggctccgggttacgtcgtggggccgagggtatcctggcgccccagcccccccctcctcagcagcatcaggagcgccctggggctgcagcaatcggaagcgccagaggtcagagtaccggaaaagggcctcctcagtcccccgtgtttgaaggagtgtacaacaactctagaatgctgcactttctcacagcggtcgtcggtagcacatgcgacgtcaaagtgaagaatggcaccacttatgagggaatttttaaaacactctcatcgaaattcgagctggccgtagacgctgtgcatcgtaaggccagtgagccagctggcggacccagaagagaagacatcgttgacacaatggttttcaaaccctctgatgtgatgctcgtgcacttccgaaacgttgattttaactatgccactaaggacaagtttaccgacagcgctattgcgatgaactccaaagtcaacggagagcacaaagaaaaggtgctccagcgatgggaggggggcgattctaactcagatgattatgacctggaatcggatatgagtaatggttgggatccaaatgagatgtttaagtttaacgaggaaaactacggtgttaaaacgacctatgatagctctctcagcagttatactgtgccgctggaaaaagataactccgaagaattcagacagagggaattacgcgccgcgcagctggcgcgagagatagaaagttccccccaatatcgccttcggatagcaatggagaacgacgacgggcgcacggaagaagagaagcacagtgcagtacagcggcaggggagcggccgggagagtccatctctggcctcccgcgaaggcaaatacattccgctgccacagagagtgcgggaggggcctagagggggcgtgcgctgcagcagttccagagggggtcgccccgggttaagttcattacccccccgcggacctcaccacctcgataattcaagtcccgggcctggttcagaggctcggggcataaatggcgggccctcccggatgtcacctaaggcgcaaaggccattgagaggggctaagaccctcagcagccctagtaaccggccctctggcgagacatcagttcccccgccccccgcagtcgggagaatgtatcctccccgttccccgaagtccgcggcaccagcccccatttccgcctcgtgtccagaacctcctattgggtccgctgttccgaccagtagtgccagtatccctgtgaccagttctgttagtgatcccggggtggggtccattagccccgcctcccccaagatcagtctggctcccaccgacgtgaaagagctatctacaaaggaacctggccgcaccttagagccccaagaactagcgcgcatcgccggcaaagtccccggtctgcaaaacgagcagaagcggtttcagcttgaagagttgaggaaattcggggcccagttcaagctacagccttcatcatcacccgaaaatagtcttgatcctttccccccaagaatcctgaaggaggagcctaagggaaaggagaaggaagttgatgggttgttgacatccgagcccatggggtcccccgtttcttcaaaaactgaaagtgtctccgataaggaggacaaaccgccactagcaccatctgggggcaccgaggggccggagcagccaccccccccatgcccaagtcagactggatccccacccgttggcctgataaaaggtgaagataaagacgaaggtccagtcgccgaacaggtaaagaaatctacactgaatcccaatgccaaggaatttaacccaaccaaacctttattaagcgtcaataagtctacttctacacctacttccccaggaccccggacccacagcaccccgtctatccccgtgcttactgccggtcagtccggcctttactctccccaatacatttcgtacattcctcagatacatatgggcccagccgttcaggcgcctcagatgtacccatatcccgtaagcaatagtgtgccaggccagcagggcaaatatcgcggggcaaagggctctttgccaccgcaacgtagcgatcagcatcaaccggcctctgccccacccatgatgcaggccgcagcagctgccggaccaccgcttgttgcagccacgccctacagctcttacattccttataaccctcagcaattcccagggcagcctgctatgatgcagcctatggcccattatccctcacagcctgtgtttgcaccaatgttgcagtctaaccccaggatgctgacgtccggatctcatcctcaggcaattgtctcatcatcaaccccacagtatccttccgctgagcagcctacaccacaggctctctatgcaacagtacaccagtcttatccacaccatgccacccagttacacgcacatcaaccacagccagccacaacacctactggctcccaaccccagagtcaacacgccgctcctagtcctgtccagcaccaggcgggtcaggctccccacctgggatctggccagccgcagcagaatttgtatcacccaggggctctgaccggcaccccccccagtctgcctcccggcccttcagcgcagtccccccaatcttcctttccacaaccggcagcggtgtacgctatacatcaccaacagctgccacatggcttcactaatatggcccacgtcactcaggcgcacgtgcagacgggcatcactgccgcaccgcctcctcatcccggcgctccccacccaccacaggtcatgttactccatccgccgcaaagccacggcggcccaccacaaggggccgtgccacaatcaggagtaccagcactgagcgcatcaactcccagcccctacccttatatcggacatccacaggcaccactccctccaccaggcgagctgaaaattgtcctggctgccacttag

SEQ ID NO: 179648 - DNA, 3294 bp, synthetic construct
  misc_feature 1..3294: note = Description of Artificial Sequence: Synthetic coding sequence
  source 1..3294: mol_type = other DNA
atgctgaagccccagcccctgcagcagcccagccagccccagcagcctccacctacccagcaagctgttgccaggaggccccctggcggaaccagcccacccaatggcggactcccagggccccttgctactagcgctgccccgcccggtccgcccgcagccgcctccccatgtctaggacctgttgccgccgcaggcagcgggctgcgcaggggagcggaggggatcctcgcaccccaacccccccctccacagcaacaccaggaaaggcctggagcagccgcgatcggcagcgcgcggggccaaagtacggggaagggcccgccccagtcccctgttttcgagggtgtctacaataatagccggatgcttcatttcctgaccgcagttgtgggctccacctgtgacgtcaaggtaaaaaacggaacgacatacgaaggcatcttcaagacgctgtcgtccaagtttgagcttgctgtagacgcagttcaccggaaggcctctgaacctgcagggggccctcggcgcgaagatatcgttgacactatggtgttcaaaccgtcggacgttatgctcgtccacttccggaacgtcgattttaactatgccaccaaggataagttcacagactctgccatcgcaatgaatagcaaggtgaatggtgaacacaaggagaaagtcctccagaggtgggagggaggcgattccaatagcgacgattacgacctggaatcagatatgtctaacggttgggatccaaacgagatgtttaagttcaacgaggaaaactacggagttaaaaccacttacgattcaagcctaagctcatatactgtgcctctggagaaggataatagcgaggaatttagacagagagaattacgagccgctcagctcgctagggagatagaaagcagccctcagtatagactgcgcatcgcaatggagaacgatgacggtcgcactgaagaagaaaagcatagcgccgtgcaaaggcagggcagcggcagagagtcaccctccctcgcctctagagaaggtaagtacatacccctacctcagagagtccgggaaggcccgcgcggaggcgttcgttgttctagttctcggggaggcaggcccgggctttcaagtttaccacccagaggcccgcatcacctcgacaactcttccccaggcccaggctccgaggcccgtgggatcaatggtggacctagcagaatgtctccaaaggcccagcgtcctttaaggggagccaaaactctcagctctcccagtaaccgcccaagcggagagaccagtgtgccaccacccccagctgttggcagaatgtacccgccacggtccccgaaatcggccgctcctgcacccattagcgcaagttgccctgagccgcctattggctccgcagttcctacgagctccgcctcgattcccgttacatccagcgtctctgaccctggagtaggctccatcagcccagcatctccaaagattagtctggccccaactgatgtcaaggaacttagcacaaaggagcctggccgcaccctggaacctcaagaactggcccgtatcgctggcaaggtccccgggctgcagaatgagcagaagcgctttcaactggaggagctccgaaagtttggggcccagttcaaactccagcctagcagctctcctgaaaatagtctcgacccatttcccccacggatactcaaggaagagccaaagggcaaggagaaggaggttgacggcctattaacatccgagcctatgggttctccggtcagctcaaagactgagtcagtgagtgataaggaagacaaacccccacttgcccctagtggaggcaccgagggccctgagcagcctcctcccccgtgtccgagccagaccgggtccccccccgtaggcttaataaagggagaggacaaggatgaaggccccgtagcagagcaggtcaagaaatccactctgaaccccaatgctaaggagttcaatccaactaagcctctcctgtctgtgaataagagtacatccacccctacatctccaggcccccgcacacattccacaccgtccatccctgtgcttaccgcaggacaatcaggcctgtactcgccacagtatatcagctacataccccagatccatatgggacccgctgtccaagctcctcagatgtacccttatcccgtcagtaactctgtgccgggccaacagggaaagtaccgtggtgcgaaaggatcattaccacctcaacgatcagaccagcaccagccagcgtctgcccccccgatgatgcaggccgctgcagctgcgggacctccattagtggcagcaacgccctactcatcgtatataccctataaccctcagcagtttccaggacaacctgccatgatgcagccaatggcacattatccctctcagcctgtttttgctcctatgctgcagagtaacccacgaatgttgacttccggttcacacccacaagccatagtttcgagtagcacccctcagtatccgtcagccgagcagcctacacctcaggctttgtacgccaccgtgcaccagtcttatccccaccatgcaacacagctgcacgcccatcagccccagcccgctacgacacccacgggctcgcagccccagtcacaacacgccgcaccctcccctgttcaacaccaagcaggccaagctccacacttaggcagtggccaaccacagcaaaatctgtatcatcccggcgctctcacgggcaccccaccgtcgttacctcccggccctagtgctcagtctccccagagttcttttccacagccagcagcagtctacgcgattcatcaccagcaactgccccatggatttactaatatggcacatgtgactcaggcacacgtgcagacaggaataaccgcggcccctcctcctcaccctggagctccgcacccgccccaggtgatgcttcttcaccccccccagtcccacggcgggcccccacagggggccgtgcctcagtccggcgttccagccctgtctgcgtctactccttccccctacccctatattggacacccccagggtgagcaacccggccaagcccccggattcccggggggggcagatgacagaatcctttgccgcgtgggaagaagtcattcaaggaggaggcagggcctggcgcccggaagtgttctgtgttttccccctagctccttgagctgtgaccccgcagcacctctcccaacagcaagccctgccctgtcagatcccgactgtctcctcacgtag

SEQ ID NO: 179649 - DNA, 2679 bp, synthetic construct
  misc_feature 1..2679: note = Description of Artificial Sequence: Synthetic coding sequence
  source 1..2679: mol_type = other DNA
atgagcgagcgggccgccgacgacgtgcggggcgagccccggcgggctgctgcggccgccggcggagccgccgccgcggcagcgagacaacagcagcagcagcagcagcagcaacagcctccccccccacagccccagcgccagcagcatccccccccccctccccgacgaactcgtcccgaggatggcggcccaggcgctgcctctacaagcgccgctgcaatggcaaccgtaggggagaggcgccctttgccatcccctgaggtgatgcttggccagtcttggaacttatgggtggaggcaagcaagcttccaggcaaggacggcactgagctggacgaatcgtttaaagaatttgggaagaaccgcgaggtaatggggctctgtagggaggatatgcccattttcggcttctgccctgcacacgacgatttctatttagtggtctgtaacgattgtaatcaggtggtcaagcctcaggcatttcaaagtcattatgaaagaagacattcatcctcatctaagcctccactagccgttccccccacctcagtcttctcattctttccttccctgagtaaaagcaaggggggctccgcatccggttcaaacagaagctctagcgggggcgtcttgtccgcttcaagctctagttccaagctgctgaagtcaccaaaggagaagctgcagctccgtggcaatacaagacccatgcatccaatacagcagtctcgggttccccacggccggattatgacaccaagcgtgaaagttgagaagattcacccaaagatggacggcactctgctcaagtctgctgtcggacctacttgtcccgcaaccgtgtcctcactcgtgaaacctggtctgaattgcccttcaatccctaagcctactctcccctcccctggtcagattttaaatggcaagggtctgcctgctccgccaactttagaaaagaagccggaggataactccaataacaggaagtttctgaataaaaggctgtctgaacgcgagtttgatcctgatatccactgcggagtgatcgacctggatacaaagaagccgtgtaccagaagcctaacctgcaaaacacattctctgacccagagacgcgcggtgcaggggaggcgaaagcggtttgatgtattattagctgagcacaagaacaagactagggaaaaagaacttattcggcacccagacagtcagcagcccccacagccacttagggaccctcaccccgcacctccccggacctcacaggaaccgcaccagaaccctcatggggtgatcccgtcggagtcaaagccttttgtcgcctctaagcctaagcctcacactccctcactcccacggccgcccggctgccccgcccaacagggggggtcagccccaatagatcccccaccagtgcatgagtcaccacatccacccctccctgccacagagcctgcaagccgcctgtcaagcgaagagggggagggggacgacaaagaggaatccgtggagaagctcgactgccactattccgggcatcatcctcagcctgcatctttttgtacatttggaagtcgccagataggaaggggatattacgtgtttgactccaggtggaataggctcagatgcgctttgaacctgatggttgaaaaacacctcaatgctcagctttggaagaagatccctcctgtgccctccaccacatcccctatttctacgcggatcccccacaggaccaacagcgtgcctactagccagtgcggagtctcctacctggctgcggccaccgtgagtacttcccccgttctcctttcatctacctgtatatccccaaacagtaagagcgtacctgcccatggaacaaccctcaacgcgcagcccgcagcaagtggagctatggatcctgtgtgtagcatgcagtccagacaagtaagctcaagttccagctccccttcaactcctagcggcctgtcatccgttccttcttctcccatgagcaggaagcctcagaagctcaagtcttctaaatccctccgccccaaggaatcaagcggtaactctaccaattgccagaatgcatctagcagcacatctggcgggagtggcaagaaacggaaaaactcatcaccactattggtgcattcctcaagctctagttcctcaagttcatctagcagccacagcatggaatcgtttagaaaaaactgcgtcgcccattccggacctccttaccctagcactgtgacctcatcacactccattgggctcaactgcgtgactaacaaggctaatgcagtgaacgtacgacacgaccaaagtggaagaggcccacctaccggatcaccagcagaatccattaagcggatgtccgtaatggtaaacagttccgattctaccttgtctctcggaccgttcattcatcaatccaatgaactgccagtgaactctcacgggagtttttcccactcccacacccccctcgataaactaattgggaaaaagaggaaatgcagccccagctcaagtagcatcaacaacagctcaagtaaaccaaccaaggttgcgaaagtccctgctgtcaataatgttcacatgaagcacaccggtacgattccaggggctcaggggcttatgaacagttctctactccaccagccaaaggcccgaccctag

SEQ ID NO: 179650 - DNA, 2838 bp, synthetic construct
  misc_feature 1..2838: note = Description of Artificial Sequence: Synthetic coding sequence
  source 1..2838: mol_type = other DNA
atgagcgagcgggccgccgacgacgtgcggggcgagccccggcgggcagctgccgctgcaggcggcgccgcagcagccgccgccaggcagcagcagcagcagcaacaacagcaacagccccccccgccccagccccaaaggcagcagcatcctccccccccaccccgcagaacaaggcccgaggacggtggtcccggagctgcaagtacttctgccgctgcaatggcaacagtaggcgaacgccgtcctctaccaagcccagaggtaatgctcgggcagtcatggaatctgtgggtcgaggctagtaagttacccggcaaggacgggaccgaattggatgaatccttcaaggagtttggaaaaaatagagaggtgatgggactttgccgagaagacatgcctatatttgggttctgtccagctcatgatgatttctatcttgtggtgtgcaacgattgcaaccaggtcgtgaagcctcaagcgtttcagagccactatgagagaagacattcatctagctccaagccccccctggccgttccacccacgagtgttttctcattcttcccctcactgagtaagtcaaaggggggctccgcctccggctcgaatagatcctcctctggaggagtgctgtcagcctcctcctcaagcagcaagttgttgaagtcccctaaagaaaagttacagcttcgggggaatactaggcccatgcaccccatccagcagagccgtgttccacacgggaggatcatgactccctccgttaaggtagaaaaaatccatcccaagatggacggaaccttgctgaagtccgccgttgggcctacctgccctgccaccgttagctcattagtgaaacctgggctcaactgtcctagtatccccaagcctactctccctagccccgggcagatcttgaatggcaaaggtcttcccgcaccaccgacattagagaagaaacctgaggataactctaacaatagaaagtttttaaacaagcgcctaagcgagcgagagttcgatcctgatatccattgtggggtaattgatctagatacaaaaaagccatgcactcgctcactgacatgtaaaactcactctctcacacaaagaagagcagtacaggggagaagaaagcggttcgacgtgctgctcgccgaacacaaaaacaagacgcgggagaaggagttgattcgccatccagacagccaacagcctccacagcccctaagagacccccaccccgccccacccagaacgtctcaagagccccatcaaaacccgcacggcgtgatcccttccgagtcaaagcctttcgtggcctcaaagcctaaaccacacacaccttctctcccacgaccgccaggctgtccagctcagcagggcggctcagctccaattgatcctccacctgtacatgagtccccccaccctccactgcccgcgacagaaccagctagccgcctatcctccgaggagggtgagggggacgataaagaggagtcagtagagaagctcgattgccactactcaggtcatcatcctcaaccagcttctttctgcaccttcggatcacggcagatcgggagaggatactatgtgttcgattccaggtggaaccgccttcgctgtgctctgaatctcatggtcgagaaacacctcaacgcccagctatggaagaaaattcctccagtcccctctactacttcacccatctcaactagaatcccccaccgcactaactccgtaccaacttcacaatgtggggttagctatctggcagctgctacagtgagtacctcccccgtgctattgtccagtacttgcatcagtcccaattccaaatccgtgcccgcacatggtactacgttaaatgctcagcccgccgcctccggagctatggatcccgtatgcagcatgcaaagcagacaggtgagcagcagctcaagctcaccaagcacgccatcaggcctgagcagcgtaccttcaagtcctatgtccagaaagcctcagaagctcaaatcctcaaaaagcctgagacccaaggagtcgagtggaaacagcaccaattgccaaaatgctagctcatccacgagcggagggtctggaaaaaaacggaaaaactcatcacccctgctcgtgcattcgtcctcctcatcatctagctcatcgtcaagctctcactcaatggagagcttcaggaaaaattgtgtggctcatagcggccccccatacccctctactgtgacctctagccactccattgggctgaactgcgtcacaaataaggctaacgccgtaaatgtacgccatgatcagtccgggcgagggcctcctaccggaagcccggctgaatcaattaagcggatgtcagtaatggtgaacagtagtgattccaccctgagcttgggaccctttattcatcagtccaacgagctgcccgtcaactcacacggctcatttagccactcccacaccccgctcgacaaactcatcggaaaaaagaggaagtgctcaccaagtagcagttccattaacaattcctccagcaagccaactaaggtagctaaggtgccagccgttaacaatgtacatatgaaacatacaggcacaatccccggtgcacagggcctgatgaattcgagtctgctgcaccaggacattagttccccatgtctgcgcaccggcatttcagcgaccagcccacagagtcctgacctgaaatccaagggtacctccctgaccgcggagaatagcaccggcaggaataatgccgatacctttgaagataaactgcaccttcatagtgcactgtggactccccgctgtctttag

SEQ ID NO: 179651 - DNA, 81 bp, synthetic construct
  misc_feature 1..81: note = Description of Artificial Sequence: Synthetic coding sequence
  source 1..81: mol_type = other DNA
atgagcgagcgggccgccgacgacgtgcggggcgagccccggcgggcagcggcagcggctggaggggccgccgcggcttag

SEQ ID NO: 179652 - DNA, 2679 bp, synthetic construct
  misc_feature 1..2679: note = Description of Artificial Sequence: Synthetic coding sequence
  source 1..2679: mol_type = other DNA
atgagcgagcgggccgccgacgacgtgcggggcgagccccggcgggcagcggcggcggccggcggggccgccgctgctgccgcaagacagcagcaacagcagcagcagcagcagcagccccctcctccccaaccccaaaggcagcagcatccccctccgcccccacggcggaccaggcccgaagacgggggacccggggccgcaagtaccagcgcggccgccatggcgactgttggcgaaagacgccctttaccgagtcccgaggtcatgctggggcagtcttggaatctctgggtggaagctagcaaactccccgggaaggacggaactgagctcgacgagtcctttaaagaatttggtaagaatcgggaggtcatgggtctatgtcgcgaggatatgccaatcttcggtttctgcccagctcacgatgacttttatttagtggtgtgcaacgattgcaaccaagtggtcaaaccccaagccttccagagccactacgagaggcgccatagcagtagcagcaaaccccccctcgctgttcctccgacttcggtgttcagcttcttccctagtctttcaaagagtaagggtgggagcgctagcggttcaaatcgctcttcgagtggtggggttctcagcgcttcctcgtccagcagcaagctgctcaaatcaccaaaggaaaagctgcaactccgtggaaacaccaggccgatgcacccaatccagcagagtcgtgttcctcatggaagaattatgactccgtctgtgaaggtggagaagatacaccctaaaatggatggcacgctgttaaagagcgccgtcggcccaacctgtcccgccaccgtgagctctttggtgaagccaggcctcaactgcccttctattcccaagcctactttaccttcacctggccagattctgaatgggaagggcttaccagccccgcccacactggagaaaaaaccggaagataatagtaacaatagaaagttcttgaacaaaagactgtcggagcgcgagtttgacccggatattcattgtggggtgattgacctcgacaccaagaagccatgcaccaggtcattgacctgtaagacccatagcttgacacagaggcgggcagtacaaggacgcagaaaacgcttcgatgttctgcttgctgaacacaagaacaagactcgggaaaaagaactgatccgtcatcctgatagccagcagcctccacagccccttcgagatccacacccggcacctcctcgcacatcgcaagagccccatcagaacccacatggagtcataccgtcagagagcaagcccttcgtggcaagcaagcctaagccccacaccccatctctgcctaggccgcccgggtgcccagcccaacaggggggaagcgcgcccatcgatcctcctccagtccatgaatcaccacacccaccactgcccgcaacggaaccagcatctcgtctgtcttcggaggaaggcgagggcgacgacaaggaggagtctgtggagaagctggactgccattacagcggtcaccatccccagccagccagcttctgtacctttgggtctcgacagatcggaaggggttattatgtcttcgactctcgatggaacagattgcgctgtgcactgaatctcatggtggaaaagcatcttaatgctcagctctggaaaaaaatcccccctgttccatctacaacctcccctatatccaccaggatcccacataggactaattccgtgcctacctcccaatgtggtgtttcttacctggccgccgctaccgtgtcaaccagtcctgtgctgttgtcttctacatgcatatctcccaacagtaagtcagtgcctgcccacggcaccacgttgaacgcacaacctgcggcctccggcgcaatggaccccgtctgctcaatgcagagcagacaggtgtcctcatcgagcagtagcccttcgacgccgagcggcttaagtagcgtcccatctagccctatgtctcggaagccgcagaagctgaaatctagtaagagtctgaggccaaaggagagcagcgggaactcaaccaattgtcaaaacgcctcgtcgagcacctccgggggtagcggcaaaaagcgtaagaacagctctccgctgttggtgcatagttcaagctcctcatcctcctcctcctcctcctcccactctatggaatcctttcgcaaaaattgtgtagcacatagtggacctccttatccatccacggttacatcatcacacagcatcgggctcaactgcgtgaccaataaggctaatgccgttaacgtcaggcacgatcaaagcgggcgcgggccacccacgggctctccggctgaatctattaagcgcatgtccgtcatggtaaatagcagcgattctaccctgagcctgggtccttttatccaccaatctaatgagctgcctgtgaattctcatggcagctttagccacagtcacacacctcttgataaattgattgggaagaagcgcaagtgcagcccatcatcgtcttcaataaataatagcagcagtaaaccaacgaaggttgctaaggtgccagccgtaaacaatgtgcacatgaagcataccgggacaatccccggagcacaaggattaatgaattcctctcttctccatcagccaaaggctaggccatag

SEQ ID NO: 179653 - DNA, 2838 bp, synthetic construct
  misc_feature 1..2838: note = Description of Artificial Sequence: Synthetic coding sequence
  source 1..2838: mol_type = other DNA
atgagcgagcgggccgccgacgacgtgcggggcgagccccggcgggccgctgccgcagccggcggggccgctgccgctgctgctcgacagcagcagcagcagcagcaacagcaacagcccccacccccccagccacagcggcagcagcatccacccccacccccaaggaggacacggcctgaggatggaggacccggggccgcgtccaccagtgcggcggctatggccaccgttggagagaggagaccactgccaagccctgaggtgatgctgggtcagagctggaacctgtgggtcgaagccagcaaactccccggaaaggacgggacagaacttgacgaatcttttaaagagtttggaaaaaatagggaggtcatgggtttatgccgcgaggatatgccaatattcggattctgtcccgcacacgacgatttttacctggtggtatgcaacgactgcaaccaggtcgtaaaaccgcaggctttccaaagccattatgaaaggaggcactcttcttctagcaaaccgcctctggctgtcccgccaacctccgtgttctctttttttccttcactcagcaagtctaagggcggtagcgcatcaggatctaacaggtcatcttccgggggtgtgctcagcgcctcctcaagcagctcaaagttgctgaagtctcctaaagagaagttacagttgcgcggaaatacacgtcccatgcaccctatccaacagtctcgagtcccgcatggaagaatcatgactccttctgtgaaagtggaaaaaattcatcctaagatggatgggactctgcttaagagcgccgtgggaccaacttgcccagccaccgtgtccagcttagtaaagcccggtctgaactgccccagtatccctaaacctacactccctagccctggccagattctgaacggcaaggggctccctgcacccccaaccttagagaagaagccggaggataatagcaacaaccggaaatttctgaacaaacgcctgtccgaacgagagttcgaccctgatatacactgtggggttattgacctagatacaaagaaaccctgtacccggtccctgacatgtaagacccattccttgactcagcgccgtgctgtgcagggccggcgaaaacgcttcgacgtccttctggccgagcataagaataaaacgagagaaaaagagctgattagacaccctgattcccagcagccaccccagcctctgagagatcctcatcccgcccctcctcgaactagccaggaaccccaccagaacccccacggcgtgatcccgtctgaaagcaagccattcgtggcttccaaaccaaagccccataccccgtccctgcctagacctccaggttgtcccgcccaacaggggggctcagcgcccatcgatccaccgccagtccatgagagccctcatccacccttaccggccactgagcccgcatcccgcctcagttcagaagagggggaaggcgacgacaaagaagagtcggtggagaaactcgactgccactattctgggcatcatccacaacccgcctccttttgcacgttcggctccagacagattggccgggggtactacgtgttcgacagtaggtggaaccgtctcagatgcgccctgaacttgatggtggagaaacacctgaatgcccaactctggaaaaaaatacccccggtacctagtacaaccagccctattagcacgaggatccctcatagaaccaactctgttcccacctcacaatgcggcgtgtcctacctggcagctgcaacagtgtcaacctctccagtgttgctgtcatctacttgcatcagtcctaacagcaagagtgtccctgcccacggaaccacgctcaacgcgcagcctgctgccagcggagccatggaccccgtgtgttccatgcagagtagacaggtctcctcatcctccagttccccatcaaccccaagtgggctgagtagtgtacctagtagccccatgtcgagaaaaccccagaagcttaagtcttcaaaatccctacgacccaaagagagctccggtaactctacgaactgtcaaaacgctagtagttccacatcaggcgggtcagggaagaagcgtaaaaacagctccccactgttagtgcactccagctctagtagctcctcctcatcctcttcctcccacagtatggagtctttccgtaaaaactgcgtggcccactccggcccgccataccctagtaccgtgaccagttcacactcaatcggcttaaattgtgtcactaacaaagcgaacgcagttaatgtgcggcacgatcaatccgggcggggacctcctaccggcagtccagcagagtcaatcaaacggatgagtgtaatggttaatagtagtgactctaccctgtctcttggtcctttcattcatcagtccaacgaacttccagtgaacagccacggctcattctcccactctcacaccccccttgataagttgattgggaagaaacggaagtgcagcccatcttcatcatccattaataactcctcctctaagcctactaaggtggctaaggtgccggctgttaacaacgtgcatatgaagcacacaggtactatcccaggggcacaggggctcatgaatagttccctcctgcatcaagatatcagcagtccctgcctccggacgggaatctccgcaacttcaccgcaatccccagatctgaagagtaagggcacctcactgacggctgagaatagcactggaaggaacaacgccgatactttcgaggacaagcttcatttgcattcggctttatggactccaaggtgcctgtag

SEQ ID NO: 179654 - DNA, 393 bp, synthetic construct
  misc_feature 1..393: note = Description of Artificial Sequence: Synthetic coding sequence
  source 1..393: mol_type = other DNA
atgagcgagcgggccgccgacgacgtgcggggcgagccccggcgggccgcggctgcagcgggaggagccgccgcggcagcagcacgccagcagcagcaacagcagcagcagcagcaaccacccccgccgcagcctcaacgccagcagcatccgccacctcctcctcgccgtacccgtccagaagacggagggcccggggcagcctctacatccgccgcggctatggccaccgtcggagagcgcaggccgctcccgtcgcccgaggttatgctggggcaatcctggaacttgtgggttgaggcctctaagctgccagggaaggatggagacagaattggacgcaaattccagggagtgtggaatcgagaagtgatgggcctgtgtcgggagtag

SEQ ID NO: 179655 - DNA, 2244 bp, synthetic construct
  misc_feature 1..2244: note = Description of Artificial Sequence: Synthetic coding sequence
  source 1..2244: mol_type = other DNA
atggagggcagcaagacccccctgcagagcagccccagcgcccaggagcttaaggcacctctagagaggcggcacagctcttccagcaagcctcccctggccgtgcctccaacaagcgtgttttccttctttccatctctgtcgaagagtaagggcggcagcgccagcggcagcaatagatcaagttcaggcggagtgctttccgcctcgagcagctcttccaaactgttgaaaagccccaaagagaagcttcagctcagagggaatactagacccatgcacccaatccagcagagtagggtgcctcatggacggatcatgacaccttctgttaaagtggaaaaaatccatccaaagatggatggtacactacttaagtccgccgtgggccccacttgtcctgcaacggtatctagcctggtgaagcctggccttaactgcccttcaattcctaagccaactctgcccagtcctgggcagatccttaacggcaaaggacttcccgccccccccactctggagaagaagccagaagataacagtaataaccggaagttcttaaacaagcgcttgtcagaaagggaatttgaccctgatattcactgtggggttattgacctcgataccaagaagccttgcactcggtctctaacatgtaagacccatagtctcactcagagacgggccgtgcaaggcagacgaaagaggttcgatgtgttactcgctgaacataagaacaagacacgtgaaaaggaattgataaggcatcccgattctcagcaacctccccagccattgagggatccccatcctgctcctccccggacctcacaagagccccatcaaaacccacacggtgtgattccttcagaatcgaaaccatttgttgcatcaaagcccaaacctcataccccaagtttacctaggcccccgggatgtcccgcccaacagggaggaagcgcccctatcgaccctcctcccgtgcacgaatcaccacatcctcctttgcccgccacagagccggcttctcggttgagttcggaagagggagagggggatgataaggaagagagtgtcgaaaagctagactgccattacagcggccatcacccccagcctgccagcttctgtacgttcgggtccagacagattgggaggggctattacgtctttgacagtcgctggaacagactgagatgcgcactgaatctcatggttgagaagcatttgaacgcccagctgtggaagaaaatcccacctgtaccatcaaccacctcaccaatttccacacgaattcctcacagaacgaatagcgtaccaactagtcagtgcggagttagctaccttgctgcagctactgtgtctactagtccagtcctattatcgtccacgtgtatctcgccgaattccaagagtgtacctgcccacggaacaacactgaatgctcagcccgccgctagcggcgccatggaccccgtctgttcaatgcagagcaggcaggtgtcaagctctagctcttctccttccacccctagcggcctatcctctgtgccctcgtctccaatgtctaggaagccacagaagctgaagtcttcaaagagtcttaggccgaaagagagcagcggcaactcaacaaattgccagaacgctagtagctccacttccggcggttccggcaagaaacgcaagaacagctctcctttactagtccatagctcttccagttcctcctccagctcttcaagcagtcatagtatggaatcttttaggaaaaactgtgtggctcatagtgggccaccatacccatcgactgttaccagttcccacagcatcggtttaaactgtgtgactaataaggccaatgccgtgaacgtgcgacatgatcagtctggacgggggcctccaactggcagtcctgctgaatccattaaaaggatgagtgtgatggttaactctagtgacagtactttgtcactgggtccctttattcaccagtccaatgagctgcctgtgaatagtcacggtagtttctcccatagccatactcccttagataagctgatcggcaagaagcgcaagtgcagccccagttcaagctcaatcaataatagttcatctaaacctactaaggtggccaaggttcccgccgtaaataatgtccacatgaagcatactggcactatccctggcgcccagggacttatgaatagtagcctgctgcaccagccaaaggccagaccatag

SEQ ID NO: 179656 - DNA, 663 bp, synthetic construct
  misc_feature 1..663: note = Description of Artificial Sequence: Synthetic coding sequence
  source 1..663: mol_type = other DNA
atggaggaggacgagttcatcggcgagaagaccttccagcggtactgtgccgagttcatcaagcactcacagcagataggagattcctgggagtggcggccctcgaaggactgctccgatggatacatgtgtaagatccatttccagattaagaatgggtccgtgatgagtcacctgggggcaagtacacatggccagacctgcctgccaatggaagaggcgtttgagctgcccctcgacgactgtgaggttatcgagacagctgccgcatctgaggttatcaagtatgaataccatgtcctttactcatgctcttatcaggtaccagtcttgtacttccgtgcgagctttctggatggtcggcctctgactttgaaagatatttgggagggcgttcacgagtgctataagatgaggttgcttcagggaccctgggatacaatcacccagcaagaacacccaatactcggccagccattctttgtgctgcacccgtgtaagactaacgagttcatgactcccgtactgaaaaatagccaaaaaattaacaaaaacgttaattacatcacttcttggcttagtatagtcgggccagtcgttggactcaacctgccactcagctatgcaaaagccacgtctcaggacgaacggaatgtgccctag

SEQ ID NO: 179657 - DNA, 378 bp, synthetic construct
  misc_feature 1..378: note = Description of Artificial Sequence: Synthetic coding sequence
  source 1..378: mol_type = other DNA
atggaggaggacgagttcatcggcgagaagaccttccagcggtactgtgcggaattcattaaacacagccagcagataggcgattcgtgggaatggagaccttccaaggactgctccgacggctacatgtgtaagatccatttccagatcaaaaatggttccgtgatgtcacaccttggggcttctacacatggacagacttgccttccgatggaagtcaaatcttgctcagtcacgcaggcgggcgtgcagctacgagatctgagtagccttcagccacctccatccggatttaaacagttctcctgcttgagtctcccttctaactgggattacaggggcagtcctttgcacctggcgaacttcctgtatttctag

SEQ ID NO: 179658 - DNA, 663 bp, synthetic construct
  misc_feature 1..663: note = Description of Artificial Sequence: Synthetic coding sequence
  source 1..663: mol_type = other DNA
atggaggaggacgagttcatcggcgagaagaccttccagcggtactgcgcagaatttataaagcatagccagcagattggcgattcatgggagtggaggcctagtaaagactgttccgatggctacatgtgtaagatccatttccaaataaagaacggctctgtcatgtcccacctgggagccagtacccacgggcagacatgccttcccatggaagaagcattcgagctgcccctggacgattgcgaagtcattgagactgccgccgctagtgaagtgatcaagtacgagtaccacgttctctattcttgctcttaccaggtgcctgtcttgtattttagggcaagcttcctggacgggcggccactgactttgaaggacatttgggaaggcgtgcacgagtgttataaaatgagattgctgcagggcccatgggataccattacacagcaggaacaccctatactaggccagccattcttcgtacttcatccgtgtaaaaccaacgaatttatgactcccgtcctaaagaactcgcagaagattaataaaaatgtaaattacatcacatcatggttgagcatcgtgggtccggttgtgggattgaacctcccgctctcttatgctaaggccacatcccaggatgaacgcaatgtgccgtag

SEQ ID NO: 179659 - DNA, 882 bp, synthetic construct
  misc_feature 1..882: note = Description of Artificial Sequence: Synthetic coding sequence
  source 1..882: mol_type = other DNA
atggaccggcgggtgaagctgtgggaggtgttcggcgagaagtgcgaattcaagggcagcttaagcggctctaatgcgggaatcacaagtatcgaattcgacagcgccggatcctatttgctcgccgcatctaatgactttgcttccagaatctggaccgtggacgactaccgactgcggcatacactcactggccacagcggaaaggtactgtccgccaaatttctgctggacaacgctaggattgtgtctgggtcccacgaccgcacactgaagctatgggatctaaggagtaaggtgtgcataaagaccgtgtttgccggcagttcctgcaatgatatcgtgtgcactgaacagtgtgttatgagcggacattttgacaagaagatacgtttttgggatatcaggtcggagtcgattgtgagagaaatggagttgctgggcaagataaccgccctcgatctgaatcccgagaggaccgaactgctatcgtgctctcgcgatgacctgcttaaagttattgacctccgcacaaacgctattaagcagacatttagcgctccagggtttaagtgtggcagcgactggacccgcgtggtttttagcccggatgggtcctatgtcgccgcaggtagtgccgagggatccctgtacatctggtccgtcctgacagggaaagtggagaaggtattatcgagttcgacagctcatcctagcatgaggtggcggggtaggcccttggcaagaacgttgtccgtgtggaccaaagacgcaaaactttgctgcggtcattccacagatggagcgctcagggctggaaggaccccagtgccctctagcgaggaagcccatggtttattgcagccatgccccgggcgctag

SEQ ID NO: 179660 - DNA, 1335 bp, synthetic construct
  misc_feature 1..1335: note = Description of Artificial Sequence: Synthetic coding sequence
  source 1..1335: mol_type = other DNA
atgagcagcggcctgcgggccgccgacttcccccggtggaagcggcacatcagtgaacaactgcggaggagagaccgtttgcagaggcaagccttcgaggagatcattctccagtacaataaactgcttgaaaagagcgatctacactccgtgcttgcgcagaaacttcaggctgagaagcatgacgtgcccaacaggcatgagattcgcaggagacaagccaggctgcagaaggagctggccgaagccgctaaagaacctcttcccgttgaacaggatgacgacattgaagtcatcgtcgacgaaaccagcgatcacaccgaagagacttcaccggtcagagcaatctcacgtgcagccactaggaggtcagtctcatccttcccagtaccccaggacaatgtcgatacccaccctggcagtggtaaagaagttcgggttccagcgaccgccctgtgcgtgtttgatgcgcacgacggcgaggtgaatgcagtccagttcagcccgggatcccgtctactagctaccggaggcatggaccggcgggtaaaactgtgggaagtgtttggcgagaagtgcgaatttaaagggtcgctttcaggaagcaatgccggtattactagcatcgagtttgacagcgccggcagctatcttttagccgcctcaaacgactttgcctcaagaatatggacagtggatgattataggcttcggcacacgctaactgggcacagcggaaaggtactgagtgcaaaatttctcctagataacgccaggatcgtgtctggaagtcacgacaggactcttaaattgtgggacctcaggagcaaggtatgcattaaaacagtcttcgcaggttcatcatgcaatgacattgtgtgtacggaacagtgtgtgatgtcaggacatttcgacaaaaaaatccgattttgggacatccgctctgaaagcattgtgagagagatggaactgttgggtaaaattaccgccctggatttaaaccctgagcgaactgagctattgtcatgttctcgagatgatctcctgaaggtaattgatttaaggactaatgccataaagcaaactttcagtgcccctgggtttaagtgtggcagtgattggacaagggtggtgttttcaccggatgggtcttacgtagccgctggatctgctgaaggcagtttatatatctggtccgtgcttaccgggaaagtggagaaagttctatcaaagcagcactcttccagcatcaacgcagtggcgtggagtccctccggatcccacgtggtctccgtcgacaagggttgtaaggcagtgctgtgggcccagtactag

SEQ ID NO: 179661 - DNA, 1287 bp, synthetic construct
  misc_feature 1..1287: note = Description of Artificial Sequence: Synthetic coding sequence
  source 1..1287: mol_type = other DNA
atgagcagcggcctgcgggccgccgacttcccccggtggaagcggcacatttccgaacagctcagacggagagacagacttcaaagacaggcattcgaggaaattatccttcagtacaacaaactgctcgagaagtcagatcttcactcagtcctggctcagaagctccaggccgaaaagcatgacgttccaaacaggcacgaaattaggcgacgacaagccagattgcagaaagaactcgcagaggctgccaaagaaccgctccccgttgaacaagatgatgacatagaagtgatagtggacgagacgtccgatcacactgaagagaccagccccgtgagagccattagtcgggccgccaccaaacggctgtcccagccagcaggcggtctgctggactcaataacaaacatattcgggcgaagatccgtgagttcatttcccgtgccccaggacaatgtggatactcatcccggctcaggtaaagaggtccgggtgcccgcgactgctctctgtgtgttcgatgctcatgacggcgaggtcaacgccgttcaattctcaccaggaatcaccagtatcgagttcgactctgcaggcagttaccttctagccgcctctaacgattttgcaagtcgtatctggaccgtcgatgactatcgcctgcgccacaccctgaccggccactcaggaaaggtgttgtccgctaagtttcttcttgataacgcccgcattgtgagcggttcccatgaccgaacactcaagctatgggacctgaggtccaaagtctgtataaaaactgttttcgccgggagtagctgcaatgatatcgtgtgcacggagcaatgtgtcatgagcggacactttgataagaaaattaggttctgggatatccgcagtgagtcgatcgtacgtgaaatggaactgctgggcaaaattacagcacttgaccttaatcctgagcgcactgaactgctttcttgctccagagacgatctgttaaaggtgattgatctgagaaccaacgccattaaacagacctttagcgctcctggcttcaaatgtggctccgactggacgcgagtggtattttctcccgatgggtcttacgtagccgccggctccgcggaaggctctctatatatctggtccgtgctgactgggaaggtggagaaagtgttgagcaagcagcattcgtcatctataaatgcagtggcctggtcgccctcaggctctcatgtcgtgagcgttgacaaggggtgcaaggccgtgctgtgggctcagtactag

SEQ ID NO: 179662 - DNA, 1824 bp, synthetic construct
  misc_feature 1..1824: note = Description of Artificial Sequence: Synthetic coding sequence
  source 1..1824: mol_type = other DNA
atgagcagcggcctgcgggccgccgacttcccccggtggaagcggcacatatctgagcagttgagacggagggatagacttcagagacaggcattcgaagaaattatcctacaatataacaagttgctggagaagtctgacttacactccgtgctagcccagaagctgcaggctgaaaaacacgacgtgccaaataggcacgagatctccccagggcatgacggtacttggaatgacaaccaacttcaggaaatggcacagcttcgaatcaaacaccaggaggagctgacggagttgcataagaaacggggagagctggcacagctagtgatcgacctgaataatcagatgcaacggaaagatcgcgagatgcagatgaatgaagccaagatcgcagagtgtcttcagactattagtgacctggaaacagagtgcctcgacctaagaacaaaactctgtgacctggaaagggctaatcagaccctcaaggatgaatatgatgccttgcagatcacattcaccgccctggagggaaagttacggaagacgaccgaggagaaccaggaactggtgaccagatggatggccgaaaaggcgcaagaggcgaacagactgaacgccgagaatgaaaaagactctagacggagacaagcccggctgcaaaaggagctagccgaggccgccaaggaacctttacctgttgagcaggatgacgatatcgaggtgatagtagacgagacgtcagaccacacagaagaaaccagccccgttagggcaatctccagagccgctaccaagaggctttcccagcctgctggcgggctcctggattccattaccaacatttttgggagacgctccgtgagctctttccctgtgccccaagacaacgttgacacacaccccggcagtggtaaggaagtcagagtgcccgccacagcactctgtgtcttcgacgcccatgatggtgaagtgaacgcggtgcagttctcccccggaagtaggttgctggcaaccggcggaatggatcggcgcgttaagctatgggaggtctttggcgaaaagtgtgaatttaaagggagcctgtccggtagcaatgccgggatcacgtccattgaattcgactccgctgggtcttatctgctggccgcatccaatgattttgcttcccgcatctggaccgtggatgactacagactgcgacacaccctcaccggccactccggtaaggtcctcagtgcaaaattcttacttgataatgcacggatagtgagcgggtcacatgataggaccttgaagctgtgggatcttcgctccaaagtttgcattaagaccgtttttgctggttcttcttgcaatgatattgtgtgtactgagcagtgcgtgatgtctgggcatttcgacaaaaagattagattttgggacatcaggagcgaaagcattgtccgagagatggaactgctgggaaaaattaccgcacttgatttaaaccccgagcggacggagctgcttagctgctccagagacgatctcctgaaagttatcgacctacgcactaacgcaatcaagcagaccttcagcgcgcccggcttcaagtgtggatctgattggacacgcgtggtattttcccctgatggaagttacgttgctgcaggaagtgctgaagggtccctttacatttggtccgtgctgactggcaaggtggagaaggttttatctaaacagcactctagctccattaatgcagtcgcttggagtccctccgggtcgcacgtggtgagcgtggataagggctgtaaagctgtgctctgggcacagtactag

SEQ ID NO: 179663 - DNA, 1875 bp, synthetic construct
  misc_feature 1..1875: note = Description of Artificial Sequence: Synthetic coding sequence
  source 1..1875: mol_type = other DNA
atgagcagcggcctgcgggccgccgacttcccccggtggaagcggcacatttccgagcagcttcgcaggcgggacagattgcagagacaagccttcgaggagatcatcctccagtataacaagctcctggagaagtccgacctccatagcgtattggcccaaaagctgcaggctgagaagcacgatgtccctaatcgccacgagatcagccccgggcacgacggaacgtggaatgataaccaactacaggagatggcgcagttacgaatcaagcaccaggaggaactgaccgagttgcacaaaaagaggggtgaactggcacagctagttatagacttgaacaatcaaatgcaaagaaaggacagagaaatgcaaatgaatgaagccaaaattgccgagtgccttcagacaatcagcgacctggagactgaatgtctggatctgaggacaaagctgtgtgatcttgagagagccaaccagacattaaaagacgagtacgatgctttacagattacctttaccgcactcgagggaaaacttagaaaaaccacagaagaaaatcaggagcttgttactcgttggatggcagagaaagcccaggaagcaaatcgcttgaacgccgaaaacgagaaagatagcagaagacggcaggccagactgcagaaggagttggctgaggcagctaaagaaccactcccagtggagcaagatgatgatattgaagttatcgttgatgaaacctccgaccacaccgaggagaccagtccggtcagagcaatctctcgggccgctacaaagcgcctgtctcagcccgccgggggactcctggacagcataactaatatcttcggcctgtccgaatcaccgcttctggggcaccattcgtcttctgacgccgccagaagacgaagtgttagttctttcccagttccccaggataatgtcgatacacacccaggctctgggaaagaggttagggtacccgctactgcactgtgtgtatttgatgcccatgacggagaagtgaacgcagtgcagttctcgcctggcagcaggttattagcgaccggcggaatggaccggagggtaaaactgtgggaagtgttcggagagaagtgcgagtttaagggatccttatccggaagcaatgccggcattacctctatcgagttcgactctgcaggcagctacctcctggcggcctctaatgacttcgccagtagaatctggaccgtggatgactataggctgaggcacactctcaccggccattcaggcaaggtcctatctgcaaaattcttgcttgataacgcccgtatcgtttctgggtcccatgatcggactctgaaattgtgggacctgcggtccaaagtttgcatcaagacagtgtttgccggctcttcctgtaacgacattgtgtgtacagaacagtgtgtgatgtctggtcacttcgacaaaaagatccgcttctgggacataaggtccgagtcaatagtgagggaaatggaactgctgggcaaaattaccgccttagacctgaatcctgagaggaccgagctgttgtcttgttccagggatgacctactcaaagttattgaccttagaactaacgccataaaacagactttcagtgctcctggttttaagtgcggcagcgactggacaagagtggtctttagtccagatggcagctatgtcgccgctggctccgcagagggctctctatatatctggagtgtactgaccgggaaggtcgaaaaggtgctgtccaagcagcatagttcttccattaacgccgtggcatggtcccccagcgggtcacacgtggtgagcgtggataaggggtgtaaggctgtgttgtgggctcaatattag

SEQ ID NO: 179664 - DNA, 1767 bp, synthetic construct
  misc_feature 1..1767: note = Description of Artificial Sequence: Synthetic coding sequence
  source 1..1767: mol_type = other DNA
atgagcagcggcctgcgggccgccgacttcccccggtggaagcggcatatctccgagcagctacgcaggagggatcgcctccaacggcaggcctttgaagagattattctgcagtataataagctcctggagaagagcgatctccacagcgtgttggcgcagaagctgcaggcagaaaagcatgacgtccccaatagacacgagatctcacccggccatgatgggacgtggaatgacaatcaacttcaagagatggctcaattgagaattaagcaccaggaggaacttactgaactacacaaaaaaaggggagaacttgcgcagctggtaattgatctcaataaccaaatgcagcgcaaggacagagagatgcagatgaatgaagccaaaatcgccgaatgtttgcagactatctctgatctagagacagaatgtctggacctcaggacaaaactgtgcgacctagaaagagctaaccagacccttaaagatgaatatgatgcgctgcaaataacatttactgcgctggagggtaagctgaggaagacgaccgaggagaatcaagagctggttaccagatggatggcagagaaggctcaggaggcgaatcggctgaatgcggagaacgagaaagacagtcgccgcagacaggctagactgcaaaaggagttagccgaggcagctaaagaaccccttccggtggaacaggacgatgacattgaggttatcgtggacgagacaagtgatcacaccgaagaaactagcccagtcagagctatttcaagggctgcaactcgcagatccgtgtcttcatttccagtacctcaggataatgtagatacccatccaggctccgggaaggaggtgagggtgcctgctaccgcactctgcgtgtttgatgcacacgatggcgaggttaacgccgtgcagttctcaccaggctctcgactcctcgcgaccgggggcatggatcgccgagtgaagctttgggaggtgttcggggagaagtgcgaattcaaaggcagcctctccggctctaatgctggtatcacatcaattgagttcgactctgcaggctcttatctgctcgccgcttcaaatgatttcgcctcaagaatatggacagttgacgattatcgactccgccacacgcttactggacatagcggtaaggttctcagcgcaaagttcctgttagacaacgcaaggattgtaagtgggtcacatgacagaacattaaagttgtgggatttgaggagcaaggtgtgcatcaagacggtcttcgcaggctccagctgcaatgatattgtttgtaccgagcagtgtgtgatgtccggccactttgacaaaaagatccggttctgggatatccggtctgagagtatagtgagggagatggagctgctcggcaaaattaccgctctcgatctgaaccccgagagaaccgagctcctcagttgtagcagggacgatctgcttaaagtgatagaccttagaaccaacgccatcaagcagaccttttctgcgcccggatttaagtgcgggagcgactggactcgtgtggtcttcagccctgatggctcctacgtggccgctggatccgccgaaggctccctgtacatctggagcgtattgactggtaaagtagagaaggtgctgagtaagcagcactcttcaagtatcaacgccgtggcttggagcccgagtggttctcatgtggtgagcgtcgataagggctgtaaggccgtgctttgggcacaatattag

SEQ ID NO: 179665 - DNA, 2520 bp, synthetic construct
  misc_feature 1..2520: note = Description of Artificial Sequence: Synthetic coding sequence
  source 1..2520: mol_type = other DNA
atggcccagttcgacaccgagtaccagcggctggaggccagctacagtgactcccctcccggcgaggaagatctacttgttcatgtggccgaaggctctaagtctccttggcaccacattgaaaatctagacctattttttagtagagtttataacctccatcagaaaaacggattcacgtgcatgctaataggcgagatttttgagcttatgcagttcctgttcgtggtggcgtttacaacatttctcgttagctgcgtggactatgacatccttttcgccaacaagatggtcaaccactcactccacccgaccgagccagtgaaagtcacccttcccgatgccttcctgcctgcgcaggtgtgttccgccaggatccaggagaacggttccctaatcaccatcctagtcattgccggcgtgttttggatccatcgcctgataaagtttatttacaacatatgttgttactgggagattcactcattttatctgcacgcattaagaattcctatgtcagctctcccctactgcacgtggcaggaggtacaggcccgcattgtgcagactcagaaggaacaccagatttgcattcataagcgggaactcactgagctagatatttaccatcgcattctgcgcttccaaaattacatggtggccctggtcaataaaagcctgctgcctctgagattccggttgccaggactgggggaggcagtattttttaccagaggactgaagtataacttcgaactcatattattctggggtcccggatccttgttcctgaatgaatggagtctgaaggcagaatataaaagaggtggacagagactggaactggcgcagcgacttagcaacagaatcctgtggataggcattgcgaacttcctcctctgccccctgatactgatttggcagattctttatgcttttttcagttacgcagaggtgctgaagcgagaacctggcgccttgggagccagatgctggtccctgtacgggcggtgttacttgaggcattttaacgaacttgaacatgaacttcaatctagactcaatcgcggttataaacctgcttcaaaatacatgaattgcttcctcagcccattacttacactgttggccaagaacggcgccttctttgctggctccatcctggctgttcttattgcactgactatttacgatgaggatgtcctcgctgtcgagcatgtcctcacaacagtgactttactgggcgtgacggtcaccgtctgtaggtcatttattcccgatcaacacatggtgttctgccctgagcagcttctgcgcgtcatccttgctcacattcattacatgccagatcattggcagggaaatgcccaccgctcgcaaactcgcgatgaattcgcccaactcttccagtacaaagcagtctttatactggaggagttattgtcaccgatcgtgactcctctgattctcatattctgtttacgcccacgggctcttgagattatcgattttttcagaaattttacagtcgaggtggtgggcgtcggcgatacttgttcattcgcacagatggacgtccgtcagcatgggcaccctcagtggctctccgccggacaaaccgaggctagtgtgtaccagcaagccgaggacggtaagactgagctgtctctcatgcattttgcaattacaaaccccgggtggcagcctccgcgtgagtcaactgcatttctgggctttttgaaagagcaggtccaaagggacggggccgccgcgagtttggctcagggggggttgctccctgagaatgccctgtttacatctattcagtctctccagagtgaatctgagccgctctccctgattgctaatgtggttgctggttccagctgccggggcccgccgttaccaagagatctccagggtagcagacaccgcgccgaagtcgcaagtgctcttaggtctttcagcccacttcagcccggccaggcacctacgggaagagctcacagcacaatgaccggcagcggggttgacgcccgcaccgcgagctcaggctcatccgtgtgggaaggacagttacaaagtctcgtcctgagcgaatacgcttcgactgagatgagtctgcacgccctgtatatgcaccaactacacaagcagcaagcgcaggccgaacccgagcgacatgtatggcatcggcgagaaagcgacgagtccggggaatcagcacctgacgaaggaggcgagggagcccgcgcgccccagagcatcccacggagcgccagctacccctgtgccgctccccggccaggcgcacccgagacaactgcactgcatggcggctttcagcgccgatacggagggattacagacccaggaactgtgcccagggtgcctagtcatttttcaaggctaccccttggtggttgggccgaagacgggcagagcgcctcccgccatcccgaacctgttcccgaggaggggagcgaagacgaacttccaccacaggtgcacaaggtgtag

SEQ ID NO: 179666 - DNA, 2520 bp, synthetic construct
  misc_feature 1..2520: note = Description of Artificial Sequence: Synthetic coding sequence
  source 1..2520: mol_type = other DNA
atggcccagttcgacaccgagtaccagcggctggaggccagctacagtgattccccaccgggggaggaggacttgctggttcatgtggcagaaggcagcaagtccccctggcaccatatcgaaaatttagaccttttttttagtagagtttacaatctccatcagaagaacgggttcacatgcatgctcatcggcgaaatctttgaactcatgcagtttctgttcgtagtcgctttcactacatttcttgttagctgtgttgactacgatattctgtttgctaataaaatggtcaaccactcactgcaccccactgagccagtgaaagtgacccttcctgatgcctttcttccagcgcaggtgtgttctgcacggatccaggagaatggatccctcattacgatcctggttattgccggtgtgttttggatccacaggctgataaagttcatctataacatctgctgttactgggagatccactctttttatctacacgccttgcgaatacccatgtccgcccttccctattgcacttggcaggaggttcaagcacgcattgtgcagacacagaaagaacaccaaatttgcattcataagagggagctcacagaactcgacatttaccatcggatcctgcgctttcaaaactatatggtagcgctcgtgaataagtctctgctgcccctgcgcttccgtcttcccgggctcggagaagctgtgttctttactcgtgggctgaaatataattttgaactcattctgttttgggggccaggatcactctttctgaatgagtggtccttgaaggcagagtataagcggggcggtcagcggctggagctggcgcagagactgtccaataggatactgtggattggaatagcgaatttcttgttgtgcccactgatcctgatatggcagattctgtacgcctttttttcgtacgctgaagtgctgaagagagaacctggggctcttggcgccaggtgctggtcactttacggccggtgttacctccggcacttcaacgagctagaacatgaattgcagtctcggctcaatcgcggctacaaacccgcctccaagtacatgaactgttttctaagccctctgctgaccctactggctaagaacggtgccttcttcgcggggtccatacttgctgtgctgatcgcactcacaatctacgatgaggacgtacttgcagtggaacatgtgctcactaccgtgaccctccttggtgtcacagtaacagtgtgtcggagctttattcctgaccagcacatggtgttctgccctgagcagctcctaagggtgatactcgctcacattcactatatgccagaccactggcagggaaacgcgcacagaagccagactcgggacgagtttgctcagctgtttcagtacaaagcggtattcatcttggaggaactcctatctcctatcgtgaccccactgatcctcattttttgcctgcgcccccgggctctagaaattattgatttcttccggaacttcactgtcgaggtggttggcgtaggggacacctgcagcttcgcccagatggatgtaagacagcatggacatcctcagtggctctctgccggtcagaccgaggcctcggtttatcagcaagctgaggatgggaaaactgaactttccctcatgcactttgcaatcaccaatcccggatggcagcctcctcgcgagtccaccgcttttctcggcttcctcaaggagcaggtgcagcgggatggcgctgccgccagcttggctcagggagggctgctgccagaaaatgctctgttcacctccatccagagcttacagagtgagagtgagccgttgtcattgatagctaacgtggtggcaggcagtagttgccgcggccccccgctacccagagaccttcagggatctagacacagggctgaggtcgcctccgcactgcgcagcttttcccccctgcaaccaggccaggcacctacaggtcgggcccacagtactatgacgggttcaggagtggacgccaggaccgcctctagcggcagcagtgtctgggagggacagctgcagtctttggttttatcagagtatgcctctacggagatgagtttgcacgctctttatatgcatcaattacacaagcaacaggcgcaggccgagcccgaaagacacgtgtggcataggcgggaaagcgacgaaagtggggagtccgcaccggatgaggggggggaaggggcaagagctccacagtctatccccagatcggccagctacccctgcgcagcacctaggcctggcgctcctgagacaactgcattgcacggcggtttccaacggcgctatggcggtatcactgatccgggcacagtgcctcgggtcccttctcacttctccagactgccactgggcggatgggccgaagatgggcagagcgcttcccggcatcccgaaccagttcccgaggaaggatcagaagacgagttgcctccccaggtccataaggtatag

SEQ ID NO: 179667 - DNA, 2337 bp, synthetic construct
  misc_feature 1..2337: note = Description of Artificial Sequence: Synthetic coding sequence
  source 1..2337: mol_type = other DNA
atgctgatcggcgagatcttcgagctgatgcagttcctgttcgtggttgccttcactacgtttctagtctcttgcgtcgattatgacatactgttcgccaataagatggtaaaccactcccttcacccaactgaaccggtgaaggtaaccttgcccgacgcattcctgcctgctcaggtctgctcagctagaatccaagaaaatgggagtttaatcacaattctggtcatagcgggcgtgttttggatccataggctcattaagtttatatacaatatttgctgttactgggagatccactccttctacttgcacgcgctcaggattccgatgtctgcgcttccctactgtacttggcaagaggtgcaggcccgcattgtgcagactcagaaggagcaccagatatgtatccacaaaagagagcttaccgagttagatatctaccatcgcatccttagatttcagaactatatggttgcgctggtaaacaagtctcttctgcccttgcgcttccgcctccctggactcggggaagctgtcttttttaccagagggctcaagtacaacttcgaactgatcctgttttggggccccggatcgctgttcctaaacgagtggagcctgaaagctgagtacaagcgaggaggccagaggttggaactggctcagcggctctccaatcggattctttggataggtatcgcaaacttcctcctgtgcccactgattctcatttggcagattttgtatgccttcttctcctacgctgaggtcctaaagcgcgaaccgggcgcgctcggcgccaggtgctggtccctatacggaaggtgctacctgagacattttaacgaactcgagcacgagctgcagagtcgcctgaatcgcggctataagcccgcgagcaagtacatgaactgtttcttaagccctctgctgactcttctcgctaaaaatggggcattcttcgccgggtcgattttggctgtgctgatcgcattaaccatttatgatgaggacgtcctggcagtggaacacgtgttaaccacagtaacccttttgggcgtcacggttacagtatgtcgaagtttcattcctgaccaacatatggtattctgccccgagcaacttctccgggtgattcttgcacacattcattatatgcccgaccactggcagggaaacgctcaccggtcacagactcgcgacgagtttgctcagctgtttcagtataaggccgttttcatcttagaagagctgttgtcacctattgtaaccccgctgatactgattttttgtctccgacctcgagccctggagataattgatttctttcgcaatttcactgtcgaagtagtcggcgtgggtgatacttgctctttcgctcagatggacgtcagacagcacggtcacccacagtggctatctgcaggtcagaccgaggcgtcagtatatcagcaagctgaagatggcaagacagaactttcgttaatgcatttcgcgattacgaaccccgggtggcagccccccagggaaagcacagcgtttctgggttttctgaaggaacaggttcagcgggatggcgctgcagccagcttggcacagggaggactgcttcctgagaacgcattgttcacttccatccagtcgttacagtcggaatcagagccattgtccctgattgccaatgtggtcgctggatcatcgtgtaggggccctcctctgccccgcgacctgcaggggagcagacatcgggcagaggtcgctagtgccttgagatccttttccccactccaacccggccaggcccccacgggccgggcgcacagtacgatgactggctctggggttgatgcccgcactgctagcagcgggtcttctgtctgggagggacagcttcagagcctagtactatctgagtatgcttcaacagagatgtccttgcatgccttatacatgcatcagcttcataagcaacaagcccaggccgagcctgagaggcacgtgtggcatagaagagagtcagatgaaagcggcgagtcagcccctgatgaagggggggagggcgccagggccccacagtccatccctcgcagcgcctcttatccatgcgctgcccctcgaccaggtgcaccagaaaccaccgctttacatgggggattccagagaagatacggtggtattactgatcctggcacagtgccaagagtgcccagccatttttcaagactgccactgggtgggtgggcagaggacggtcagagcgcaagtagacatccagaacccgtgcctgaggagggcagtgaagacgaactgcccccccaagtccataaagtatag

SEQ ID NO: 179668 - DNA, 2520 bp, synthetic construct
  misc_feature 1..2520: note = Description of Artificial Sequence: Synthetic coding sequence
  source 1..2520: mol_type = other DNA
atggcccagttcgacaccgagtaccagcggctggaggccagctactcagactctcctccaggcgaggaggacttgcttgtgcacgtagctgaaggctccaaaagcccctggcaccacatcgagaatttagacctgttcttctcacgggtttataacctgcatcagaaaaatggcttcacctgtatgctcatcggcgagatcttcgagctgatgcagtttctgtttgtggtggccttcacgacatttctcgtgtcctgcgtcgactacgatatcctgttcgccaacaaaatggttaaccacagtctgcacccaacagaacctgtcaaagtgaccctaccagatgcttttcttcctgcacaggtgtgttcggccaggatacaagagaatggttctctgataacaattctggttatcgccggagtgttctggatccacaggcttatcaagttcatctacaatatctgctgctactgggagatccattcattttacctccacgccctgcgcattccaatgtcagctctgccttattgcacatggcaggaagtgcaggcccggatcgtgcaaactcagaaggagcaccaaatctgcatacacaagcgagagctgacggaattagacatctaccaccggatcctgcggttccagaactacatggttgctttagtcaataagagtttgctaccactgcgtttccgactgcctggcctgggggaggctgtgttttttacacggggtctcaagtacaattttgaattaatacttttttggggacccggcagtctgtttctgaatgaatggagtctaaaggctgagtataaaaggggtggacagcggctcgaattggcccaacggttgtctaaccgcattctctggataggcatcgctaattttttgctctgtccactcattttgatttggcagattttgtacgcattcttcagctatgctgaagtcctgaagcgagaacccggggctttaggggctagatgctggtccctgtatggccgttgctatctccgccacttcaacgaactggagcacgagctccagagcagattgaatcggggctacaagcctgccagtaaatacatgaattgttttttatccccgctcctgacactgctcgcaaagaacggggcgtttttcgcaggatcaatcttagccgtactaattgccctgacaatctacgacgaggatgtgctggcagttgaacacgtgctgactactgtgacacttttgggagtcactgtgacagtatgccggtcctttattccggaccagcacatggtgttttgtcccgaacagctgctccgcgttatcctcgcgcatattcactacatgccagaccactggcaggggaatgcccaccgtagccagactcgcgatgagtttgctcaactcttccagtataaagccgtcttcatcctcgaggagttactctctcccattgttacacctctaatattaattttttgcctaaggcctcgcgccctagagataatcgatttttttcgcaatttcactgtcgaagtggtgggggtgggtgacacttgctcttttgctcaaatggatgtgcgacagcatggccacccacagtggctttccgcaggacagactgaagccagcgtctaccaacaggcagaggacgggaagaccgagctctcactgatgcactttgcaatcacaaatccgggatggcagccccctagagagtccactgcttttcttggctttttgaaagagcaagtgcaaagggatggcgccgcggcaagcctggctcagggcggtctgctccctgagaatgcactcttcacttccattcagagcctgcagtccgagagcgaaccccttagtttgatagcgaatgtagtcgcgggctctagttgccgcggtccacctctgccacgggacctgcaaggttcaaggcaccgcgccgaagtggcatctgcacttcgaagcttctcccccttgcagcccggccaagccccaaccggtcgcgcgcatagcacaatgaccggctcaggcgtcgatgctaggacagcgagctccggatcctctgtgtgggaaggacagttgcaatcgctggtgctgagcgaatacgcatctaccgagatgagcctccacgctctgtacatgcaccagctgcataaacagcaggcccaagctgagccggaacgccacgtctggcatcggagggagagcgatgagagtggcgaatccgcgcctgatgagggcggcgagggggcccgggcacctcagagcattccccggtccgctagctacccctgcgctgcaccaagacccggcgcccctgaaactactgccctgcacggggggtttcagcgaagatacggtggtattaccgatcccggcacggtgccaagggtcccaagtcacttctccagacttcccctcggcgggtgggctgaggacgggcagtctgctagtaggcatcctgaaccagtgcctgaggagggcagtgaggacgaattgcccccccaagtgcacaaggtgtag

SEQ ID NO: 179669 - DNA, 510 bp, synthetic construct
  misc_feature 1..510: note = Description of Artificial Sequence: Synthetic coding sequence
  source 1..510: mol_type = other DNA
atggcccagttcgacaccgagtaccagcggctggaggccagctacagcgattcaccccccggagaggaggatctgctagtccacgttgctgaaggctctaagtcaccctggcatcacatcgagaacctggaccttttcttttcccgagtgtacaaccttcaccagaaaaatggattcacatgtatgcttatcggcgagattttcgagctgatgcagtttttattcgttgtcgccttcactactttcctagtgagttgcgtcgactatgatattctcttcgcgaataaaatggtcaatcacagccttcacccaactgagccggtaaaagtgactctgcccgatgcatttcttcccgctcaggtgtgttctgctaggattcaggaaaacggaagtctgatcacaattctcgttatcgccggggtgttctggattcacaggctgattaagttcatctataatatttgttgttattgggaaatccactccttctatcttcacgcactcagatag

SEQ ID NO: 179670 - DNA, 435 bp, synthetic construct
  misc_feature 1..435: note = Description of Artificial Sequence: Synthetic coding sequence
  source 1..435: mol_type = other DNA
atggcccagttcgacaccgagtaccagcggctggaggccagctactcagattcccctcctggcgaggaagacctgctcgtgcacgtcgccgaagggagcaaaagtccatggcaccacatagaaaatctggacttgttcttctctagggtctacaacctgcaccagaagaacggattcacctgcatgcttattggcgaaattttcgagctaatgcagtttctcttcgtcgtggcatttaccactttcctggtgtcctgcgtcgattatgacatcttgtttgccaacaagatggtgaatcatagtctccaccctaccgagcccgttaaggtaaccctccctgacgcattcctgcctgcacaggtgtgcagtgctaggatccaggagaacgggagcctcatcacaattttagtgatagccggcgtgttttggatctag

SEQ ID NO: 179671 - DNA, 282 bp, synthetic construct
  misc_feature 1..282: note = Description of Artificial Sequence: Synthetic coding sequence
  source 1..282: mol_type = other DNA
atggcccagttcgacaccgagtaccagcggctggaggccagctacagcgactcccctcctggagaggaagatcttctcgtgcatgttgctgagggtagtaaatcaccatggcaccacatagaaaacctggatctgtttttctctagggtgtataatcttcaccaaaagaacggattcacctgtatgctcataggagaaatctttgaacttatgcaatttttgttcgtggtcgcattcacaacatttctggtctcgtgcgtggattacgacattctcttctag

SEQ ID NO: 179672 - DNA, 567 bp, synthetic construct
  misc_feature 1..567: note = Description of Artificial Sequence: Synthetic coding sequence
  source 1..567: mol_type = other DNA
atggcccagttcgacaccgagtaccagcggctggaggccagctacagcgatagtccgccaggcgaagaggatctgctcgttcacgtggccgagggtagtaagagcccgtggcatcacattgaaaatctcgatctgtttttctcgcgggtgtataacctgcatcagaaaaatggtttcacttgcatgcttattggcgaaatcttcgagttaatgcagtttctctttgtggtggcgtttacaacctttctggtgagttgtgtggactacgacattctgttcgccaacaaaatggtgaaccactcactccaccccacggagccggtgaaagtaaccctgccagatgcgtttctccccgcccaggtatgcagtgcccggatacaagaaaacggtagtctgataactattctggtgattgccggagttttctggattcaccggctcattaagtttatctacaacatctgttgttattgggaaatacatagcttctacctgcacgctctgagaatccccatgagcgctttgccctactgcacgtggcaggaagtgcaggcaaggattgtgtag

SEQ ID NO: 179673 - DNA, 396 bp, synthetic construct
  misc_feature 1..396: note = Description of Artificial Sequence: Synthetic coding sequence
  source 1..396: mol_type = other DNA
atggcccagttcgacaccgagtaccagcggctggaggccagctacagcgactcccctcccggtgaggaagacctcctggtgcatgtggcggagggcagtaagtctccttggcaccatatcgagaatctggacttattcttctctcgagtttacaatctccatcagaaaaacgggtttacctgcatgctgattggcgagatatttgaattgatgcagttcttgtttgtggtcgcattcacaacctttctggtatcgtgcgttgactatgacattttgtttgcaaataagatggtgaaccatagtctgcatccgaccgagccggtgaaagtcaccttgccggacgctttcctacctgcccaggtgtgcagcgcccggatacaggaaaacggatcctag

SEQ ID NO: 179674 - DNA, 294 bp, synthetic construct
  misc_feature 1..294: note = Description of Artificial Sequence: Synthetic coding sequence
  source 1..294: mol_type = other DNA
atggcccagttcgacaccgagtaccagcggctggaggccagctacagtgactctccccctggcgaagaggaccttctggtgcatgtcgccgagggctctaagagcccctggcatcacatcgagaacctggatttattcttcagccgcgtatacaacctgcaccagaaaaacggctttacttgtatgctcataggcgagatttttgaactgatgcagttcctgtttgtcgtcgctttcacaacattcctcgttagctgcgtcgactacgacatcttgttcgccaacaaaatgtag

SEQ ID NO: 179675 - DNA, 519 bp, synthetic construct
  misc_feature 1..519: note = Description of Artificial Sequence: Synthetic coding sequence
  source 1..519: mol_type = other DNA
atggcccagttcgacaccgagtaccagcggctggaggccagctactcagactcgccgccgggcgaagaggatctgctcgtacacgtcgctgaggggagcaaaagcccttggcatcacatagaaaatctcgatctgttcttcagccgggtgtataatctccaccagaagaatgggttcacatgcatgctcatcggggaaatttttgagctgatgcagtttttgttcgtcgtcgctttcaccaccttcctcgtgtcctgcgtcgattacgacatcctgttcgctaataagatggttaaccactccctgcaccccactgagcctgtgaaggtcaccttgccagacgcttttctgcccgcccaggtttgttcagcccgaatccaggaaaacggttccttgataacgatactggtgattgccggtgtcttctggattcaccgtctgattaagttcatttataacatatgctgctattgggagatccactctttctaccttcatgctctgagaattccgatgtag

SEQ ID NO: 179676 - DNA, 1662 bp, synthetic construct
  misc_feature 1..1662: note = Description of Artificial Sequence: Synthetic coding sequence
  source 1..1662: mol_type = other DNA
atggccaagaaccggcgggaccggaacagctggggcggcttcagcgaaaagacatacgagtggagctccgaagaggaagaacccgtaaaaaaagcaggccccgtccaggtgttgattgtcaaagacgatcactccttcgagcttgatgagaccgccttgaacagaatccttctgtctgaagcagtcagggacaaagaggtggtggcggtctcagtcgctggcgcttttagaaaagggaagagctttttgatggatttcatgctgcggtacatgtacaaccaggaatccgttgactgggtgggggattataacgagccactaacagggttctcctggaggggcggatctgaaagagaaaccacaggcattcaaatctggtccgagatttttctcataaacaaaccagatggaaaaaaagtggccgtgttgctgatggatacccaaggtactttcgacagccagtccacattgagggactctgcgaccgtcttcgcactttccaccatgatctctagcatccaggtgtataacctgtcgcagaacgtgcaggaggatgaccttcagcacctgcagttgtttaccgaatacgggcggctggctatggaggagacgttcctgaagcccttccagtcgctgatctttctcgtgagggattggagtttcccttacgaattttcttacggcgcagatgggggcgccaagttcctggagaagagactgaaggtctcggggaatcagcatgaagagcttcaaaacgtgcgaaagcacatccattcatgcttcaccaacatcagctgcttccttctgccgcaccccggattgaaagttgccaccaaccccaacttcgacgggaagcttaaagagattgatgatgagttcatcaagaacctgaagattctaataccctggctattaagcccggagagtctagacatcaaggaaatcaatgggaacaagattacgtgtcgaggactagtggagtactttaaagcgtatattaaaatctatcaaggagaagagcttcctcatccaaagtcaatgcttcaggcaactgcagaagctaataatttagcagccgtcgctactgccaaggatacctacaacaaaaagatggaggagatctgtgggggggacaagccttttcttgctcccaacgatctacaaacaaaacaccttcaactgaaggaagaatccgtcaaactcttccgcggcgtcaaaaagatgggcggcgaagaattttctcgccggtacttacagcagctggaaagcgaaatcgatgaactgtacattcagtacataaaacacaacgattccaagaatattttccacgccgctcggactcctgcaaccttgtttgtagtgatcttcatcacatacgtcatcgcaggcgtgactgggttcataggcctggacataatcgcatcactgtgcaatatgattatgggactcacgctgatcactctgtgtacgtgggcctacatcagatactcgggggaatatagagagctcggggccgttatagatcaggtagctgcggccctgtgggaccaggcattgtataaactctactccgccgcagccacacaccgccacctttaccaccaggcttttcccacccctaagtcggaaagtaccgaacaatccgaaaaaaagaagatgtag

SEQ ID NO: 179677 - DNA, 1677 bp, synthetic construct
  misc_feature 1..1677: note = Description of Artificial Sequence: Synthetic coding sequence
  source 1..1677: mol_type = other DNA
atggccaagaaccggcgggaccggaacagctggggcggcttcagcgagaaaacttacgaatggtctagcgaggaggaagaaccagtgaaaaaggccggccccgtccaggtcttgatcgtgaaggacgaccactctttcgagctggatgaaacagccctgaatcggatcctccttagtgaggccgtgcgtgacaaggaagtcgtagcagttagtgtggcaggggccttccgaaagggaaagagtttcctgatggacttcatgttacggtacatgtacaatcaggagtccgtcgactgggtgggtgattacaatgagcccctaacagggttttcttggaggggcggctccgaacgcgagaccaccgggattcaaatttggagcgagatcttcttgatcaataagcctgacggtaagaaagtggccgttcttctcatggacactcagggcacgttcgactctcagtcaaccctgcgggactccgctactgtgtttgcccttagcactatgatttcatccatccaagtttacaacctgagccagaatgtccaggaagatgacctgcagcatctgcaactgtttacagaatatgggcggttggcaatggaagagacctttctgaagccctttcagagcctcatatttctcgtcagggattggtccttcccgtacgagttcagctacggtgctgatggaggtgccaagttcctagaaaaacgactgaaggtatctgggaaccagcacgaggaactgcagaatgtgaggaaacacattcacagttgtttcaccaacatatcttgttttctgctccctcaccctgggctgaaggtggccaccaatcccaactttgatggtaagctgaaagaaattgatgatgagtttattaaaaacctgaagatcctgataccctggctgttaagtccagagtccctggatattaaagagataaatggcaacaagattacctgccgagggctagtggaatacttcaaggcttatattaaaatctatcagggagaggaactcccccatccgaagagtatgcttcaggctacagcagaggccaataatctagctgcagtggcgaccgccaaggacacctacaacaagaagatggaggaaatttgcggaggggacaaaccctttctggcaccaaacgatctgcaaaccaagcatcttcagctcaaagaggagtctgtgaaactgttccgcggtgtcaagaaaatgggcggagaggagttctctcgacggtatctgcaacagctggagagtgagattgatgagctctacattcagtacatcaagcacaatgacagcaaaaatatctttcacgccgctagaactcctgcgacgttgtttgttgtcatcttcatcacttatgtgatcgccggcgttacaggattcataggtctggatattatcgcatcactgtgtaacatgataatgggccttaccctgatcactctctgcacctgggcttatattcgctattctggggaatatcgagagttgggggccgtgattgaccaggtggcagccgccttgtgggatcagggaccaagtcatcaggccctgtataagctctactccgccgcagccacccatcgccatctgtatcaccaagctttccccacgcccaagtctgaatccaccgaacagagcgagaagaagaagatgtag

SEQ ID NO: 179678 - DNA, 1677 bp, synthetic construct
  misc_feature 1..1677: note = Description of Artificial Sequence: Synthetic coding sequence
  source 1..1677: mol_type = other DNA
atggccaagaaccggcgggaccggaacagctggggcggcttcagcgagaaaacctatgaatggtcaagtgaagaggaggaacccgttaaaaaagccggccctgttcaagtcctgatcgtcaaggacgatcattcttttgagctggatgagaccgcactcaatcgcatcctgctttccgaagcagtgcgcgataaggaagtcgtcgctgtgagcgtggctggtgcgttccgaaaggggaagagttttcttatggatttcatgctgagatatatgtacaatcaagagagcgtggactgggtgggggattacaatgagcccctgaccggattctcctggagaggtggatccgagagggagactacagggatccagatttggagcgaaattttccttatcaacaagccagatgggaaaaaagtggcagtgctgctaatggacacacagggaacttttgattctcaaagcactctgcgggattccgccactgtctttgcactgtcgactatgatcagctccattcaagtgtataacttgagccagaacgtccaagaggatgacttgcagcatcttcagctcttcacagaatacggaagactggccatggaggaaaccttcctgaagccgtttcaaagcctgatatttctcgtgcgggactggtccttcccatacgagttcagctatggcgccgatggaggtgcaaagtttctggagaagcgcctgaaagtttcgggcaaccaacacgaggaactacaaaacgtgagaaagcacatccactcttgtttcaccaatatctcgtgttttttgctgccacacccaggcctgaaagtggctacaaatcccaactttgacgggaagctcaaggaaatcgatgatgagtttattaagaatctaaaaattctgatcccatggctcctatcccccgaaagcctagacattaaggagattaatggaaacaagattacttgtagagggcttgtggagtactttaaagcttacatcaagatctaccagggagaggaattgccccatcccaaatcaatgctgcaggccacagctgaagctaacaatctggccgccgtcgccacggcaaaagacacctacaacaagaaaatggaggaaatctgcggtggagacaagcccttccttgcaccgaacgatttgcagaccaaacacctgcagctgaaggaagaaagcgttaaactctttcgtggcgtaaagaagatgggcggcgaggagttctcacgaaggtacctgcagcagttagaaagcgaaattgacgagttgtacatccagtatatcaaacataacgacagcaagaacatctttcacgcggcgcggacaccagccacattattcgtggtcatttttatcacttacgtgattgcaggggtgacgggatttatcggtctagatatcattgcttccctttgcaacatgatcatgggcctgaccttaatcaccctgtgtacatgggcttacattcgctacagtggtgaatatcgggagctgggcgcagtaatcgaccaggtggctgccgccctctgggatcagggttccacgaatgaagcattgtacaagctttacagtgctgccgcgacccaccgccacctttaccatcaggccttccccacccccaagtcagaatccacagagcagtctgaaaaaaagaagatgtag

SEQ ID NO: 179679 - DNA, 1662 bp, synthetic construct
  misc_feature 1..1662: note = Description of Artificial Sequence: Synthetic coding sequence
  source 1..1662: mol_type = other DNA
atggccaagaaccggcgggaccggaacagctggggcggcttcagcgaaaaaacctacgagtggagctctgaggaggaggagcccgttaaaaaggcgggcccagtgcaggtgctgattgtgaaagatgatcacagcttcgagctggacgagaccgccctgaatcgcatcctactgtctgaagcagtgagagataaggaggttgttgcggtgagtgtggccggggcatttaggaaggggaagtcgtttttgatggatttcatgctgaggtatatgtataaccaagaatcagtagactgggtaggcgattataacgaacctctcaccggattcagctggagaggaggaagtgaacgagagaccacaggaattcagatatggagcgaaatattcctgattaataaacctgatggcaagaaagttgcagtgctcctaatggacacccagggcacatttgattcccagtctactcttcgcgactccgccactgtgtttgcactatcgactatgatcagtagtatacaggtttataacctctcccagaacgtgcaggaagatgatcttcagcacctgcagctgtttactgaatacgggcgactggcaatggaagaaacctttctgaaaccctttcagagtttgattttcctcgtgcgggactggagctttccatacgagttcagctatggcgccgatgggggggccaagtttcttgagaagcgcctcaaggtctccggaaatcagcatgaagagctacagaacgtgcgtaagcatatccacagttgttttacgaacataagctgtttcctgttgccccacccgggcctgaaggttgcaactaacccaaattttgatggcaaacttaaggaaatagacgacgaattcatcaaaaaccttaagatccttattccttggctattatcacccgaaagtttagatattaaggagattaacgggaacaagataacctgtagaggcctggtcgagtattttaaagcctatatcaagatttatcagggggaagaactgccccatcccaagagtatgctacaagcgacagccgaggcaaacaacctagctgccgtggcaacagcgaaagacacctataacaagaaaatggaggagatttgcggcggtgataagccattccttgcccctaatgacctccagacgaaacacttgcagttgaaagaggagtcagtaaagttgttccgcggggtgaagaaaatgggtggtgaagaatttagtagacggtacctacagcagctggaaagcgagatcgatgaactttacatacaatacattaaacacaacgatagcaagaacatatttcatgccgccagaacacctgccaccctgttcgtggtgatcttcatcacgtacgtcatagctggggtcaccgggttcatcggcctggacatcattgcctccctgtgcaacatgattatgggactaacgctgattacactgtgcacatgggcatatattaggtattcaggcgagtaccgcgaactgggggccgtcatagaccaggtagctgcagccttgtgggaccaggccctgtacaagctatacagcgcagcagccacacaccggcatctgtaccaccaggcctttcccactcctaaaagcgagagcaccgaacagtcagagaagaagaagatgtag

SEQ ID NO: 179680 - DNA, 90 bp, synthetic construct
  misc_feature 1..90: note = Description of Artificial Sequence: Synthetic coding sequence
  source 1..90: mol_type = other DNA
atggccaagaaccggcgggaccggaacagctggggcggcttcagcgaaaagacctacgaatggtcctcagaggaagaggaaccggtgtag

SEQ ID NO: 179681 - DNA, 303 bp, synthetic construct
  misc_feature 1..303: note = Description of Artificial Sequence: Synthetic coding sequence
  source 1..303: mol_type = other DNA
atggccaagaaccggcgggaccggaacagctggggcggcttcagcgagaaaacctacgaatggtcatctgaggaagaagaaccagtgaagaaggctggacctgtccaggttctgatagtcaaggacgaccacagctttgagctcgatgaaaccgcacttaaccgtattctcctgtctgaggccgtgcgcgacaaggaagtggtggcagtgtccgttgctggagctttccggaagggcaagtcgttcttgatggacttcatgcttcggtacatgtacaaccaggagtccgtggattgggtatag

SEQ ID NO: 179682 - DNA, 1701 bp, synthetic construct
  misc_feature 1..1701: note = Description of Artificial Sequence: Synthetic coding sequence
  source 1..1701: mol_type = other DNA
atggtgctgaagaagggcatcaagttcttccagcggctgatcaactctaaatccctgaggtttggtgaaaattatgaggacgacgacctggtgaattccgacgaggtgatgaagaagccgtgcccggtacagatcgtgcttgcccacgaagatgatcacaatttcgagctggatgaagaagccttagaacagattttactccaggaacacatcagagatcttaacattgtagtggtgtccgtagcaggcgcatttcggaagggtaaatcctttctcctcgatttcatgctccgttatatgtacaataaggacagccagtcctggattgggggcaacaatgaacccctgaccgggttcacatggcgcgggggatgtgagagagagacgacaggcattcaagtatggaatgaagtgttcgtgatcgatcgtccaaacgggactaaagttgcggtactgcttatggacacccagggcgcctttgattcacagtcgaccatcaaagattgtgctacggtgttcgcgctaagcactatgacctctagcgtccaggtatacaatcttagtcagaacattcaagaggacgatttacagcacctccaactgtttaccgagtacggtcggctggcaatggaagagatttatcaaaaaccgtttcaaacacttatgttcctgattcgggattggtcttatccgtatgagcactcgtatggactggagggcggcaaacagttcctcgagaaaagactgcaagtgaagcagaaccaacacgaggagttacagaatgtgcgcaagcacatacacaactgtttctccaatttgggatgctttcttctgcctcaccccggcctgaaggtagctactaatccctccttcgatgggagattgaaagacatcgacgaggactttaagcgagaacttaggaatttagttcccctgctcctggcacccgaaaacctggtcgaaaaagagatctccggaagcaaggtgacctgtagagacttagtggagtacttcaaagcatacataaaaatctaccagggagaagaactgcctcatccgaaatcgatgctgcaggccacggccgaagccaataatttggcagccgtggcaggagcccgagacacctactgcaaaagcatggagcaagtgtgcggtggagataagccttacatcgccccctcggacctggaacgcaaacacctcgatctaaaggaagtcgcaatcaaacagttcaggtcagtgaagaagatgggtggcgatgagttctgccggcgctatcaagatcagctggaagccgaaatagaagaaacctacgccaatttcatcaagcataatgacggtaaaaacatcttttacgctgccagaactcctgcgactctgtttgcagtgatgttcgctatgtatatcatctccgggctgacaggtttcataggcttaaattcaatcgcagtcctatgcaatctcgttatgggcctcgctctgatttttttgtgcacctgggcctacgtcaagtactcaggtgaatttcgggaaatcggtactgtcatcgatcagattgcagagacgttgtgggagcagcggagtcctaggaaagttttcagcaagcttttcgaggtcacccggagaaggatggttcacagggccttaagttctgcacagagacagaggctgtcaagtaacaataacaagaaaaagaattag

SEQ ID NO: 179683 - DNA, 1752 bp, synthetic construct
  misc_feature 1..1752: note = Description of Artificial Sequence: Synthetic coding sequence
  source 1..1752: mol_type = other DNA
atggccgagggcgacgaggccgcccggggccagcagccccaccagggactgtggagacgtagacgaaccagcgacccttccgccgcagtgaatcatgtgagtagcactacatccttaggcgagaactatgaggacgatgatctggtaaattccgatgaagtcatgaagaaaccctgtcccgtccagattgttctggctcacgaggatgatcataattttgagctggatgaggaagccctggaacagatcctgttgcaggaacacatcagggacctcaatatcgttgtggtctctgttgctggcgccttcagaaaaggcaagtccttcctgcttgatttcatgctgaggtacatgtataataaagattcccagtcttggatcggaggcaacaacgagcccctcacaggattcacctggcgcggtggatgcgagcgcgagactaccggtatccaggtatggaatgaagtgtttgtgatcgacagacccaacggtacaaaggtggccgtgctgctgatggacacacagggtgcgtttgattcccagagtacgattaaagactgtgccacagttttcgcccttagtaccatgaccagttccgtgcaggtgtataacctgagccagaatattcaagaagatgacctacaacatctgcaactattcactgagtacggcaggctggctatggaggagatttatcaaaagccctttcagacactaatgtttttgattcgtgattggtcatatccctatgagcacagctacggcctggagggagggaaacagttcctggaaaaacgtctccaggtcaaacagaatcaacacgaagagttgcagaatgttaggaagcatattcacaactgtttttccaatttagggtgttttctcctgccccacccaggcctgaaagtagccaccaaccccagtttcgacggtcggctgaaagacatcgatgaggactttaaaagagagcttaggaatctagttccgctgctactcgctcctgaaaatctcgtagagaaagagatcagcgggtcgaaggtgacctgcagggacctggtggagtacttcaaggcatatattaagatatatcagggtgaagaactcccacacccgaaatccatgctgcaggcaaccgctgaggccaacaatctagcagccgtggcgggagctcgggacacatactgcaagagtatggaacaggtgtgcggcggcgacaagccttacatcgctccctccgacctggagaggaagcacctagacctcaaggaggttgctattaaacagttcaggtccgtgaagaaaatggggggcgatgagttctgcaggcggtatcaagatcagttggaggcagagatcgaggagacatatgccaatttcatcaaacacaatgacggtaagaatatcttctacgcagctagaacacccgccactctgttcgccgtgatgttcgccatgtatattatctctggtctgactggctttattgggttgaatagtatagccgtcctgtgtaacctagtaatgggattggctctaatatttctgtgtacatgggcatatgtgaaatacagtggggaatttcgagagattggaacagtgatcgaccagatcgccgaaacactctgggaacaagtgctgaaaccactcggtgacaatctgatggaggagaacatccgacagtctgtcactaactctataaaggcagggctgactgatcaggtgagccatcacgctcgccttaaaacagactag

SEQ ID NO: 179684 - DNA, 1239 bp, synthetic construct
  misc_feature 1..1239: note = Description of Artificial Sequence: Synthetic coding sequence
  source 1..1239: mol_type = other DNA
atggacacccagggcgccttcgacagccagagcaccatcaaggactgtgccacggtcttcgctctgtctactatgacctcctctgtccaggtgtacaatctctcacaaaacatccaggaagatgatcttcagcacctgcagctctttacagaatatggtcgcctggccatggaggaaatttatcagaagccattccagactttaatgttcttaataagagattggtcgtacccctacgagcacagctacggactcgagggcggcaagcaattcctcgagaagcgcttgcaggttaagcagaaccaacatgaagaacttcagaacgtgcggaaacatattcacaattgcttctccaatctcggctgcttcctccttccccatccaggtctgaaggtcgcgacaaatccttcgttcgacggcagactcaaagatattgatgaggactttaagagggaacttcgcaatctggtgccattgttgcttgcccccgagaatctggtagaaaaggaaatatccgggtctaaagtgacatgcagagacctcgtggagtactttaaggcctatattaaaatctaccaaggagaagaattgccccaccccaagtctatgctgcaggccaccgccgaggccaacaatctcgcagctgtcgcaggcgcccgagacacctattgtaaatccatggaacaagtctgtgggggggacaagccttacatagccccctccgatctcgaacgtaagcatctggatctcaaggaggtggctatcaagcagttccgctctgttaagaagatggggggtgatgagttttgccgtagatatcaggatcagctagaagccgagatcgaagagacttatgcaaatttcattaaacacaacgacggcaagaacatcttctatgccgcaaggaccccagccacactgttcgcagtcatgtttgcgatgtatataatctccggcctcactggcttcataggcctgaattctattgccgtactgtgtaacctggtgatgggtctcgctctgatttttctatgcacctgggcctatgtcaaatatagcggggaatttagggagatagggacagtgatcgaccagatcgcggaaactctgtgggagcaagtgctgaaacctttgggcgacaacctgatggaggagaacattagacagagtgtgacaaattctatcaaggcaggtctgaccgaccaagtctcacaccacgcaaggctcaaaaccgactag

SEQ ID NO: 179685 - DNA, 1740 bp, synthetic construct
  misc_feature 1..1740: note = Description of Artificial Sequence: Synthetic coding sequence
  source 1..1740: mol_type = other DNA
atggccgagggcgacgaggccgcccggggccagcagccccaccagggactctggcgccgtcggcggacatccgaccctagcgctgcagtaaaccatgtctcatcaacaaccagcctaggtgagaattacgaagacgatgacctggttaactccgatgaggtcatgaaaaagccttgcccagtgcagatcgtgctggcacacgaggatgatcacaatttcgaattagacgaagaagcgttggaacaaattctcctgcaggaacatatcagagatctgaacatcgtggtcgtgtctgtcgctggggccttccggaagggaaaatcatttttgttagattttatgctccgctatatgtataataaggattctcagagttggattggtggcaataacgaaccactgacaggatttacttggcggggcggttgcgaaagagagactactggaatccaggtctggaatgaagtgtttgtgattgaccgtccgaacgggacaaaggtcgcagtgttattaatggacacccaaggagcgttcgattctcagagcacaatcaaagactgtgcaaccgtgttcgccttgtccactatgacaagtagtgttcaggtgtataacctaagtcaaaacattcaagaagatgatctccagcatctgcagctgttcaccgaatacggtcggcttgcaatggaagaaatttaccagaaaccttttcaaaccttgatgttcctcatccgggactggtcatacccgtacgaacattcttacgggctcgagggcggcaagcagttcctagagaaacgattacaggtgaagcagaatcaacatgaagaactgcagaacgtccggaagcacatccacaattgttttagtaatctcggctgtttccttctgccacaccctgggctgaaggtggcaacaaatccttcatttgacggacgtctgaaagatatcgacgaagacttcaagagagaacttcgcaatttggtgccattgctgcttgcaccagagaatctcgtggagaaggaaatctctgggagcaaggtcacttgtcgcgacctggtggagtatttcaaggcctatatcaagatataccagggggaggagctgccacaccctaagagtatgcttcaggccactgctgaggcaaataacttggcagcagttgctggcgcaagagacacctattgcaagagcatggagcaagtgtgcggaggagacaagccttacatcgcccccagtgacctggaacgcaagcatctggatttaaaggaggtagctatcaagcagtttcgcagcgtgaagaaaatggggggggatgagttttgccgccgctatcaggatcagttggaagcggaaatcgaggaaacatacgccaacttcataaagcataatgacggaaaaaatattttctatgctgccaggacacccgctaccttgtttgctgttatgtttgccatgtacattatttccgggctgactggctttatcggcttgaactctattgccgtcctgtgcaacttggtcatgggactggctctgattttcctgtgcacctgggcctacgtgaagtactccggggagttcagagagatcgggactgtgatcgaccagattgcagagaccctgtgggagcaagtgttctccaaattgtttgaggtgactaggcggcgtatggtgcaccgagccctttcgtcggctcaaagacagcgcctgtcctcgaataataacaagaaaaagaattag

SEQ ID NO: 179686 - DNA, 1239 bp, synthetic construct
  misc_feature 1..1239: note = Description of Artificial Sequence: Synthetic coding sequence
  source 1..1239: mol_type = other DNA
atggacacccagggcgccttcgacagccagagcaccatcaaggactgtgctaccgttttcgccctctccacaatgacatcctcagtccaggtgtacaatctgtcacagaacattcaggaagacgaccttcagcatctccaacttttcactgagtacggaaggctcgccatggaagagatatatcaaaaaccgttccagactctcatgtttctgatccgggattggagctatccgtatgagcactcttatggtctggagggaggtaaacagtttcttgagaagcgtctccaggtcaaacagaatcagcatgaagagctccaaaatgtccgcaagcacattcacaactgctttagcaatctggggtgtttcctgttgccccatcctgggttgaaggtggccacaaatcccagtttcgacgggagactcaaggacatcgacgaggacttcaaacgagaacttaggaacttagtcccccttttactggcgccagagaacctggtcgagaaagagatctccggaagtaaggttacttgccgcgacctcgtggaatacttcaaggcttacattaagatctatcagggggaagagctgccccaccctaaaagcatgctccaggccactgcggaggccaacaacctggccgccgtcgccggcgcgagagacacttattgcaagtctatggagcaggtctgcggaggcgacaagccgtatatcgcgccttcagatttggaacgcaagcatttggacctgaaggaagtagccatcaagcagttccgcagtgttaaaaagatggggggggacgaattctgtaggcgctaccaagatcaattggaggccgaaattgaggagacttacgcaaattttatcaaacacaatgatggcaaaaacatattctacgccgcaagaacacccgccacactctttgccgtcatgtttgctatgtatatcatcagtggcctgacaggatttattggtttgaattctatcgcggtgttatgtaacttagtgatggggctggccttaatctttctgtgcacctgggcctacgtcaagtactcaggagaattccgtgagattgggacagtcattgatcagatcgctgaaaccctgtgggaacaggtgcttaagccgctcggtgataacttgatggaggagaatatcagacaatccgtgaccaattccattaaagcagggcttaccgatcaggtctctcatcatgctcgtctgaagacagattag

SEQ ID NO: 179687 - DNA, 1242 bp, synthetic construct
  misc_feature 1..1242: note = Description of Artificial Sequence: Synthetic coding sequence
  source 1..1242: mol_type = other DNA
atggacacccagggcgccttcgacagccagagcaccatcaaggactgcgccaccgttttcgcgctatccaccatgaccagcagtgtgcaggtatacaacctgtcccaaaatattcaggaggatgatcttcagcaccttcagttgttcactgaatatggaaggttggccatggaggagatctatcaaaagccgtttcaaaccctgatgttcttaatcagggattggagttacccttacgagcattcttatggccttgaggggggcaagcagtttctggagaagcgcctgcaggtgaaacagaaccagcacgaagagctgcaaaacgtacgtaagcatattcataattgtttttccaacctcggctgcttcctgctcccccacccaggcctgaaggtggccaccaatccgagttttgacggcagactgaaggacattgacgaagactttaagcgcgagctgagaaacctggtccctctgctactggcccccgaaaatctggtcgaaaaggagattagcgggtccaaggtcacctgcagagatttggtcgagtattttaaggcgtatattaagatctatcagggagaggaacttccgcatcctaaaagtatgctgcaggccacagccgaagcaaacaacctggccgccgtcgctggcgcccgcgatacatattgcaaatcgatggagcaggtgtgtggcggcgataaaccatatatcgcaccctctgacctggaacgcaagcatctggatttaaaagaagttgctatcaagcagttccgaagtgtgaagaaaatggggggcgatgagttctgtcgtagataccaggaccagctggaagctgagatagaggagacatacgccaactttattaagcataacgacggcaaaaacatcttctacgccgcgagaacgccagcaactctgttcgctgtgatgtttgccatgtatattattagcggcttgacaggatttattgggttaaatagtattgctgttctgtgtaatctggtgatgggcctcgcgctgatcttcttgtgcacttgggcctacgtgaaatatagcggcgagttcagagaaatcggaacggtaatagatcagattgctgaaaccctttgggagcagagatctccgaggaaagtcttcagtaaactgttcgaggtgactaggcgaagaatggtgcacagggcactgagctccgcccagcggcagagactgagtagtaataacaataagaagaagaattag

SEQ ID NO: 179688 - DNA, 1707 bp, synthetic construct
  misc_feature 1..1707: note = Description of Artificial Sequence: Synthetic coding sequence
  source 1..1707: mol_type = other DNA
atgcggaccgccggccgggaccccgtgagcgccggcctgcagttccctaaagatggctccacccagcgccctgcaaatcgtgcccgattcgtacccgcacgcactaggccatcccctcttcacccttgctgtttttgcttcgagggggggggctctatgttatcccctcaacgggttgctgccgctgcttcacgaggtgctgatgatgcaatggagtcttccaatattctgctacaggatcatatcagagatcttgatgtcgtcgtggtgagcgttgccggggcatttcggaaaggtaaaagcttcattctggactttatgctcagatacctctacagtcagaaagagtctggacacagcaactggctgggggaccccgaggagcccctcacgggcttcagctggcgaggcggcagtgaccccgaaacgaccgggatccagatctggtctgaagtgtttaccgtcgaaaaaccagggggaaaaaaggtggcagtggtactgatggatacccaaggcgctttcgactcgcagagcactgtcaaggactgcgccaccatttttgccttgtccaccatgacgtcttccgtgcagatctacaacctgagccaaaacatacaggaggacgatctgcaacaactgcagctgttcacagaatacggtaggttagctatggacgagattttccagaagccttttcagacactcatgtttctggtgagggactggtcgttcccctacgagtacagctatggccttcaggggggcatggccttcttggacaaacgcctgcaggtgaaagaacaccagcatgaagaaatacagaacgtcaggaaccacatccattcatgcttttctgacgttacatgctttctgctaccccaccctggcctgcaagtggcaacatcaccagattttgacgggaaacttaaggatatcgccggcgagtttaaggagcagctgcaggccttgatcccttatgtgctgaacccgtccaaactcatggaaaaggagattaacggcagcaaggttacatgtcgcggtttgcttgaatactttaaggcttatatcaaaatctaccagggcgaggaccttccccacccaaaatcaatgctccaggctaccgcagaagccaataatcttgctgcggctgcaagcgccaaggacatctattataacaatatggaagaggtttgcggtggggagaagccatatttgtcgcccgacattctcgaggaaaaacattgcgagtttaaacagcttgcacttgaccactttaaaaagactaagaagatgggcggaaaggacttcagctttcgctaccaacaggaactggaggaggaaataaaagaactgtatgagaacttctgtaaacataacggaagcaagaatgtgttcagcacgtttagaactcccgccgtgttattcaccgggattgttgccctttacattgcgtcaggtctcacgggcttcattggactggaagttgtggcacagttgttcaactgcatggttgggctgcttctcatagccctgctgacgtgggggtacattaggtacagtggtcaatatcgagagctcggcggagctattgacttcggggctgcatacgtgctggaacaggcctcaagccatatcggaaactcgacacaggctactgtgagagacgcagttgtcggcagaccgagtatggacaagaaagcccaatag

SEQ ID NO: 179689 - DNA, 1626 bp, synthetic construct
  misc_feature 1..1626: note = Description of Artificial Sequence: Synthetic coding sequence
  source 1..1626: mol_type = other DNA
atgctgagcccccagcgggtggccgccgccgccagccggggcgccgatgatgccatggagagctccaaacccgggcccgtgcaggttgtgctggtacagaaagatcagcactctttcgaactggatgagaaagctctcgcttctatactgctacaagatcatatccgcgacttggacgtggttgtggtgagtgtggcgggggcctttcgcaaaggtaaatcgttcattttggacttcatgctgcgctatttatactctcagaaagaatctgggcatagtaactggctaggagaccccgaggaaccacttactgggttcagttggcgaggaggtagcgacccagaaaccaccgggatacagatctggagcgaggttttcaccgtggagaaaccaggagggaagaaagtggcggtggtcctgatggacactcagggcgcttttgattctcagagcacagtcaaagattgtgcaacgatatttgcccttagcacgatgaccagttccgttcagatttacaatttgtcacagaatatccaggaagacgaccttcagcagttacagctgttcactgagtacggaagactcgctatggacgaaatcttccagaagcccttccaaacactgatgtttttagttcgggactggtctttcccctacgagtacagttacggtctgcaaggtggaatggctttcttggacaagcggttacaggttaaagagcatcagcacgaagagatacagaatgtgaggaatcacattcatagctgtttcagcgatgtcacatgctttctgctgcctcaccccggtctgcaggtcgctacttcccccgacttcgacggcaaactcaaggacatcgcaggggaattcaaggaacagctgcaggcgctgattccttatgtgctgaatccgtctaaattgatggaaaaagaaatcaatggaagtaaggtgacatgtcgcgggctcttagagtactttaaagcatatattaagatttatcagggcgaggatctgcctcaccccaaaagcatgctccaggccacagctgaggccaataatttagccgctgctgcatccgccaaggacatttattacaataacatggaggaggtgtgcggcggcgagaagccttatctgagccctgatatcctggaagagaagcactgcgaattcaaacaactcgccttagaccattttaagaagaccaagaagatgggaggaaaagatttctcattcagatatcagcaggaactggaagaagaaatcaaagaattatacgagaatttctgtaagcataacgggtctaaaaatgtcttttccacttttaggacacctgccgtgttgttcacaggcatagtagccctgtacatcgcgtccggcctgaccgggttcataggactggaggtcgttgcacagctgtttaactgtatggttgggcttctgctaatcgccctgctcacttgggggtatatacggtattccggccaatatagagaactgggcggagctatagacttcggcgccgcgtacgtgttagagcaagcttcatcacacatcggaaatagcacccaggcgacggtaagggacgcagtcgttggcaggccttctatggacaagaaagcccagtag

SEQ ID NO: 179690 - DNA, 1065 bp, synthetic construct
  misc_feature 1..1065: note = Description of Artificial Sequence: Synthetic coding sequence
  source 1..1065: mol_type = other DNA
atgagccggctgctgcacgccgaggagtgggccgaggtgaaggagctgggcgaccaccatcggcagccacagcctcatcacttgccacagccacccccccctcctcagcccccagctaccctacaggcaagggaacaccccgtttacccccccgaactttctctcctggacagcacagatccgagggcatggctcgcccctactcttcagggaatatgtacggcacgggcggcccagtatctcctccacagtcctgaactaggcgcttcagaggccgccgctcctagggacgaagtcgacggccgtggagagctggtaagacgcagcagtgggggcgctagttcctccaagagccctgggcctgttaaggttagagagcagctgtgcaagctaaaaggcggcgtggtcgttgacgagctgggttgttctagacagagagctccctcaagcaaacaagtcaacggcgtgcaaaagcagcgacggctcgccgccaacgctcgtgagagacgacgcatgcacggactgaaccatgctttcgaccaactgcgtaacgtaatcccatcttttaacaatgacaaaaagctatcgaaatatgagaccttacagatggcacagatctatattaacgcactgagcgagctcctccaaaccccatcggggggcgaacagcccccccctccacctgcttcttgtaaatcagatcatcaccacctccggactgctgcttcctacgagggcggggctgggaatgctaccgctgccggagctcaacaggcatccggcgggtctcaacgtccaactccacctggctcctgtagaaccagattctcagcacctgccagtgcaggtggctacagcgtccagttggacgccctgcacttctccactttcgaggattccgcacttacagcgatgatggctcagaaaaatctgtccccttctctgccaggtagtatattacagcctgtgcaggaagagaattcaaagacatccccaagaagccaccggtccgatggcgaattttccccccactcacactactctgactcagacgaggcatcctag

SEQ ID NO: 179691 - DNA, 459 bp, synthetic construct
  misc_feature 1..459: note = Description of Artificial Sequence: Synthetic coding sequence
  source 1..459: mol_type = other DNA
atgaagagctgcaagcccagcggcccccccgccggcgcccgggtggcccctccctgcgccgggggtactgagtgtgccggtacctgtgccggagccggacgcctggagagtgccgcacgccgcaggctggccgccaatgccagggagaggagaagaatgcaaggcttgaacacagcctttgacagactgagaagagtggtgccgcagtggggacaggacaagaaactttcaaaatatgagacattgcagatggccttaagctatatcatggcactaacgcgcatcctggccgaggctgagaggtttggatcagaacgtgattgggtgggcctgcattgcgagcatttcggacgggatcactatctcccattccccggggctaagttaccaggggagagcgagttgtattcccagagactgtttgggtttcagcctgaacctttccagatggccacctag

SEQ ID NO: 179692 - DNA, 627 bp, synthetic construct
  misc_feature 1..627: note = Description of Artificial Sequence: Synthetic coding sequence
  source 1..627: mol_type = other DNA
atgtggcggagctgcctgcggctgcgggacggcggccggcggctgctgaatcgtcccgctggcggcccctctgcaagtatgagtcccggcccgacgattccttctccagcccgtgcctacgctccacccaccgaacgcaaacgtttttatcagaatgtgagtattactcagggggagggtgggtttgaaataaatctggaccatcgaaagctgaagacccctcaagctaaactgtttaccgtcccaagcgaggccctggctatcgccgtcgcgaccgaatgggattcccagcaggacacaatcaaatactacaccatgcacttgacaactctgtgtaatacaagtcttgacaaccctacccagagaaacaaggatcagctgattcgcgcggccgtgaagttcctagacactgacacaatctgctatcgagtggaagaaccggagactctcgtcgagttacagagaaacgagtgggatcccattatagagtgggcagagaagcggtatggggtggaaataagttcttccacctcaattatggggccatccatccctgccaaaaccagggaagtgttggtctctcatctcgccagttataatacgtgggccttgcagggcatggattag

SEQ ID NO: 179693 - DNA, 618 bp, synthetic construct
  misc_feature 1..618: note = Description of Artificial Sequence: Synthetic coding sequence
  source 1..618: mol_type = other DNA
atgtggcggagctgcctgcggctgcgggacggcggccggcggctgttaaaccggcccgccggcggaccctcagcaagtatgtcccccggacccacgatcccatcccctgcacgcgcttacgccccacctacagaaaggaagaggttttaccagaacgtgagtatcacacagggcgaaggaggcttcgaaattaacctcgatcaccggaaactgaagaccccccaggcaaagctgtttaccgtgccttctgaggcactcgcgatagccgtggctaccgagtgggacagtcagcaggacactataaaatactataccatgcacctgacaactctgtgcaataccagcctcgacaaccctactcagcgcaacaaagaccagctgatccgcgcagctgtgaaattcctggatactgacaccatctgttatcgcgtagaagaacctgagacccttgttgagcttcagcggaacgaatgggaccctattatcgaatgggctgaaaaacgctatggggtggaaattagtagctctacgagtattatgggaccgagcatcccggccaaaactagggaggtgttggtgtcacatttggcatcttataatacatgggctcttcagtag

SEQ ID NO: 179694 - DNA, 870 bp, synthetic construct
  misc_feature 1..870: note = Description of Artificial Sequence: Synthetic coding sequence
  source 1..870: mol_type = other DNA
atgtggcggagctgcctgcggctgcgggacggcggccggcggctgttgaaccggcctgccgggggtccatctgcttccatgtctcctggccctactattccctctccggctagagcatatgctccaccaactgagcgcaaacgtttctaccaaaatgtctcgattacgcagggcgagggaggcttcgagattaacctcgatcataggaaactcaagacaccccaggccaaactctttaccgtgcctagcgaagccctggccattgccgtggccactgaatgggattctcagcaagataccatcaagtattatacaatgcacctcactactctgtgcaatacatctctagacaatccaacgcagcgaaataaggatcaactgattagagctgcagtcaagttcttggataccgacacaatatgctatcgcgtggaggagcctgagaccctcgtcgagcttcagagaaatgagtgggacccaatcatcgagtgggccgaaaaacgttatggggtcgagatttccagctctacttcgattatgggcccgtcaatacccgctaagacccgcgaggtgctcgttagccacctggcctcttacaacacttgggcgctacaggggattgaattcgtggctgcacagcttaagagtatggtccttaccctcggcttgatagacctgagactaactgtcgagcaggccgtgctcctgtctaggctggaagaagaataccaaattcagaagtggggaaacattgagtgggctcacgactatgaactccaggaactgcgggcacgaactgcggctggcactttgtttatccacctgtgctctgagtccaccactgtgaagcataagctgctcaaggagtag

SEQ ID NO: 179695 - DNA, 1590 bp, synthetic construct
  misc_feature 1..1590: note = Description of Artificial Sequence: Synthetic coding sequence
  source 1..1590: mol_type = other DNA
atgctgggcttcgtgggccgggtggccgccgcccccgccagcggcgcattgaggcgacttaccccatccgcctctctgccgcccgcccaattacttctacgggcggctccaaccgcagtgcaccctgttagggactatgccgcccagacgagcccttcccctaaagccggagcggccacgggcaggatcgtcgccgtgattggtgcagttgtagacgtccagttcgatgagggcttaccaccaattctgaacgccctcgaggtgcaggggcgcgaaacaagactggttctggaggttgcccagcatctgggcgagtccaccgtgcgcactattgccatggatgggacagaaggattggtcagggggcagaaggtgttagactctggcgcccccatcaagattccggtaggtccagagacactcggacggattatgaatgtgattggtgaaccaatcgacgaacgcggcccgattaagacaaagcagtttgcccctatacacgccgaagctccagaatttatggaaatgtctgtggagcaagaaattctcgttaccggcatcaaagtagtggatctgctggcaccgtatgctaaaggggggaagattggcctctttggtggggccggcgtcggaaaaacggtgctgatcatggagctgataaataatgtggccaaagctcacgggggctacagtgtgttcgccggcgttggcgaacggactcgcgagggtaacgatctatatcacgaaatgattgagtccggtgtgatcaatctgaaggatgcgacaagcaaagtggctctggtttacgggcagatgaatgaacccccaggcgcacgagccagagttgcattgacaggtttaactgttgccgagtattttcgtgatcaggaaggtcaggacgtgctcctgtttatagataacatcttccgttttacacaagcaggttctgaggtttcagcgctcctaggcagaatcccttcagctgtggggtatcagcccacgcttgctacagacatgggcacaatgcaggagcggatcaccacaactaaaaagggcagtatcacatccgttcaagcaatttacgttccggctgacgaccttacggatccagcccctgcgacgacctttgcccacctggatgcaaccaccgtcctgagtcgggccattgcagaattgggaatctaccccgccgtggatccgctggattccaccagccgtatcatggatcctaatattgtaggtagcgaacactacgacgtggcacgcggagtgcaaaagatcctgcaggactacaagagtctgcaggacattatcgccattcttggtatggatgagctgagcgaggaagacaaactcacagtcagtcgcgctagaaagatacagcggtttctttcccaaccttttcaggtggccgaggtgttcaccgggcatatggggaaactcgtccccctcaaagaaaccataaaagggtttcaacagatcctagccggcgaatatgatcaccttcctgagcaagctttctacatggtcggccctattgaggaggcagtggctaaggctgataaactagccgaggaacacagctcatag

SEQ ID NO: 179696 - DNA, 156 bp, synthetic construct
  misc_feature 1..156: note = Description of Artificial Sequence: Synthetic coding sequence
  source 1..156: mol_type = other DNA
atggtggcctactggcggcaggccggcctgagctacatccggtacagccagatatgcgcaaaggcagtgagggacgccctgaaaacagagtttaaggcaaatgccgaaaaaacatcaggatcgaacgtcaaaatcgtgaaggtgaaaaaggaatag

SEQ ID NO: 179697 - DNA, 156 bp, synthetic construct
  misc_feature 1..156: note = Description of Artificial Sequence: Synthetic coding sequence
  source 1..156: mol_type = other DNA
atggtggcctactggcggcaggccggcctgagctacatccggtacagccagatatgtgcaaaggccgtaagagacgccttaaagaccgaattcaaggctaatgctgagaagacttcaggaagtaacgtcaagatagtaaaggtgaagaaggagtag

SEQ ID NO: 179698 - DNA, 156 bp, synthetic construct
  misc_feature 1..156: note = Description of Artificial Sequence: Synthetic coding sequence
  source 1..156: mol_type = other DNA
atggtggcctactggcggcaggccggcctgagctacatccggtacagccagatctgtgcaaaggccgtccgggatgcgctcaaaacagagtttaaggcgaatgcggagaagacctctgggtcaaacgtgaagatcgtgaaggtgaaaaaagagtag

SEQ ID NO: 179699 - DNA, 894 bp, synthetic construct
  misc_feature 1..894: note = Description of Artificial Sequence: Synthetic coding sequence
  source 1..894: mol_type = other DNA
atgttcagccgggccggcgtggccggcctgagcgcctggaccctgcagcctcagtggatccaggtacgcaacatggccacattaaaggacattactaggcgactcaagtccataaagaatatacagaaaattacgaagtcaatgaaaatggtggctgccgccaaatatgcccgggctgaaagggaactgaagccggcgaggatatacggcctcggctctctagccttgtatgagaaggctgacatcaaaggcccagaggataagaaaaagcacctcctgattggagtgagtagcgatcgaggtctttgtggcgctatacactcatctatcgccaaacagatgaagtcagaagttgccaccttgactgccgccggcaaagaggtaatgctggtcggaataggagacaagatccggggaatcttatataggactcattccgatcagttcctggtggcctttaaggaagtcggccgcaagccccctaccttcggcgatgcatctgtgatcgctttggagctgctgaatagtggctatgagttcgacgagggtagtatcatcttcaacaagtttcgctccgttatttcgtacaaaaccgaggagaaacccatttttagtcttaatactgtagccagtgctgatagcatgtccatttacgacgacattgatgccgacgtgctgcagaactaccaggagtataacctggccaatattatctattacagcctcaaggagtccacaactagcgagcagtcggcaaggatgaccgcaatggataacgccagtaagaacgccagcgagatgatagacaagttgacacttacgttcaaccggactcgacaggccgtgattacgaaggagttgatcgaaattatctccggagctgcagcactctag

SEQ ID NO: 179700 - DNA, 897 bp, synthetic construct
  misc_feature 1..897: note = Description of Artificial Sequence: Synthetic coding sequence
  source 1..897: mol_type = other DNA
atgttcagccgggccggcgtggccggcctgagcgcctggaccctgcagccccagtggatccaggtgcgcaacatggccactctcaaagacattacccgcagactgaaatctattaaaaatatccagaaaatcaccaagtcaatgaaaatggtcgcggcagcgaaatatgcccgggccgagagagaactgaagccagcgcgaatatatggcctgggttccctggccctgtatgaaaaagcagatatcaagggcccagaggacaaaaagaagcacctgctcatcggagtatcctctgatcggggactctgtggagccatccactcaagcatcgcaaaacagatgaagtccgaggtggctaccctcactgcagcaggcaaggaggtgatgctggtggggatcggcgacaaaattagggggattctgtaccggacccacagtgaccagttcctggttgcattcaaagaggtcgggaggaagccccccactttcggggacgccagtgttatcgccctggaactgttgaatagcggatatgagtttgatgagggttctattatctttaacaagttcagatcagtaatctcatacaaaaccgaagagaagcccatattctcactcaacacggtcgccagtgcagactctatgtccatctatgatgatatcgacgccgacgtcttgcagaactaccaggaatataacctcgccaacataatctactattcgttaaaggaatccacgacatcggaacagtcggcaagaatgaccgccatggacaacgcctccaaaaatgcctccgagatgattgataagctcacccttacttttaaccggaccaggcaagcagtgatcacaaaggaattaattgagatcattagcggtgctgcggctcttgattag

SEQ ID NO: 179701 - DNA, 753 bp, synthetic construct
  misc_feature 1..753: note = Description of Artificial Sequence: Synthetic coding sequence
  source 1..753: mol_type = other DNA
atgaagatggtggccgccgccaagtacgcccgggccgagcgggagctcaaaccagccagaatttatggcttagggtccttggctctttacgaaaaggctgatattaaaggtcctgaagacaagaaaaaacatctgctgattggagtaagttccgatcgggggctatgcggtgcaatccacagctcgattgccaagcagatgaaatcagaggtggcaacgctcaccgcagcaggaaaggaagtgatgctcgtaggcataggggataaaatcagagggatcttgtaccgcacacactcagaccaattcctcgtcgcttttaaggaggttggccgcaagccccccactttcggggacgcatcagtgatcgcacttgaactgctaaactctggatacgagtttgatgaggggagtatcatcttcaataaatttagaagtgtgatatcttataaaaccgaagaaaagcccatattttcactgaacactgtagccagcgcagacagcatgtctatctatgacgacatcgatgccgacgttctccagaattaccaagagtacaatctggcaaacatcatatattatagcttaaaggaatccaccacttcggaacagagcgccagaatgacagctatggacaacgcgtcgaagaatgcttccgagatgattgacaagctgacattaaccttcaaccgcaccagacaggctgtcatcaccaaagagctgattgagataatctccggggctgcggccctgtag

SEQ ID NO: 179702 - DNA, 642 bp, synthetic construct
  misc_feature 1..642: note = Description of Artificial Sequence: Synthetic coding sequence
  source 1..642: mol_type = other DNA
atggccgcccccgccgtgagcggcctgagccggcaggtgcggtgcttctctacatccgtcgtccggccatttgctaagctcgtgagaccacccgtccaggtttacggcatcgagggaaggtacgccactgccttgtatagtgcagccagcaagcagaacaagcttgagcaggttgaaaaagagctcttgcgcgttgcccagatcttaaaagagccaaaagtcgccgcgtcagtgctgaacccctacgtgaaacggagcattaaagtaaaatcactcaatgacatcaccgcaaaagagcggttctctccactgactacaaacctgattaatctgttggccgagaatggacgcctgagcaacacccagggggtcgtcagcgctttctcaaccatgatgagtgtgcaccggggagaggtgccatgtacagttacctccgcgagcccattagaggaggctactctcagtgagcttaagaccgtgctgaagagcttcttatcccaggggcaagtgctgaagctggaagctaagacggatccaagtatcctgggtggcatgattgttcgtattggcgaaaagtacgtggatatgtctgtaaagactaagattcagaaactcggcagggctatgagggagatcgtttag

SEQ ID NO: 179703 - DNA, 411 bp, synthetic construct
  misc_feature 1..411: note = Description of Artificial Sequence: Synthetic coding sequence
  source 1..411: mol_type = other DNA
atgcagaccgccggcgccctgttcatcagccccgccctgatccggtgttgcacaagagggctgattaggccagtgtctgctagttttttgaacagtccagtgaattccagcaagcaaccctcctactcaaatttcccactgcaggtcgcgagacgggagttccaaactagcgtcgtgtccagagacatcgatacagccgccaaattcatcggggcgggcgcggcgaccgtgggtgttgctggctccggcgctggcattgggaccgtctttggatccttgatcatcgggtacgcccgtaacccctcactgaagcagcagctgttcagctatgccattctgggctttgcattatcggaagccatgggcttattctgcttgatggttgcatttcttatcttgttcgcaatgtag

SEQ ID NO: 179704 - DNA, 411 bp, synthetic construct
  misc_feature 1..411: note = Description of Artificial Sequence: Synthetic coding sequence
  source 1..411: mol_type = other DNA
atgcagaccgccggcgccctgttcatcagccccgccctgatccggtgctgtactcgtgggttaattaggcccgtgtccgcgtctttcctaaacagtccagtaaattctagcaaacagccctcctactctaattttccactccaggttgcccgacgtgagtttcagactagcgtcgtgtcaagagacatcgataccgccgccaaattcatcggagcgggagccgccactgtgggagttgctggctccggtgcgggcatcggaaccgtcttcggctcgctgatcattggttacgctaggaaccccagtctgaaacaacagctgttttcttacgctattcttggcttcgcccttagcgaggccatgggtctcttttgtctcatggtagcctttctgatcctcttcgccatgtag

SEQ ID NO: 179705 - DNA, 474 bp, synthetic construct
  misc_feature 1..474: note = Description of Artificial Sequence: Synthetic coding sequence
  source 1..474: mol_type = other DNA
atgcccgagctgatcctgagccccgccaccgccccccaccccctgaagatgttcgcctgctctaaattcgtttcaacaccctccctggtcaagtccacgagccaactcttgtctcggccacttagtgcggtcgtgctcaagcgaccggaaatcctgactgatgagtccttatcgtccctagccgtgtcttgtcctttgacatcactggtgtcgtccaggtcattccaaacaagtgcaatctcccgcgatatcgataccgcagccaaattcatcggagctggcgccgctacagtcggcgtcgctgggagcggagctgggatcggtaccgtcttcggctccctaataattgggtatgcgcggaatccttccctcaaacaacaactcttttcttacgctatattaggttttgccctgagcgaggctatgggactcttttgtctcatggtcgcattcttgatcctgtttgcgatgtag

SEQ ID NO: 179706 - DNA, 597 bp, synthetic construct
  misc_feature 1..597: note = Description of Artificial Sequence: Synthetic coding sequence
  source 1..597: mol_type = other DNA
atgcccgagctgatcctgtacgtggccatcaccctgagcgtggccgagcggctggtggggcctgggcacgcttgtgcggaacctagctttagaagcagccgctgcagcgctcccctctgccttctgtgcagcggctcctcgagtccggcgactgctccacatcccttaaagatgtttgcctgtagcaagtttgtgagcaccccttcccttgtgaagtccacaagccaattgctgagtcgccccttatccgctgtggttctcaagaggccagagattctgactgacgaatccctgtccagcttggcagtgagctgccctcttacatccctggtgagtagccgctcatttcaaacaagtgccatctcccgggacatcgacactgcagccaaattcatcggggccggggcagctaccgtgggcgttgccgggtctggggccggaatcgggacagtgtttggatctctcatcataggttatgcgcgcaacccttcgcttaaacagcagcttttctcctatgccattctcggctttgccttgtccgaagccatgggacttttttgtctgatggtcgcctttttgattctgttcgctatgtag

SEQ ID NO: 179707 - DNA, 426 bp, synthetic construct
  misc_feature 1..426: note = Description of Artificial Sequence: Synthetic coding sequence
  source 1..426: mol_type = other DNA
atgttcgcctgcagcaagttcgtgagcacccccagcctggtgaagtccacctcgcaactcctgtctcggccattgtccgcagtggtgctgaagcgcccagaaattttgactgacgagtctctcagtagcctggcagtgagttgcccacttacaagcctcgtgagctcaaggtcatttcagaccagtgctattagccgcgatatagacactgcagccaagtttattggcgcaggagctgccactgtgggcgtggctggttctggtgccggcataggtacagtgttcggctcacttattatcggctatgctcgaaatccctctctgaaacagcaactctttagttatgcgatcctcggttttgcactgtctgaagctatgggcctgttttgcttaatggtcgccttcctcatcctgttcgccatgtag

SEQ ID NO: 179708 - DNA, 429 bp, synthetic construct
  misc_feature 1..429: note = Description of Artificial Sequence: Synthetic coding sequence
  source 1..429: mol_type = other DNA
atgttcgcctgcgccaagctggcctgcacccccagcctgatccgggccggcagcagagtggcctaccgcccaatttctgccagcgtcctgagccggcctgaggctagcagaacaggggaaggatccactgtattcaatggtgcgcagaatggggtctctcagctaatacagagggagtttcagacctcggcgatctctagagatatagacacagctgctaaattcatcggtgccggggccgctactgtaggagttgccggaagcggagcaggcattggcacagttttcggctctctcatcatcggctacgccagaaaccccagcttgaagcagcagctctttagttatgcaatactggggttcgctcttagtgaggccatgggccttttttgcctgatggttgcctttctgattctgttcgcaatgtag

SEQ ID NO: 179709 - DNA, 429 bp, synthetic construct
  misc_feature 1..429: note = Description of Artificial Sequence: Synthetic coding sequence
  source 1..429: mol_type = other DNA
atgttcgcctgcgccaagctggcctgcacccccagcctgatccgggctgggtcccgagttgcctatcggccgatatccgcgtccgtgctaagccggcccgaggctagtaggacgggagagggttctacggtcttcaatggtgctcagaacggagtgagtcagctgatccagcgcgaattccaaaccagcgctatcagtcgcgacattgacaccgccgccaagtttataggagccggggccgccacagtcggcgtggctggaagtggtgccggcattgggaccgtgtttggaagtctgattattggttacgcccgcaacccttctcttaaacaacagttgtttagctacgccatactgggcttcgccctcagcgaagccatgggcctgttctgtctaatggttgcattcctgattttgttcgcaatgtag

SEQ ID NO: 179710 - DNA, 429 bp, synthetic construct
  misc_feature 1..429: note = Description of Artificial Sequence: Synthetic coding sequence
  source 1..429: mol_type = other DNA
atgttcgcctgcgccaagctggcctgcacccccagcctgatccgggcaggcagccgtgtggcgtaccgacccatttcagcttcagtgctcagccgtcccgaagcttcaaggacaggcgagggttccacggtcttcaacggagcccaaaacggagtatctcaattaatacaacgcgagtttcaaactagcgccatcagccgcgacatcgacactgccgccaagttcatcggcgcgggggccgcaacagtcggagtggctggcagtggcgccggtatagggaccgtgttcggcagcctgataatcgggtacgcccggaaccccagcctgaaacagcagttgttcagctatgcaattctgggctttgccctgagcgaagccatgggtctgttctgtctgatggtggctttcttaatccttttcgccatgtag

SEQ ID NO: 179711 - DNA, 210 bp, synthetic construct
  misc_feature 1..210: note = Description of Artificial Sequence: Synthetic coding sequence
  source 1..210: mol_type = other DNA
atggtgccccccgtgcaggtgagccccctgatcaagctgggccggtactcggcactgttcctgggagtcgcgtatggcgcaacaagatataattacttaaagccaagggctgaggaggaacgacgcattgccgcagaagagaaaaaaaagcaggatgagttaaagcgtatcgcaagagagctggccgaggacgactctattctcaagtag

SEQ ID NO: 179712 - DNA, 327 bp, synthetic construct
  misc_feature 1..327: note = Description of Artificial Sequence: Synthetic coding sequence
  source 1..327: mol_type = other DNA
atgatcctgcagcggctgttccggttcagcagcgtgatccggagcgcagtctcagtgcatttaaggagaaatattggtgtgaccgccgtggccttcaacaaggagcttgaccctatccagaaactttttgttgataagattagagaatataaaagcaagagacaaacatcaggcggccccgtcgatgcttcttctgagtatcaacaggagctcgaacgcgagctgtttaaactgaagcaaatgtttggcaatgccgatatgaatacctttccgactttcaaattcgaggatcccaaattcgaagttatcgagaagcctcaagcctag

SEQ ID NO: 179713 - DNA, 327 bp, synthetic construct
  misc_feature 1..327: note = Description of Artificial Sequence: Synthetic coding sequence
  source 1..327: mol_type = other DNA
atgatcctgcagcggctgttccggttcagcagcgtgatccggagcgctgtctctgtccacctgaggagaaatatcggtgtgacggccgttgcctttaataaagaactggatcctattcagaagctgttcgtggataaaattcgcgagtacaaatcaaagagacagacttctggtggacctgtggatgcatccagtgagtaccagcaagagctggagcgggaactgtttaagctgaagcagatgttcgggaatgctgacatgaacacattccccacctttaaatttgaggacccaaagttcgaggtgattgagaaaccgcaggcctag

SEQ ID NO: 179714 - DNA, 327 bp, synthetic construct
  misc_feature 1..327: note = Description of Artificial Sequence: Synthetic coding sequence
  source 1..327: mol_type = other DNA
atgatcctgcagcggctgttccggttcagcagcgtgatccggagcgctgtctccgttcacctgaggcggaacattggcgtgaccgcggtggcatttaataaggagctggacccaatacaaaaactgttcgtcgacaaaatccgcgagtataagtctaagcggcagacaagcggcgggcctgttgatgcctcctcggagtatcagcaggagctggaaagggagctcttcaagttaaaacagatgttcggcaacgctgatatgaacacttttcctacatttaagtttgaagaccctaagtttgaggtgattgagaaacctcaagcctag

SEQ ID NO: 179715 - DNA, 327 bp, synthetic construct
  misc_feature 1..327: note = Description of Artificial Sequence: Synthetic coding sequence
  source 1..327: mol_type = other DNA
atgatcctgcagcggctgttccggttcagcagcgtgatccggagcgcagtgtccgtgcacctgcgcagaaatatcggggtgaccgctgtagcattcaacaaggagctggatcctatccagaagctctttgtggataagatcagagagtataaatccaagaggcagacatcaggcgggccagtcgatgccagttctgaataccagcaagagctggaacgggagctgttcaaacttaagcaaatgtttggcaacgctgatatgaacacttttcccacgttcaagttcgaagaccctaagtttgaagtgatagagaaacctcaggcctag

SEQ ID NO: 179716 - DNA, 327 bp, synthetic construct
  misc_feature 1..327: note = Description of Artificial Sequence: Synthetic coding sequence
  source 1..327: mol_type = other DNA
atgatcctgcagcggctgttccggttcagcagcgtgatccggagcgccgtaagtgtgcatctcagacgtaacatcggggtgacagccgttgcctttaacaaagagctggatcctatacagaagctctttgttgacaagatccgcgagtataagtcaaagaggcaaaccagtggggggcctgtagacgcttcctctgaatatcaacaggagttagaaagagagctgttcaaactgaagcagatgtttggaaacgctgacatgaacactttccccactttcaaatttgaggatcctaaattcgaggtcatcgagaagccccaggcttag

SEQ ID NO: 179717 - DNA, 351 bp, synthetic construct
  misc_feature 1..351: note = Description of Artificial Sequence: Synthetic coding sequence
  source 1..351: mol_type = other DNA
atgcactgcgacggcggcatcagcatgatcctgcagcggctgttcaggttctcaagtgtgattcgcagcgctgtgagcgtacatctacgtaggaacataggggtaactgcagtggcttttaacaaggaactggacccaatccagaagttgtttgttgacaagatccgcgaatataaatcgaagaggcaaacctctggtggccccgtggatgccagcagcgagtaccagcaggagctcgaacgcgagctgttcaagctgaaacagatgttcgggaatgccgatatgaacacctttccaacatttaagtttgaagacccaaaattcgaagtcatcgagaaaccccaggcctag

SEQ ID NO: 179718 - DNA, 567 bp, synthetic construct
  misc_feature 1..567: note = Description of Artificial Sequence: Synthetic coding sequence
  source 1..567: mol_type = other DNA
atgaccgccaagggcagcaccggcatggagatcctgctgagcaccttagagaacaccaaagacctgcagaccacactgaacattctgtccattctggttgagctggtgtctgcagggggcgggcgaagggtgtcttttcttgttaccaaaggcggatcgcagatcttgctgcaactactgatgaacgccagcaaggagtccccccctcacgaggacctgatggttcagattcactccatacttgcaaaaattggcccaaaggacaaaaaattcggcgttaaagccagaattaacggagctttaaacatcacattaaaccttgtgaagcagaacctgcagaaccatagactggtcctcccctgtcttcaactgctgagggtttatagcgctaatagtgtcaattcggtgagtcttggaaaaaacggagtcgtcgaactgatgtttaagatcatcggaccgttctctaagaagaactcctctctaattaagaacaagtgccaggagagttgcaggcaaaggatctgtccttcagcctttaataacctttgtaggctggcacccccttag

SEQ ID NO: 179719 - DNA, 3681 bp, synthetic construct
  misc_feature 1..3681: note = Description of Artificial Sequence: Synthetic coding sequence
  source 1..3681: mol_type = other DNA
atgagcaagctgaaggtgatccccgagaagagcctgaccaacaacagccgcattgtgggtttgcttgcacagctggagaagattaacgccgagccctctgaatcagatactgcccgttacgtgacctcaaagatcctacaccttgcccagagtcaggagaaaaccaggcgagagatgaccgcgaaaggctcaaccggcatggagatcctgctttccaccctggagaacacgaaagacctccagaccacccttaacatcctgtctatcctggtggagttggtgtccgccgggggtgggcggagagtgagctttttggttacgaaaggcgggtcccaaatcctgctgcagctccttatgaatgcaagtaaagaaagtccgccacacgaggacctgatggtccagatccactccattttggccaaaattggtccgaaagataagaaattcggggtcaaggccaggataaatggggcacttaacatcacactgaacttggtgaaacagaatcttcagaaccaccggctcgtgctcccctgtctccagctccttcgggtctactcagctaattctgttaactccgtgtctctcggtaagaatggcgtagtggaacttatgtttaagatcatcggtccattttccaagaaaaactcatcactgattaaggtcgccctggatactctggcagccctgttgaagtcgaaaacaaatgcaaggcgggcagtggacagagggtatgtccaagtccttctcacaatttacgtagactggcataggcatgataatcgacatcgaaatatgttgatccgcaagggaattcttcagtcacttaaatccgttaccaacattaaactgggtcgcaaagcatttatcgacgccaatgggatgaagattctttataacactagccaggagtgcctcgccgtgcggaccttggaccctcttgtcaatactagttctctcattatgcggaaatgtttccctaaaaatagacttccactccccacgattaagagcagttttcacttccagctgccagttattcccgtgactggacccgtagcgcaattgtatagcttgccgccagaggtggatgacgtggttgatgagtcagatgataacgatgatattgacgtggaagccgaaaacgagaccgaaaatgaagacgatttggatcaaaatttcaagaatgacgacattgagacagacatcaataaacttaaaccgcagcaggaaccaggccgcactatagaagacttgaagatgtacgagcacctgtttccagagcttgtggatgactttcaagattatgacctgatctcaaaagagccaaaacccttcgtgtttgagggcaaggtgcggggcccaattgttgttcccacagcaggtgaagagacttctgggaatagcggcaatcttcgtaaggtcgtaatgaaggagaacatatctagcaagggcgacgaaggggaaaagaaaagcacattcatggatttggccaaagaggacattaaggacaacgatcgaacgctgcaacaacagccaggcgaccagaatcgaacaatcagctcagtacacggacttaataacgacatcgttaaggctcttgacagaatcactcttcagaacatcccttcacaaacagctcccggatttacggctgaaatgaagaaagactgctcgctcccactgaccgtgcttacatgtgcgaaagcttgcccccacatggccacttgtggaaacgttcttttcgagggccggacagtccagttgggaaagctgtgttgcacgggcgttgagacagaggacgatgaggatacagaatcaaacagttctgttgaacaggcttccgttgaggtgcctgacggacccaccttgcacgaccctgacttgtatattgaaatagtgaagaacactaagagtgtgccagaatattcagaagtggcctaccccgactatttcggccacattccccccccgttcaaggagcccatcctggagaggccatatggcgtgcagagaactaaaattgctcaagacatcgaacgtctgattcaccagagtgatatcatcgaccgcgtggtgtacgacttagacaatcccaattacaccatccccgaggaaggggacattctgaaattcaacagcaagtttgagtccgggaatctccgcaaggtaatccagatccggaagaatgaatatgacctcatactgaactcagatataaattccaaccactaccatcagtggttctacttcgaagtcagtggaatgcggcccggcgtggcctaccggttcaatatcatcaactgcgagaagtctaacagccagtttaattatggaatgcagccgctaatgtatagtgtccaggaggctctcaacgcaaggccttggtggattcgtatgggaacagatatatgctattacaagaatcacttcagccgaagcagtgtggccgccggaggccagaaagggaagagctactacacaatcacattcaccgtgaactttccccacaaagacgacgtgtgctattttgcctaccattacccatacacatactccaccctgcaaatgcatttgcagaaattggagtcagcgcacaacccccagcagatctacttccgtaaagatgtgctgtgtgagaccctttcaggcaactcatgccccctcgtaacaattacggccatgccggaaagtaactattatgagcacatctgccatttcaggaatagaccttacgtgttcctgtccgcccgcgtgcatccaggcgaaacaaatgcatcttgggttatgaagggaacccttgaatacttaatgagcaacaatcccactgctcaatccctgcgtgagtcatacatctttaagatcgttccaatgctgaatccagatggggtcattaacggaaaccacagatgctcactgagtggagaagacctcaaccgacagtggcaaagtccgagccctgacctgcaccccaccatttaccatgccaagggtctgctacagtatctggcagccgttaaaaggctcccactcgtgtactgtgattaccatgggcatagccggaagaaaaacgtgtttatgtatggttgctcaatcaaagaaaccgtctggcacacgaacgataatgcaacctcttgcgatgtagtggaagatacaggctatcggacgctgcccaaaattctttcgcatatcgcacccgccttctgtatgagctcatgctcttttgtggtagagaaaagcaaggaatcaactgctcgtgttgtcgtgtggagggagatcggagttcagagatcttacacaatggagtccacactgtgcgggtgcgaccagggaaagtacaagggattgcagattggtactcgagagctcgaggagatgggggcgaagttctgtgttggtctgctcaggctcaagaggttgactagcccgcttgagtacaacctgccatctagcctgctggacttcgagaacgatctgatcgaaagttcttgcaaagtgacatcccccacaacctacgttctggatgaggatgaaccaaggttcctggaggaggtggactactctgccgaatcaaatgacgagctcgatatagaactggctgaaaacgttggagactatgagccaagcgctcaggaggaggttctttctgacagtgaactatcgcgtacctacctcccctag

SEQ ID NO: 179720 - DNA, 567 bp, synthetic construct
  misc_feature 1..567: note = Description of Artificial Sequence: Synthetic coding sequence
  source 1..567: mol_type = other DNA
atgaccgccaagggcagcaccggcatggagatcctgctgagcaccctcgaaaacacaaaggatttgcagactaccctgaatatactctcgattcttgtagagctcgtgtcggcgggaggtgggaggagagtaagttttctggttaccaaaggtgggtcccaaatcctgcttcagctcttgatgaacgctagtaaagagtccccgccgcatgaggacctcatggtccagatccactctattttggcaaagattggacccaaagacaaaaagtttggagtgaaggctcggatcaacggggcactaaacatcacgttaaatctggtcaagcagaaccttcagaaccacaggctggttttaccctgtctgcagctacttcgtgtgtattcagccaacagcgtgaacagtgtgtccctggggaaaaatggtgtcgtggaactgatgttcaagattattggcccattcagtaaaaagaactcctctttgataaagaacaaatgccaagagtcatgcaggcagaggatctgcccatcagcattcaataacctctgcaggctggctcctccatag

SEQ ID NO: 179721 - DNA, 714 bp, synthetic construct
  misc_feature 1..714: note = Description of Artificial Sequence: Synthetic coding sequence
  source 1..714: mol_type = other DNA
atgagcaagctgaaggtgatccccgagaagagcctgaccaacaacagccgaatcgtgggcttgttggcgcagttagaaaaaataaatgccgaacccagtgagtctgacacagcacgttatgtgacttctaagatactccacctggcccagtcgcaggagaagacgaggcgtgagatgacagcaaagggttctacgggaatggaaattttattgagtaccctagagaataccaaagatctccaaacaactcttaacatattgtccatcctggtggaacttgttagcgccgggggggggcggcgcgtttcctttctcgttaccaaagggggctcccagatcctactccagttgctcatgaacgcaagtaaggaaagtccacctcatgaagatctgatggtgcagatccattctatactcgctaagattggccccaaggacaagaaatttggagtgaaagcacgcattaatggagcactgaatattacattgaacctggtgaagcagaacctccagaaccaccgccttgtgctgccctgtctccagctcctgcgtgtttatagcgccaattcagtcaattcggtctctctaggcaagaacggcgtagtcgagctgatgttcaagatcataggaccgttctctaagaagaactcctctttgatcaagaacgtttggcagagcggactgtggatcctcctctctataccacctgtgtag

SEQ ID NO: 179722 - DNA, 3561 bp, synthetic construct
  misc_feature 1..3561: note = Description of Artificial Sequence: Synthetic coding sequence
  source 1..3561: mol_type = other DNA
atgagcaagctgaaggtgatccccgagaagagcctgaccaacaacagccgcatagtggggcttttagcccaacttgagaagattaacgcagagccatccgagagtgacacagcacgttacgtaaccagcaaaatcctacacctggcccagtcccaggaaaagacgagacgagagatgaccgccaagggcagcacaggcatggaaatcctgctgagtacccttgaaaatacaaaggaccttcaaacaaccctgaacatcctatctattcttgttgaacttgtctccgccgggggtggtcggcgcgtgtccttcctggtgacaaaagggggctctcagatcctgttacaattgctcatgaatgcgagcaaagaatcccctcctcacgaagatctcatggtacagatacatagcatcttggctaaaatcgggcctaaggataaaaaatttggcgtgaaggccagaattaatggggctttgaatataacactgaatcttgtgaagcagaatctgcaaaatcacaggctcgttctcccttgccttcaactgctcagagtgtattctgcgaatagtgtgaacagcgtgagtttgggcaaaaatggtgtggtggagctcatgtttaagatcattggccctttttcaaagaagaactcctcactgattaaggtggccctggataccctagccgccctcctgaagtccaaaacaaatgctcgtcgggcggttgataggggttacgtccaagtgctgctcacgatctatgtcgactggcacagacacgataataggcaccgtaatatgctaatccgtaaggggattctgcagagcttaaaatccgtgaccaatattaaactgggccgcaaagctttcatcgatgctaatgggatgaagattttatacaacacctcccagctacccgttatacctgttactggtccagtggcacaactatactccctcccacctgaggtcgatgatgtcgtcgacgagtcagatgataacgatgatatcgacgtcgaggcagagaacgagaccgagaacgaggacgatttagaccagaattttaaaaacgatgatatcgaaaccgatattaataaacttaaaccacaacaggagcctgggaggactatcgaggacttgaaaatgtacgaacacctgttcccggaactggtcgatgactttcaagactatgatttgatctctaaagaacccaagcctttcgtgtttgagggcaaagtccggggcccgatcgtcgtccctactgcaggtgaggagactagtggaaactcagggaatttgcggaaggttgtgatgaaggagaatattagttctaagggagacgagggggaaaaaaagagtactttcatggatttggctaaggaggacatcaaggataacgatcgtactctgcaacagcagccaggtgatcagaacaggaccatatcgtcggtgcacggcttgaacaatgacatagtcaaggccttggaccgcatcacgctgcagaatattcctagccagacagcaccagggtttacagccgaaatgaaaaaggattgcagtcttcccctgaccgtcctcacttgtgcaaaggcatgcccgcatatggcaacatgcggtaatgtgctgttcgagggccgtaccgtccaacttgggaagctgtgttgcaccggggttgagactgaggatgacgaggacaccgagtccaatagctcagtggagcaggctagtgtggaagttcctgatggaccgacacttcatgatccagatctgtacatcgaaatagttaagaataccaaatccgtacctgaatacagcgaggtggcctatccagattactttgggcacattcctcctccttttaaggaaccaatcttggagcgcccctatggagtccagcgtaccaagatcgcacaggatatagaacgcctgatccatcagtctgatatcatcgatagggttgtgtatgacctagataatccgaattataccatccctgaggaaggagatattctgaaatttaattccaaatttgagtctggtaacttacgtaaggttattcagatccgcaaaaatgaatacgacctgattctcaattccgacattaattcaaaccactaccaccagtggttctacttcgaggtgagcggcatgaggcctggggtagcgtatcggttcaacattatcaattgtgagaagagcaatagccagttcaactatgggatgcaacctcttatgtactctgtacaagaggctctgaatgcacgcccttggtggatccggatggggaccgatatttgttactacaaaaatcacttttcaagaagctccgtcgctgcggggggacagaagggaaagagctactataccattacgttcaccgtgaacttcccccataaagacgatgtgtgctactttgcctatcactatccctatacatactctacactgcagatgcacctgcagaagctggagtcggcacacaacccacagcagatctacttccggaaggacgtgctgtgcgagaccctcagcggcaacagctgtcccctggtgaccatcaccgccatgccagaaagtaactactacgagcatatatgtcacttcagaaatagaccttacgtattcctgtccgccagagtgcaccccggtgagacaaacgcgagttgggtgatgaaaggtaccctggagtaccttatgtccaataatcctaccgcccaaagcctccgcgaatcctacattttcaagatcgtccccatgttgaatcctgacggcgtgatcaatggcaaccacaggtgttctctgtctggcgaggacctgaacaggcaatggcagagccccagccccgacttgcatcccactatctaccatgccaaaggtctgctccagtaccttgctgccgtgaagcggcttcccctggtgtactgcgattatcacggtcattcccggaagaagaacgtgtttatgtacggctgtagcatcaaggagacagtgtggcacaccaacgacaatgcaacttcttgtgatgttgtggaggacactgggtacaggaccttaccgaagatcctctcccacatcgctcccgctttctgcatgtcaagctgctctttcgtggtggaaaaatccaaggagtccacggctcgcgtggtggtgtggagagagattggtgtgcaacggtcctacaccatggaatccacactctgtgggtgcgatcagggaaaatataagggcttacaaattgggacccgagagttggaagagatgggtgccaaattctgcgtgggcctgcttcggctgaagcgcctcaccagcccattggaatacaacctgcctagctcgctgctggattttgaaaacgacctgatcgagtccagctgtaaagtcacatcacccacaacgtatgtcctcgatgaggatgagcccaggttcctggaggaggttgactactccgccgagtccaatgacgagcttgatattgagctagccgaaaacgtcggtgattatgaaccttctgctcaggaagaggtactttctgactcggagctcagtcggacttacctgccatag

SEQ ID NO: 179723 - DNA, 3717 bp, synthetic construct
  misc_feature 1..3717: note = Description of Artificial Sequence: Synthetic coding sequence
  source 1..3717: mol_type = other DNA
atgcggaccggcagcgccgccagcagcgccgccgccgccgccgccgcagccgccgcctccgcttctccggccaccggggtgtgcatgaaaacacccggcggaggcagacgggggattagacgcgatccgggagctgaacccggagccgctgccctcagaggcccacggcagaggcctatcctgtcaaggcttaccaataactcacggatcgtgggactgctggcgcagcttgagaaaattaacgccgagcctagcgaaagcgacaccgctcgctacgtgaccagtaagatcctccatctggcccagagtcaggagaaaactagacgggagatgactgccaaaggttcaactgggatggagatactgctatcaacactggaaaatacaaaggacctccaaactaccctgaacatcctatctattctggtagaactcgtctctgccggagggggacggagagtcagctttctcgtgactaagggaggcagtcagatcctgctgcagctcctcatgaacgccagcaaagaaagtcccccccacgaggatctaatggttcagatccatagtatccttgccaagattggcccaaaggacaagaaatttggcgtcaaagcaaggattaacggcgccctgaatattactcttaacctggttaagcagaacctgcaaaatcacaggctggtgctgccatgcttacagctgctccgtgtttactcagcaaattccgtcaattcagtgagcctggggaagaacggtgtcgtggagttgatgttcaagatcatcggacctttcagcaaaaagaattcaagccttattaaagttgccttagataccctggctgccttgctgaagagcaaaacaaatgctcgaagggcagtggacagaggatatgttcaggtactgcttacaatttatgtggactggcaccggcatgacaatcggcataggaacatgctgatccgtaaggggattctgcagtcactcaagagcgtgaccaacatcaaactaggacgaaaagcattcatcgatgctaatggtatgaaaatcttgtacaacaccagccagctacctgtgatccccgtcacagggcctgtggcccagctgtacagcctgccacccgaggtagacgatgtagtggatgaaagtgacgataatgacgatatagacgtcgaagcagagaatgagacagaaaacgaagatgatctggaccagaatttcaaaaacgatgatatcgaaaccgacatcaacaagctgaaaccgcaacaggaaccagggcggacaatcgaagatctgaagatgtatgaacacctcttccccgagctggtggatgacttccaggattacgatctaattagtaaagagccaaaaccatttgttttcgaaggaaaggtgcgcggcccgatcgttgtgccaactgccggcgaagaaacgagcggaaattcagggaatctacgcaaggtcgtcatgaaggagaatatatcgtccaagggagatgaaggagagaagaagtcaaccttcatggatcttgcaaaagaagacattaaagataacgataggacactccagcagcaaccgggcgatcagaatcgcacaatcagcagcgtccacggacttaataacgatatagttaaggctcttgatcgtatcactctccaaaacatcccctcacagaccgcccctgggtttactgcagagatgaagaaagattgcagtctgcctctgacagttcttacgtgtgctaaagcatgcccgcatatggccacttgtggcaacgtcctattcgaaggacgcactgttcaactgggaaagctgtgttgcacaggtgtggaaactgaggacgatgaagataccgagtccaactcatctgtggagcaagcatcagtggaagtaccggacggccctaccctgcacgacccggacctgtatatcgagattgtgaaaaacactaagagtgtgcctgaatattcagaagttgcttaccctgattacttcggccacattcctccaccgttcaaggagccaattttggagcgaccttacggggtacaaaggacgaaaatcgcccaggatatagaacgcctaattcatcagtccgatatcatagacagggtcgtctacgacctcgacaacccgaattacacgatccccgaggaaggagacatcctgaagtttaatagtaagttcgagagcggcaatctccggaaggtgattcaaattcgtaaaaatgaatatgacctgatcctgaactcggacattaactccaatcactaccaccaatggttttacttcgaggtgtctgggatgaggccgggagtggcctaccggtttaacatcatcaattgtgagaaatccaactctcaattcaattatggaatgcagcccctgatgtatagtgttcaggaggctttgaacgctcgcccgtggtggatccgaatggggaccgacatatgctattataaaaaccacttcagtcgctcaagcgttgctgctggggggcagaaggggaaaagctattacacaattacctttaccgtcaactttccacacaaagacgacgtgtgctacttcgcatatcactacccttatacctactctacattacagatgcatctgcaaaaacttgagtccgcccataacccacagcaaatctatttccgcaaggacgtactgtgcgagactctgtccgggaacagttgccctctggtcactataacagccatgccagagagtaattactacgagcacatttgccattttcgcaaccgcccttatgtcttcctgtccgcgcgcgtacatcccggagaaactaacgcaagctgggtcatgaaaggcaccctggagtacctaatgtccaataacccgaccgcccagtctctcagagagtcctatatttttaagatcgttcccatgcttaaccctgatggtgtgattaacggaaaccaccgctgctccctgagcggagaagatctgaatcggcaatggcagtcaccctctcctgacctgcacccgacaatttaccacgcaaagggattgcttcagtatctggccgcggtcaagagacttcctcttgtgtactgcgactatcatggccacagtcgcaagaaaaacgtgtttatgtacgggtgttcaattaaagagacagtgtggcataccaacgataatgcgacttcctgtgacgtcgtggaggataccggatatagaacgttgcctaaaattctttctcacatcgcaccggccttctgtatgagttcttgttctttcgtggtggaaaagtccaaagaatccactgctcgtgtagttgtgtggagggaaataggcgtgcaacgttcatacactatggagagtacactgtgtggatgtgaccagggaaaatacaaggggctccaaatcggaaccagggaattggaggagatgggagcaaagttttgcgtgggcctgttacgactaaagcgtttgactagtcccctagagtacaatctgccaagctccctgctcgattttgaaaatgatctgatcgagagttcctgcaaggtcaccagcccgacaacatatgtgcttgacgaagatgagcccaggtttctggaagaagtggactactcagctgaaagtaatgatgaactggatatcgagctggccgagaatgtaggcgattacgaaccatccgcgcaagaggaagttctctccgattcagagttatctcgcacctatctcccatag

SEQ ID NO: 179724 - DNA, 1932 bp, synthetic construct
  misc_feature 1..1932: note = Description of Artificial Sequence: Synthetic coding sequence
  source 1..1932: mol_type = other DNA
atgaacgccagcaaggagagccccccccacgaggacctgatggtgcagatccattccattcttgccaagattggacctaaagccgtcaacagcgtaagtctcggtaagaacggagtagttgaactcatgtttaaaatcatcggaccttttagcaaaaagaactcctcgctcatcaaagtggcgctggatacactagctgcgttgctaaaatccaaaacgaatgccaggagagctgttgatagaggatacgtgcaggtgctgcttacaatctatgtagattggcatagacacgacaatagacaccgtaatatgttgataagaaagggcatcctgcagtccctgaagagtgtgaccaacattaaacttggcaggaaggcttttatagacgcaaatggaatgaagattctgtacaatacttcacaggaatgtctggcagtacggacactggatcccctggtcaacacctcgtcacttattatgcgcaaatgcttcccaaagaatagactgcccctgcccactatcaagtccagcttccacttccagctgcctgtgatccccgtgaccggacctgtggcccagctgtacagtctgccgcccgaagtggatgatgttgtagatgaaagcgacgataacgatgacattgatgtcgaagccgagaacgaaaccgaaaatgaagacgacctggaccagaacttcaaaaacgacgacattgagacggatattaataagttgaagcctcaacaagaaccaggtcggactatcgaagacctaaagatgtacgaacacctctttcctgagctggttgatgattttcaggactatgaccttatttccaaggaacctaagccattcgtattcgaggggaaggtacgaggacccatcgtggtccccacagctggtgaagagacttcaggaaactctggaaatctcagaaaggtggtcatgaaagagaacattagcagcaaaggcgacgaaggcgagaagaagtccacgttcatggaccttgcaaaggaggacattaaagataatgataggacacttcagcagcaaccaggagaccagaatcgcactatttcatctgtacatggactcaataacgatatcgtgaaggcactggaccggatcactctgcagaacatcccttcacagaccgcccccggtttcactgcagagatgaaaaaggactgctctctccctttaacagtactaacttgcgctaaggcttgtcctcacatggcaacatgtggaaatgttttgttcgaagggaggacagtacaactgggcaaactgtgctgtacgggtgtggagacagaggacgacgaggacacagaatccaacagctccgtagaacaagcgtctgtggaagtgcctgacggacccaccctgcacgaccccgatctgtacatcgaaatcgtcaaaaataccaagtctgtgccagagtattcagaagtcgcttatcccgactactttggccatatacccccccccttcaaggagcccatcctcgagagaccctatggggtgcaaaggactaagatcgcccaggacattgagcggctgattcaccagtctgatattatcgacagggtggtctacgacttggataatccaaattatactatcccagaagaaggagacattttaaaatttaacagtaagttcgaaagcggaaatctccgaaaggtaatccagatccgcaagaatgagtacgacctgattctcaactccgacataaatagcaaccactaccaccagtggttttactttgaagtgagcgggatgcgtcccggggtggcttataggtttaacattataaattgcgaaaaatcaaatagccaatttaattatgcccttccactcatgagctggatgaaaatgaaccttgactccctcaagaagctgatcaccgtccaaaaagtgatgatgtcctag

SEQ ID NO: 179725 - DNA, 1086 bp, synthetic construct
  misc_feature 1..1086: note = Description of Artificial Sequence: Synthetic coding sequence
  source 1..1086: mol_type = other DNA
atggtgcacgccgaggccttcagccggcccctgagccggaacgaggtcgtgggcctcattttcaggctcaccattttcggcgccgtgacatattttacaattaaatggatggtggacgctatagatcctacaagaaagcagaaagtggaagcccagaagcaggccgagaagttgatgaaacagatcggagtgaagaacgtgaagctatctgagtacgaaatgtcaatcgccgctcatcttgtcgacccactgaacatgcacgtcacttggtccgatatcgccggcctggacgatgttatcacggaccttaaggacactgttattctgcctattaaaaaaaagcatctgtttgagaattcccgcctcctccagcctcctaagggagtgctcttgtacggcccccccggctgcgggaaaaccttgatcgctaaggctacggcaaaagaggctgggtgtagatttataaaccttcagccaagtaccctgacagataagtggtatggcgagtcacaaaaactggccgcggctgttttcagcctcgctattaagttacagccatcaataatcttcatcgacgagattgatagtttcctcagaaaccgttctagttcggaccatgaggcaacagccatgatgaaagctcaattcatgagtctgtgggacggactggatactgaccacagttgtcaggtgattgtaatgggcgctacaaaccggccgcaggacctcgactctgccataatgcggcgtatgcctaccaggttccacattaaccaacctgcacttaagcagcgcgaggctatcctgaaactgattctcaagaacgaaaacgtcgaccgccatgtggatctgctggaggttgctcaagaaaccgacggattttcgggctctgatttaaaagagatgtgcagagatgccgcattactatgtgtgcgcgaatatgtgaacagcacgtccgaagaaagtcacgatgaggatgaaatccgtcctgtacaacagcaggacttgcaccgcgccatcgaaaaaatgaaaaaatccaaggacgctgcctttcagaatgtgcttacacacgtatgtcttgattag

SEQ ID NO: 179726 - DNA, 1086 bp, synthetic construct
  misc_feature 1..1086: note = Description of Artificial Sequence: Synthetic coding sequence
  source 1..1086: mol_type = other DNA
atggtgcacgccgaggccttcagccggcccctgagccggaacgaggtcgttggcttgatttttcgccttactattttcggggccgtaacctattttaccattaaatggatggtggacgctatagaccccaccaggaagcagaaagtggaggcccagaagcaggcagagaaactgatgaaacagattggagtcaagaacgtcaagctctctgagtatgagatgtcaattgcggcgcatctagtcgatcccttgaatatgcacgtaacctggagtgacattgcaggtctagatgacgtgatcaccgatctcaaggataccgttatcctccctattaaaaagaaacacctttttgaaaactctcggcttcttcagcccccgaaaggtgttctgctatacgggcctccgggctgcggtaagacactgatcgccaaggctacagccaaggaagctggctgcaggtttataaatctgcaaccttcaactctgactgacaaatggtatggggagtcccaaaaactggcagccgcagtcttttccctcgctattaagctacaaccctccattatttttattgatgagatagatagcttcttacgaaacaggtcatcctccgaccacgaagcgacagccatgatgaaggcacagttcatgtctctgtgggatggcctcgacaccgaccacagttgtcaagtgatagtcatgggagccactaatcgccctcaggacctcgattccgccattatgagaagaatgcccacaaggttccacatcaaccagcccgcgctgaagcagcgagaggctatcctgaagcttatcctgaagaatgagaatgttgataggcacgtggatctgctggaggtggcccaggagacagacggtttttccgggtctgaccttaaagagatgtgccgggacgccgccctcctgtgtgttagagaatacgtgaactcaacttcagaggagtcccatgatgaagatgaaattaggcccgtgcaacagcaggacctacatcgagctattgaaaaaatgaaaaagagcaaagatgccgcatttcagaacgtccttactcatgtgtgcctagactag

SEQ ID NO: 179727 - DNA, 822 bp, synthetic construct
  misc_feature 1..822: note = Description of Artificial Sequence: Synthetic coding sequence
  source 1..822: mol_type = other DNA
atgaagcagatcggcgtgaagaacgtgaagctgagcgagtacgagatgagtattgcagcccacctggtcgatcccctaaatatgcacgttacttggtccgacattgccggcctcgatgatgtcatcaccgacctaaaggacaccgttattctgccaattaaaaagaaacacttatttgagaacagtcgccttcttcaaccccccaaaggtgtgctgctttacgggcctcccggctgcggcaagaccttgattgccaaagcaacagcgaaagaggcaggctgccgcttcattaatctgcagcccagcacccttacagacaagtggtacggtgagtctcagaagctggccgccgctgtcttctctttggcaattaaacttcaaccctctattatcttcatcgacgaaattgacagctttctgcgtaaccgctcatcaagtgaccatgaggccacagcaatgatgaaagcacagttcatgagcctgtgggatggcctggataccgatcacagctgccaagcactgaaacaacgagaggccattctcaaattaattctgaaaaacgaaaacgtcgatcggcacgtggatctgctagaggtcgcccaggagaccgatggctttagcggatctgacctcaaggaaatgtgccgagatgccgctttgttgtgcgtccgcgaatatgtgaattctacctccgaagagagccacgacgaggacgagataaggcctgttcaacagcaggacttgcaccgcgccattgagaagatgaaaaagagtaaggatgctgcttttcaaaacgttctaacccacgtgtgcctcgattag

SEQ ID NO: 179728 - DNA, 864 bp, synthetic construct
  misc_feature 1..864: note = Description of Artificial Sequence: Synthetic coding sequence
  source 1..864: mol_type = other DNA
atggtgcacgccgaggccttcagccggcccctgagccggaacgaggtggtgggtctcattttcagactgaccattttcggtgctgtaacatattttacaattaagtggatggtagatgccatcgaccccacaagaaaacagaaagtggaagctcagaagcaggccgagaaactcatgaaacagattggcgttaagaatgtcaagctctccgagtacgagatgtctattgcagctcacctggtggatccccttaatatgcacgtgacatggtctgatatcgccggtctggatgatgtgatcacggaccttaaagacacggtgattttgcctattaagaagaaacacctctttgaaaactcccgtctgttacagccgcccaagggtgtgctgctttacggaccgcctgggtgtggaaagacactgattgccaaagctactgccaaggaggcggggtgcagatttatcaacctccaaccctctactctaaccgacaaatggtatggggagtcccagaagctcgcagctgccgtattttctctggccattaagcttcagccaagcataatttttattgatgaaatagatagcttcctgaggaatcggtcaagcagtgaccatgaagccactgccatgatgaaagctcagtttatgtccctttgggatggtctggatacagaccatagttgccaggttattgttatgggtgccacaaataggccccaggatctggattcagccataatgagacggatgcccacacgtttccacattaatcagcccgcattgaagcagcgggaggcgattctgaaactgatcttgaagaatgagaacctccgaaagttgaagcctcgagaggtgctttag

SEQ ID NO: 179729 - DNA, 4173 bp, synthetic construct
  misc_feature 1..4173: note = Description of Artificial Sequence: Synthetic coding sequence
  source 1..4173: mol_type = other DNA
atggtggtgctgcggagcagcctggagctgcacaaccacagcgccgctagtgcaacaggatcacttgatctgagctccgacttcctctccttggagcatatcggtaggagacgtctgcgttccgctggcgctgctcagaagaaacccgcggccaccacagccaaggcaggagacgggtcttccgtcaaggaggtggagacttatcaccggactcgggctctgaggtccctccgaaaggatgctcagaactcctctgactcaagtttcgagaaaaacgttgagattactgaacagctggctaacggacggcattttactaggcagctcgcacgtcagcaggccgacaagaaaaaggaagagcatcgggaggataaagtgattcccgtgacacggagccttagggcacgaaacattgttcaaagtacagagcacctccatgaggataacggcgatgtggaggtgcgtcgcagctgcagaatccgatcccggtatagcggggtaaatcagagcatgctctttgacaagcttataacaaacaccgcggaggccgtactgcagaagatggacgacatgaagaagatgaggcggcaaagaatgagggagctcgaagatttaggggtgttcaacgaaacagaagagagcaatcttaatatgtatacacgcgggaagcaaaaagacattcagcggacggatgaagaaactactgataaccaggagggctccgtcgagagctcagaagagggcgaggaccaagagcacgaagatgacggagaggacgaagatgatgaggacgatgatgatgacgacgatgatgacgacgacgacgatgatgaagatgatgaggacgaggaagatggcgaggaggaaaatcagaaaagatactacctcaggcagcgcaaggctaccgtgtattatcaggcccctcttgagaagcccagacaccagcgaaagccgaacatattctactctggaccggctagcccagccagacctaggtacaggttgtcaagtgccggccctcgttctccatattgcaagcgaatgaaccgcaggcgccacgccatacatagttccgacagtacttcctcaagtagctccgaagacgaacagcacttcgagcgacggaggaagagaagcaggaacagagcaatcaaccgctgtctcccgttaaattttcggaaggacgaactcaagggcatatacaaggatcgcatgaagattggggcttctctggctgacgtggaccccatgcaactggatagctctgtccggtttgacagcgtggggggcctgtcgaatcacattgccgcgttaaaggaaatggttgtgttcccattgctgtatccagaagtctttgagaaatttaagatacaaccccctcgcggatgcctgttttacggacctcccggtactgggaagacccttgttgcaagagccctggcaaacgaatgctctcagggagacaaaagggttgcttttttcatgagaaaaggcgcggattgtctgtccaagtgggtaggagaatccgagcggcaactgcgcctgttgttcgaccaggcttaccagatgcggccgagcatcatctttttcgatgaaatcgacgggctcgccccagtgcgctcatctcgccaggatcagatccatagcagcattgtgtcaaccttgttggcacttatggatggtttagatagcaggggtgaaatcgtagtaatcggcgctaccaatagactggatagcattgatccagccctcaggagaccgggccgattcgaccgggagttccttttctcacttcccgacaaagaagctagaaaggaaatactgaagattcacacaagagattggaacccgaagcctcttgatacttttctggaggagctggccgagaattgcgtagggtactgtggcgcagacatcaaatcgatctgtgccgaggccgcactatgcgccttgcgcagacgctatccccagatttacacaacctctgagaaacttcagctagatctgagctcgataaatatttccgccaaggatttcgaggttgccatgcagaaaatgattccagccagccagagggccgtcaccagtcctgggcaggcccttagtacggtggtgaagcccctactgcaaaataccgtcgataagattctcgaggcgcttcagcgggttttcccccatgccgaatttaggaccaataaaacccttgattcggatatctcctgtccgctgttggaaagcgatcttgcgtacagcgacgacgacgttcctagcgtttacgagaatgggctgtcacagaagtccagtcacaaagctaaagacaatttcaacttcctccatctgaaccggaatgcctgctaccagccaatgagcttccgacctaggattttaatcgttggggaacctgggttcggacaagggtctcacctagccccggccgtgatccacgcccttgagaagttcactgtgtacaccctcgatatccctgttctctttggggttagtactacgtcacccgaagagacatgcgcccaggtcatccgcgaagccaaacggactgcaccgagcatcgtatacgtgcctcatatacacgtgtggtgggaaattgtggggcctaccctgaaagctactttcacgaccctcctccagaatattccctcttttgcaccggtgttgctcctggcgacgtcagataagcctcacagtgcactccccgaggaagtccaggagctatttatcagagattatggcgagattttcaatgtgcagctgcccgataaggaggagaggacgaaattttttgaggacttgatacttaagcaggccgcaaaacccccaattagcaaaaagaaggcagtcctgcaagcgcttgaggtgctccctgtagctccccctccggaaccaagatcactaaccgctgaggaagtaaagagacttgaagaacaggaagaagacacatttcgggagctccgaatctttctgagaaatgtgactcaccgcctcgcaattgacaagcgcttcagagtctttaccaaacccgtggaccccgatgaggtccctgactatgttaccgtgataaaacaaccaatggatctgagctcagtcatcagcaagattgacctccataaataccttactgtcaaagattacctgagggatatcgacctcatctgcagcaatgcgcttgaatacaaccctgaccgagatcctggagatagactcattcgccatcgcgcctgcgccctccgggacaccgcctacgcaattatcaaagaggagctggatgaagacttcgagcaattatgtgaggaaatccaggagtcaaggaaaaagcgcggctgtagttcctcaaaatacgccccgtcttattaccacgttatgcccaaacagaactccacattagtcggcgataaacggtctgaccctgagcagaatgagaagcttaagacgccttccacgcctgtcgcttgttccaccccagcccagctcaaacgcaaaatccgtaagaaaagcaactggtacctgggaaccatcaaaaagaggcgtaagatctcccaggctaaagatgacagccagaacgccatcgaccataagattgagtccgacaccgaggaaactcaggatacctccgtggaccacaatgagactgggaacaccggagagtccagtgttgaggagaacgaaaaacagcagaacgcctctgaatcaaagttggaactacgcaataacagcaatacttgcaatattgagaacgaattggaagacagtcgtaaaaccactgcatgcactgagctgagagataaaatcgcctgcaatggcgatgcctctagttcccagataatccacattagcgatgagaacgagggtaaggaaatgtgcgttttgcgtatgacaagagcacgccggtctcaagtggagcagcaacagttgatcactgtggagaaggcgctagctatactgagtcaacctaccccaagcttagtggtagaccacgagagattgaagaaccttctgaagactgtagtgaagaagagccagaattacaacatcttccagctcgagaacctctacgccgtgatttcccagtgtatttatagacaccgaaaggaccacgacaagacaagtctgatccaaaagatggaacaggaagtcgagaacttcagttgctcacggtag

SEQ ID NO: 179730 - DNA, 1719 bp, synthetic construct
  misc_feature 1..1719: note = Description of Artificial Sequence: Synthetic coding sequence
  source 1..1719: mol_type = other DNA
tgaggcgccctggccctggccgccccccggcggtgccggcagcccctaccaggccgcgattgcgcaccaggcgctccaccagccggggccgtgtcgagggccgggcgcattggactcttcccctcgccagtgtgtacctccgcagcagttcgtagcgggtctgggtatgctaaagacgcactaaacctggcccagatgcaggaacaaacattgcaactggagcagcagtcaaagctgaaggagtatgaggctgccgtggagcagctgaaatctgaacaaattagggcccaagctgaggagcgacggaagaccctgtccgaggagacccggcagcaccaggctcgggcacagtatcaggataagctggcccgccaacgttatgaggaccagctcaagcagcaacaactcctgaacgaggagaatctgcggaaacaggaggaaagcgtgcagaaacaggaggccatgagacgagctaccgttgaaagggaaatggaacttaggcacaagaacgaaatgctgcgggtggaagctgaagctagagcaagagctaaagccgagcgggagaatgccgatattattcgcgagcagattcgattaaaagctgccgaacacagacagactgtcttggagagcattaggacagcaggtactctgttcggcgagggatttagggcttttgtaacagattgggataaggttactgctaccgtcgctggactcactttactcgcggtcggggtgtactctgcaaaaaacgcgacactggttgctggccggttcattgaggccaggctcggcaagccttccttggttagagaaacctcccgcatcacagtgctggaggcactccggcatccaattcaggtgagtcggaggctgctgagccgcccacaagatgctctcgagggagtagtcctttctccatctcttgaagcccgcgtccgtgatattgccattgcgactagaaacacaaaaaagaaccggtcactgtaccgcaacatactgatgtatggcccccctggcacgggcaaaacactgtttgccaaaaagcttgccctgcacagcggaatggactatgcgatcatgaccggaggtgatgtggctcccatgggcagagagggcgtgaccgccatgcataaacttttcgactgggctaatacttcgcggaggggcctcctactgtttgtggatgaggccgatgcattcctgcgaaaaagagctacggaaaagatctcggaggaccttcgtgccaccctaaacgcattcctgtaccgtacaggacaacactccaacaaatttatgctagttctggcctccaaccagcctgagcaattcgattgggcaattaatgacagaattaatgaaatggtgcatttcgacttgcctggacaggaagaacgtgaaaggctggtgcgcatgtactttgataaatatgtcctaaagccagccactgaagggaagcagcggctcaagttggctcagttcgactacggacgtaaatgcagcgaggtggctagacttacagaggggatgtcaggcagggaaattgcccagctggcagtgtcctggcaagctacagcatacgcatcagaagatggcgtgctgaccgaggcaatgatggacactcgcgttcaggatgcggtacagcaacatcagcagaaaatgtgttggttgaaagccgaagggcccggcaggggcgatgaacctagccctagctag

SEQ ID NO: 179731 - DNA, 1905 bp, synthetic construct
  misc_feature 1..1905: note = Description of Artificial Sequence: Synthetic coding sequence
  source 1..1905: mol_type = other DNA
atgagctggctgttcggcatcaacaagggccccaagggcgagggcgctggcccacctccccccctgccccccgcccagccaggcgccgagggtggtggggacagaggactgggtgatagacccgctcctaaagataaatggtcaaactttgatcctactggactggagcgagctgcaaaggctgcacgcgaactggaacactcacgctacgccaaggatgccctcaatctggcacaaatgcaggagcagactttgcagttagagcagcagagtaagctcaaaatgagactggaggcactgagtctgctgcatacactggtttgggcctggagtttgtgtcgggcaggagccgtgcaaactcaggaacgcttgtctggaagcgcctcacctgagcaggtccccgccggggagtgttgtgctctgcaggagtacgaagctgccgtggaacagctgaaatctgagcagattagggcccaggcagaggaaaggcgtaaaaccctctcagaagaaacccggcagcatcaggccagagcccaataccaggataagttagcgcgccagcgctatgaggatcagttgaaacaacagcagctcctgaatgaggaaaaccttcgcaaacaggaggagtctgtccagaagcaagaagctatgcgacgcgcgaccgtggagagagagatggaactgcgccacaagaatgagatgcttcgcgtagaagctgaagcgcgagccagagctaaggccgagcgagagaatgctgacattatccgggagcagatcaggctgaaagccgcagagcatcgccaaactgtcctggagtccatacgtacagccggaaccctgtttggagaaggatttagggccttcgtgacagattgggataaggttaccgccaccgtcgcaggcctgactctcctagccgttggggtctactccgcaaagaacgccactctcgtggccggcagatttatagaagcacgcctggggaagccctccctagttagagagacgtctcgcatcaccgtgctggaggctttgaggcatccaattcaggtatcccggagactgttgtcgcgacctcaggatgctttggagggtgttgttctttctccatctctcgaggctcgcgtcagggacatcgccatcgcgacccgcaacacaaagaagaaccggtcactgtaccgcaacattttgatgtacggaccgcctggcaccggcaagacgctgtttgcaaaaaaactagccctacacagtggaatggattatgctatcatgacaggtggcgacgtcgcgccaatgggtcgcgagggagttactgccatgcacaagctgttcgattgggcaaacacctcccggaggggccttctgcttttcgtggatgaggcagatgcttttctgagaaaaagggccacggagaagatctcagaggatctgcgtgcaaccctgaacgcctttctgtaccggacaggccagcactcgaacaaattcatgctggtgttagccagcaaccagcctgagcagttcgactgggccatcaatgatcgaattaacgaaatggtgcacttcgatcttcccggccaggaggagcgggagaggttagtgcgcatgtatttcgacaaatatgtcctgaaacccgcaactgaaggaaaacaacggctgaaattggcccaattcgactatgggcgcaaatgcagcgaggtggctcggctgaccgagggcatgtcaggtagggaaattgcacaactagccgtgagttggcaggccacagcttacgcttcggaggatggcgtcctgactgaggcaatgatggacacacgcgtgcaggatgcagtgcaacagcatcagcagaagatgtgttggcttaaggccgaaggaccagggcggggtgatgagccgtcaccctcttag

SEQ ID NO: 179732 - DNA, 1761 bp, synthetic construct
  misc_feature 1..1761: note = Description of Artificial Sequence: Synthetic coding sequence
  source 1..1761: mol_type = other DNA
atgagctggctgttcggcatcaacaagggccccaagggcgagggcgcagggccaccgcctccgttaccccccgctcagccaggagccgagggtggaggagaccgcggcctgggtgaccggccagcccccaaagataagtggtctaattttgacccgaccggactagaaagagctgcaaaggctgcgcgagagctcgagcactctagatacgcaaaggatgccctaaatcttgcccagatgcaggagcagacactgcagttggagcagcagagcaagcttaaggagtatgaggccgctgtcgagcaacttaagtcggaacagatcagagcacaagctgaggagcgccggaagaccctatcagaggaaacgcgccagcaccaggcccgtgcccagtatcaggataaattagcccgccagagatatgaggaccagctgaaacagcaacagctgctcaacgaggagaacctcagaaagcaggaagaatcagtgcagaagcaggaggctatgcgccgagcgacggttgagagggaaatggagctccgacataaaaatgagatgcttcgcgtggaggctgaggctcgcgcccgggccaaagccgagcgtgagaacgccgacatcatccgtgaacaaatccgtctcaaagcggctgaacacaggcaaactgttttggaaagtatccgaacagctgggaccctgttcggggagggcttcagggccttcgtcacagactgggataaagtgaccgccacggtggctggcttgacgctgctcgcggtcggggtctatagtgcaaagaatgccactttggttgccggccgcttcattgaagctcgtctgggtaaaccgagcttagtgcgcgaaacatccagaatcacagtccttgaggcactgcggcaccctatacaagtctcccggcgactcctcagtagaccccaggatgccctggaaggagtagtcctgtcacctagcctagaggctagagtgcgagatatcgcaattgctacacgcaacaccaagaagaacagaagcctgtatagaaacattctgatgtacggcccaccagggaccggtaagaccctgttcgcgaaaaaacttgccctccatagcggaatggattacgcgattatgactggcggcgatgtggctcccatgggcagagagggagtgacagcaatgcataagttgttcgattgggcaaacacgtctcgccgggggttgctgcttttcgtggatgaggccgacgccttcctcagaaaaagggctaccgagaagatctcagaagatttaagggcgacgttgaacgcattcctgtaccgcacaggccagcattcaaataaatttatgctggtcctcgctagcaaccaaccagaacagtttgactgggccataaatgaccgcattaacgaaatggtccatttcgacctgcccggacaggaggagagagaaagactcgtgagaatgtatttcgacaaatacgtgctgaagccggctactgagggaaagcagagactgaagttagcccagttcgattacgggcggaaatgctctgaagtggccaggttgaccgagggaatgagcgggagggaaatagctcaactagcggtcagctggcaggcaacagcctacgcaagcgaggacggcgtactgactgaagctatgatggacacaagggtgcaggacgccgtccagcaacatcagcaaaaaatgtgttggttgaaagctgagggaccgggacgcggcgatgagccttccccaagctag

SEQ ID NO: 179733 - DNA, 792 bp, synthetic construct
  misc_feature 1..792: note = Description of Artificial Sequence: Synthetic coding sequence
  source 1..792: mol_type = other DNA
atgtacggcccccccggcaccggcaagaccctgttcgccaagaagctggcactgcattcgggaatggattatgccataatgaccgggggagacgtcgccccaatgggacgggagggggtgaccgccatgcacaagcttttcgattgggcaaacacttcacgccgcggcctgctattgtttgtggatgaggccgatgccttcttgcgaaagagggctacggagaagatttccgaggatctgcgtgccactttaaatgcctttttataccggaccggacagcacagcaacaacccttcacacgtgtcacacggcggatcctctccggctggtcgtccctggctgacaccgcaggcaagatgggctccgcggtttatgttagtgctggccagcaatcagcccgaacaattcgattgggctattaatgatagaattaacgaaatggtgcacttcgaccttccagggcaggaagagcgagagcgtctggtgcggatgtacttcgacaagtatgttctgaaacccgccaccgagggcaaacagagattgaaactcgcacagtttgactatgggaggaaatgtagcgaggtggccaggctcacagaagggatgtccggcagggagattgctcaactggcagtttcctggcaagcgaccgcctacgcttccgaagacggcgtgttgacagaggcaatgatggatactagagtgcaggacgctgtgcaacaacaccagcagaaaatgtgctggttaaaagcagagggaccaggccgaggagatgagccgagtccatcttag

SEQ ID NO: 179734 - DNA, 606 bp, synthetic construct
  misc_feature 1..606: note = Description of Artificial Sequence: Synthetic coding sequence
  source 1..606: mol_type = other DNA
aagctggccctgcacagcggcatggactacgccatcatgaccggcggtgatgtggcccccatgggccgggagggcgtcaccgctatgcataagctcttcgactgggctaatacctctcggagagggctgctgctcttcgtggacgaggccgacgccttcctgaggaagcgtgcaaccgagaaaatatccgaggacctcagagcgaccctgaacgccttcttataccgcacagggcagcatagcaacaatccgtcccatgtgtcacatggcgggagcagcccagccgggaggccatggctgacaccacaggctaggtgggccccgcgattcatgctcgtacttgcctccaaccagcccgaacagttcgattgggccattaatgaccgcatcaacgaaatggtccactttgacctgcccggccaggaggaacgggaaaggctggttagaatgtatttcgataaatacgtgctcaaacctgccactgaggggaagcagagactcaagctggctcagttcgactacgggagaaagtgcagtgaagtggcaaggctgactgagggcatgtctggcagagagatcgctcagctcgcagtatcttggcagtag

SEQ ID NO: 179735 - DNA, 435 bp, synthetic construct
  misc_feature 1..435: note = Description of Artificial Sequence: Synthetic coding sequence
  source 1..435: mol_type = other DNA
atgtgcctgtgccggcccctgctgccccagcgggcccagtaccaggacaaactagctaggcagcgatacgaagatcagctgaaacagcaacagctcttgaacgaggagaacctacggaagcaagaagaatccgtccagaagcaagaggccatgcgtagagccaccgtggagcgcgagatggaactgcggcataaaaatgagatgttgcgagtggaggctgaagcaagggctcgggccaaagctgagagagaaaatgcagacataatcagagaacaaatccgactgaaggcagctgaacacagacagacagtgctagagagcattcggaccgcggggacactcttcggcgaaggatttcgggcatttgtcacggactgggacaaggtaacagcaaccgtggctggcttgacattgctcgctgtcggcgtgtactag

SEQ ID NO: 179736 - DNA, 309 bp, synthetic construct
  misc_feature 1..309: note = Description of Artificial Sequence: Synthetic coding sequence
  source 1..309: mol_type = other DNA
atgcggctggaggccctgagcctgctgcacaccctggtgtgggcctggtcgctgtgtagggcaggtgctgttcagacccaagaaagactgtccgggagtgcctcccctgagcaggtgcctgccggagagtgctgcgcccttcaagagtatgaggccgctgtggaacagctgaaaagcgaacagatccgtgcgcaggccgaggagagacggaaaaccttgagtgaggaaactaggcaacaccaagcccgcgcccagtaccaggataagctcgcccggcagaggtatgaggaccagctgaagcagcagtag

SEQ ID NO: 179737 - DNA, 1524 bp, synthetic construct
  misc_feature 1..1524: note = Description of Artificial Sequence: Synthetic coding sequence
  source 1..1524: mol_type = other DNA
atgcaggagcagaccctgcagctggagcagcagagcaagctgaaggaatacgaagccgcagtggaacagctgaagtctgaacaaataagagcacaagcagaagaaaggagaaaaaccctcagtgaggaaaccagacaacaccaggcccgtgctcagtaccaggacaaactagctcggcagcgatatgaggaccagcttaaacaacaacaactgctgaatgaggagaacctaaggaagcaggaggaatcagtgcagaagcaggaggccatgcggagggctaccgtggaaagagagatggaattgcgtcacaagaacgaaatgctgcgcgttgaggccgaggcccgagccagagcaaaagcagagcgagagaatgcagatatcatacgggagcagatcaggttaaaagccgcagaacacaggcagactgtgctggagtcaatccggacagctggaaccctttttggagagggattccgggcctttgtcacagactgggataaggtcactgcaacagtggctgggctgaccctcttggccgtaggagtatatagcgcgaaaaacgccacactagttgccggacgatttattgaggcccgcctcggaaagccatctctggttagagaaacctccaggatcaccgtgctagaagctctcaggcaccctatccaggtcagtaggcggctgctgagccgtccacaggacgccctggaaggcgtcgtgttatctccctctttggaggcccgggtacgagatatcgcaatcgcaacaagaaataccaagaagaaccggagtctgtacaggaatattctgatgtacggaccccccggaactggcaagactctctttgccaaaaagctggcactgcattccggaatggattatgctatcatgaccggcggagatgtggcccctatgggtcgtgagggggtgaccgcaatgcataagttatttgactgggctaacacttctcggagaggactgttgttgttcgtggacgaggccgatgctttcctgagaaaaagggccaccgagaaaatttcagaggatttgagggccaccctgaacgcttttctgtaccgtaccggacagcactctaacaaatttatgctggttctggcatcgaaccagccggaacaattcgactgggccattaacgataggattaacgaaatggtccattttgatctgcccggtcaggaggagagggaaagactggttagaatgtattttgacaagtacgtcctgaaaccagctacagagggcaagcagagactcaagctggctcagttcgattacggacgcaaatgttcggaggtggcacgactcacagagggaatgagtggccgggaaattgcccagctagcagtgtcttggcaggctacggcctatgcctctgaagatggcgtcctcacagaagctatgatggatactcgggtccaggatgccgtgcagcaacaccagcaaaaaatgtgctggctcaaagctgaaggaccagggagaggcgatgaaccatcccctagctag

SEQ ID NO: 179738 - DNA, 1947 bp, synthetic construct
  misc_feature 1..1947: note = Description of Artificial Sequence: Synthetic coding sequence
  source 1..1947: mol_type = other DNA
atgagctggctgttcggcgtgaacaagggccccaagggcgagggcgccggacccccaccaccgctcccaccagcccaacccggggcagagggcggcggcgatagaggcctgggcgataggccagctcccaaggataaatggtctaacttcgatcccaccggactcgaacgagctgccaaggctgctcgggaactcgagcatagccgatatgccaaggaagcactgaatctggcgcagatgcaggaacagaccctccagctagagcaacagagtaaactcaaagagtacgaagctgcagtggagcagctgaaatccgagcagattagagcgcaggcggaagagcggcgtaaaactttgtctgaagagacacgacagcaccaagctcgcgcccaatatcaggacaaactggcacgacaaaggtatgaagatcagctcaaacagcagcaattactcaacgaggaaaacctgcggaagcaggaagagtccgtccagaaacaagaggcaatgcgccgggcaaccgtggagcgagaaatggagctccgacacaagaatgagatgcttagggtggagacagaggcccgggcgcgcgctaaagcagagagggaaaacgccgatatcatcagggagcagatcagactaaaggcatctgagcaccgacaaacggttctcgaaagtattcgtaccgccggcacactgtttggagagggttttcgagcatttgtcacagatagagacaaggtgactgcgactgtggctggactcacgctgctagctgtgggggtttacagtgcgaaaaatgcaacagctgtcactgggcggttcatcgaggccaggctgggaaagccgtccctcgtgagggagacatcccggatcaccgtgctggaggctctgaggcacccgatccaagtaagccgcaggctcctgtctagaccccaggacgtgctggaaggcgtagtgctgagtccctcactcgaggctagggtacgagacattgccattgcaacaaggaacactaagaaaaacagaggcctgtatcgacacattctattgtatggccctcctgggacaggcaaaacactgtttgcaaagaaactcgctttgcatagcggcatggactatgccattatgaccggtggagatgtcgctcccatgggacgggagggtgtaaccgctatgcataagctgtttgactgggctaatacgtctagacgaggcttgctgctcttcatggacgaggccgatgcattcttaagaaaaagagctactgaggaaatcagtaaagacctcagggcgaccctaaatgccttcttgtatcacatgggccagcactcaaataagttcatgctggtcttagcgtctaacttgcctgaacaatttgattgcgcaatcaatagcagaatcgacgtcatggtgcacttcgacctaccgcagcaggaggagcgagagcggttagtcaggttacacttcgataattgtgtcctgaaacccgccaccgaaggaaaacgcagactaaaactggcccagtttgactatggacggaagtgtagtgaagtggccaggctgacggagggcatgagtggacgggaaatcgctcagctggccgtgagttggcaggccacagcgtacgcctccaaagatggagtgcttaccgaagcaatgatggatgcctgtgtgcaggacgctgtccagcagtacaggcagaaaatgcgatggttaaaagctgagggtcctggaagaggagtggaacaccctttgagtggtgttcagggggagaccctcacaagttggagcctagctacagatcccagttacccatgcttggccgggccgtgcactttcaggatttgcagctggatgggcactggactatgcccaggtcccttgtctcctagaatgagctgtggagggggtcggcccttttgtcccccggggcacccacttctgtag

SEQ ID NO: 179739 - DNA, 900 bp, synthetic construct
  misc_feature 1..900: note = Description of Artificial Sequence: Synthetic coding sequence
  source 1..900: mol_type = other DNA
atgagctggctgttcggcgtgaacaagggccccaagggcgagggcgcaggtccaccgccaccattgccccccgcccaacccggcgccgaaggcggcggtgatcgcggtctcggtgaccgtcctgctcccaaagacaaatggtcaaattttgatcctacaggcctcgagcgtgccgctaaagcggccagagaactggagcactctaggtatgcgaaagaagctctcaatttggcacagatgcaggagcagacactgcagttggaacaacagagcaaactaaagcagttgctcaacgaggagaatctgcgcaaacaggaggagagcgtgcagaaacaccggcaaaccgtccttgaatcaattcgaactgctgggaccttatttggggagggtttccgagctttcgtgactgatagagataaggtgacagcaacggttgccggattgaccttgcttgctgtaggggtgtactccgccaagaacgccacagctgtgaccggaaggttcatcgaagccagactggggaagcccagtcttgtacgagagacttctaggatcaccgtcttagaggcactgagacacccaatacagcaggtatcaaggcgcctgctttcacgaccccaggatgttctggaaggggtggtcttgtccccttccctcgaggcgcgggttcgggatatagcgatcgctacgcgcaatactaagaaaaacaggggactttatcgccatatactcttatatggtcccccgggaaccggcaagactctgttcgccaagaaacttgctctgcatagtgggatggattatgcgataatgactggcggagacgttgcacccatgggacgcgaaggcgtgacggccatgcacaagctgtttgactgggctaacacttccagacggtag

SEQ ID NO: 179740 - DNA, 351 bp, synthetic construct
  misc_feature 1..351: note = Description of Artificial Sequence: Synthetic coding sequence
  source 1..351: mol_type = other DNA
atgcggcgggccaccgtggagcgggagatggagctgcggcacaagaatgaaatgctgagagtcgaaacagaggccagggcccgcgccaaagcggagcgagagaatgcggacattatcagggaacagatcagattgaaggcctcagaacatcgtcaaaccgtgctggaatccatccgcaccgcaggtaccttgttcggcgaggggttccgggcctttgtaaccgatagagacaaagtgaccgccactgtcaatatcttcattaaacaggggtggcaagttgcggagcgccagcacttcaggcggcgcaggtgggctgaccacgaggttcggcggtcgcgctcgagctggtag

SEQ ID NO: 179741 - DNA, 1449 bp, synthetic construct
  misc_feature 1..1449: note = Description of Artificial Sequence: Synthetic coding sequence
  source 1..1449: mol_type = other DNA
atgctgcgggtggagaccgaggcccgggcccgggccaaggccgagagagagaacgcggatattatcagagagcaaattcggctgaaggcgagcgaacaccggcagaccgtgttggagagtatccgcactgcagggactctgttcggggaagggttccgagctttcgttactgatcgggacaaggtcaccgcaaccgttgccgggctaaccctcctggcagtcggggtatattctgcaaaaaatgctactgcagtcacaggtcggttcattgaggcccgcctcggcaagccaagcctggtgcgtgaaacatccagaattaccgtacttgaggcgttgagacaccccattcaggtttcccgccggctgctctcgcgccctcaggacgtcctggagggcgtggttctctcagtgtcccccagcctggaggcgcgtgtgagagatattgctattgcgacgcgcaacacaaagaagaacagaggcctataccgacatatcctcctgtatggaccgccaggcaccggcaagacactcttcgctaaaaaactagccctccattcgggaatggactatgctataatgactgggggtgacgtggctccaatgggacgcgagggtgtgacagcaatgcataagctctttgactgggcaaatactagccgacgggggctacaggaagagatctccaaagacctgagagccacactgaatgctttcctttaccacatgggccaacactccaataaccgttttatgctggtcctggcctctaatttacctgagcagttcgactgcgccatcaacagtcggattgatgtcatggtgcacttcgatctccctcagcaggaggagcgcgagcgcctcgtacgattacacttcgataactgtgttctgaagcccgctacagaaggcaagaggatgggcgtcggccagctgccggtcttcagaccccccccccatggcgtgggttccgctgctttggccgccagcttgggtaattcatttccaaggcgattaaagttagcccagtttgactacgggcgcaagtgcagcgaggtggcccgactcaccgagggtatgtccgggagggaaatcgcccagttggccgtcagttggcaggctacagcctacgcgtcgaaagatggagtcctaactgaagctatgatggatgcctgtgtccaagacgcagtccagcaatacaggcagaagatgcggtggctcaaagctgaaggcccaggtcggggcgtcgaacaccctctgagcggggtacagggtgagacgctgacgagttggagtctcgccacagatcccagctacccatgcctcgctggcccttgcacttttcggatctgctcctggatggggaccggactctgtccaggaccactatcgcctaggatgtcctgcggcggggggcgcccattttgccccccgggtcatcccctactctag

SEQ ID NO: 179742 - DNA, 354 bp, synthetic construct
  misc_feature 1..354: note = Description of Artificial Sequence: Synthetic coding sequence
  source 1..354: mol_type = other DNA
atgcggcgggccaccgtggagcgggagatggagctgcggcacaagaatgaaatgttaagggtggaaactgaagcaagggccagagcgaaggcagagcgagaaaacgcagatattattcgggagcaaattcggctaaaggcgtcggaacatcggcagaccgtattagagtctatacgcacagccggaaccttgtttggggaggggtttcgggccttcgtgaccgatcgtgataaagtgactgcgactgtcaatattttcattaagcagggctggcaggtcgcagaaaggcagcaccatttcagacgccgccggtgggcagatcacgaggtccgccgctcccgttcatcctggtag

SEQ ID NO: 179743 - DNA, 5535 bp, synthetic construct
  misc_feature 1..5535: note = Description of Artificial Sequence: Synthetic coding sequence
  source 1..5535: mol_type = other DNA
atggtgggcgtgctggccatggccgccgccgccgcccccccccccgtcaaggactgtgaaatcgaaccgtgtaagaagcgaaagaaggatgatgacacctccacatgcaagactattaccaagtacctaagcccactcggcaagactcgagacagggtgttcgcaccacccaagccgtccaatatcctcgactattttaggaaaacctccccaacaaacgagaagacccaactaggaaaggaatgcaagatcaaaagccctgaatccgtgccagtggatagcaacaaagattgtaccacacctttggaaatgtttagcaatgtcgaattcaagaaaaaacgtaaacgcgtgaacttaagccaccagctgaacaacatcaaaacagaaaatgaagcgccaattgaaatcagttccgatgactcaaaggaagactacagcctgaataatgacttcgtcgaatcttctaccagcgtgctgcgctacaagaaacaagtcgaggtcctggctgagaatatccaggatactaagtcgcagccgaacaccatgaccagcctgcagaattctaagaaggtaaaccctaagcaagggacaactaagaacgactttaagaagctgcgtaagcggaagtgtagggacgtggtcgatcttagcgaaagcctccctttggccgaggaactcaacctgttgaagaaggacggcaaggatacaaagcaaatggaaaatacaacaagccacgcaaacagcagggacaacgtcaccgaagctgcgcagctgaatgatagcatcatcactgtgtcctacgaggagtttctgaagagccataaggagaacaaggtcgaagaaatacctgacagcactatgtctatttgtgtgccttccgagactgtggacgagatagtcaagtcaggctatatctcagagtccgagaactccgaaatttcccagcaggtaagattcaagactgttaccgtgctagcccaggttcacccaatccctcccaaaaaaaccggaaagataccaaggatttttttaaaacagaagcagtttgagatggagaactctttgtcagatccggagaatgaacagacagtccagaagcggaagtcgaatgtggtcatccaggaggaagaactagagctggcggtcctggaagcgggctcctctgaagcagtgaaacctaagtgtacactcgaagagcggcagcagttcatgaaggcattccggcagcccgcttctgacgccttgaaaaacggtgtgaagaaatcaagcgacaagcaaaaggatctcaatgagaagtgtctgtatgaagtgggaagggatgataattctaagaagataatggagaacagtgggatccagatggtcagtaagaatgggaatctgcagctgcacaccgataagggctccttcctcaaagaaaaaaataagaaactgaaaaagaagaacaagaaaaccctggacactggagctattcccgggaaaaatagagagggcaacacacagaaaaaggaaacgactttctttctgaaagaaaaacagtatcagaataggatgtcacttagacagagaaaaaccgagttttttaagtcatccaccttattcaataatgaatccctagtatacgaggatatcgcaaacgacgatcttctcaaggtctcttcgctttgcaataacaacaagctcagtcggaagacttccattcccgtcaaagatataaagttaacacagtctaaggctgaatcagaggctagtctccttaacgtatctacaccaaaatctacccgccggagcggccggatcagtagcacaccgacaaccgagacaatcagaggtatcgatagcgacgacgtccaggacaattcgcaactgaaagcctccacccagaaggcagccaatctttcagagaaacacagtctttataccgccgagctcatcacggtcccttttgattctgaaagccctatacgcatgaaattcactcgcatcagcacccccaagaagtctaaaaaaaagtcaaacaagcgctccgaaaagtctgaagccacagacggcgggttcacttcacaaattcggaaagcttcaaatacctctaagaatatctccaaggctaaacagttaattgagaaggctaaggcactgcatatctcaaggtctaaagtgaccgaggagatcgccatcccactacgccgctcttccaggcatcaaaccctaccagagcgtaagaagctgtccgagaccgaggattctgttatcattatcgattcctctcccacggccttaaagcatccggagaaaaaccaaaaaaaactgcaatgcctcaacgacgtgctaggcaagaagctgaatacgtctacgaaaaatgtgcccgggaagatgaaggttgcccccctgtttctcgtgagaaaggcccaaaaagccgctgatcccgtgccttcctttgacgagtcaagtcaggatacatccgaaaaatctcaggactgcgacgtgcaatgcaaggctaagagagattttctgatgagcgggctgccagacctgttaaaacggcagattgcgaagaaagccgccgctttggatgtgtataatgctgtgtctacctcctttcagcgggtggtacacgtgcaacagaaggacgacgggtgttgcctgtggcatctaaaacccccctcctgtcctctgctgactaaatttaaggagctcaatactaaggtaatagatttatccaagtgtggaattgcacttggggagtttagcactcttaattctaaacttaaaagcggtaatagcgctgctgtattcatgaggacccggaaggaattcaccgaagaggtacgcaatctgctgctcgaggagattcgctggtccaacccagaatttagccttaagaagtattttcctctgttactgaagaaacaaatagaacaccaggtattgtcaagcgaatgccacagcaagcaggagctggaagctgatgtgtcccacaaagagaccaagaggaaactcgtggaagccgagaacagcaagagcaagcgcaagaaaccgaatgaatactctaagaatctagagaagacgaacaggaaatctgaggaactgagcaagaggaataacagctccggtattaaactggattctagtaaagacagcgggactgaagacatgctttggactgaaaagtaccagcctcagaccgcatcagagctgatcgggaacgagttggccataaaaaaactgcactcctggctcaaggactggaagagaagagctgaactcgaggagagacagaatctgaagggaaaacgggacgaaaagcacgaagatttttccggtggcatcgacttcaagggctcctctgatgacgaagaggaaagtaggctgtgcaatacagttttgattaccggcccgaccggagtgggtaagaccgccgctgtttacgcatgcgcccaagaactgggcttcaagatcttcgaggtcaatgcgtcgtcccagagaagcggtaggcagatcctgtctcaattgaaggaggccactcagtcacatcaggtcgacaaacagggtgtgaactcacaaaaaccatgtttttttaattcctattacattggcaagagccccaaaaagatctcctcacccaagaaggtggtgaccagccctcggaaagtgccccccccttcacccaagtcttctggtccaaagcgggccctcccacctaaaacactcgccaactattttaaagtctcgcccaagccaaaaaataacgaggagatcggcatgctgctggaaaataataaagggattaagaatagtttcgagcagaagcagatcacccaaacaaagtctacaaacgctaccaattcaaatgttaaagatgtaggtgcggaggaaccaagcagaaagaacgctacaagtctgatcctgtttgaagaggtagatgtgattttcgatgaagatgctgggttcctgaacgcgattaagacttttatggctacaacaaagagacctgtcatcctgaccacaagcgatcctacattttccctgatgtttgacggctgttttgaagagatcaagttttcaacgccttccctgctaaacgtggccagttatctgcagatgatatgtcttacagagaatttcaggactgatgtaaaagacttcgtaacactgctgacagccaatacttgcgacatcaggaaatccatcctgtacctgcagttctggattcgttctggcggtggggtactggaagaacggcctctgacactgtatcgaggtaactctagaaatgtgcaactggtctgtagcgaacacggacttgacaacaagatttaccctaaaaacacgaagaaaaaaagggtcgatctgcctaagtgtgatagcggttgcgctgaaactctctttggattgaaaaacatattttctcccagcgaggacctgttctcctttctgaagcacaagatcacaatgaaagaggagtggcacaaattcatccaactgttgactgagttccagatgcgtaatgtagatttcctgtacagcaatcttgagttcatcctaccactacccgtcgacactatccctgagactaagaatttttgcgggccttcggttaccgtcgatgcctcagcggccaccaaatccatgaattgcctcgctcgcaagcatagcgagcgggaacaacccttgaagaagagccaaaaaaagaagcagaaaaagactctggtcattctggatgactccgacctgttcgataccgacctcgattttccagaccagtccattagcttatcttctgtgtccagcagctccaacgcagaagaatcaaaaaccggtgatgaggagtccaaggcgcgggacaaggggaataacccagagactaaaaagtccataccatgcccaccaaagacaacggccgggaagaagtgcagtgccttggtttcacactgtctgaacagcctctcagagtttatggacaatatgtcattccttgatgcactgctcactgacgttcgggagcagaacaagtatggacgtaacgacttcagttggaccaatggaaaagtgacaagcggcctgtgtgacgaattcagcctggaaagcaatgacggctggacttcacagtcctctggcgaacttaaggccgcggccgaagccctctctttcaccaaatgctcgtcagcaatctcaaaagcccttgagactctcaattcttgcaaaaagttgggtcgggacccgactaatgacttgactttctatgtgtctcagaagcggaataacgtctacttctcacagtctgctgccaacttggacaatgcatggaagagaattagcgtgatcaagagcgtgttttccagtcgaagcctgctgtacgtggggaaccgtcaagctagtattatagagtatctgcccacgttgcggaacatctgtaaaactgagaaactcaaggaacaggggaagagtaagcggcggtttcttcactatttcgagggcattcacctcgacatcccgaaggaaacggttaacaccctggcggcagattttccttag

SEQ ID NO: 179744 - DNA, 3543 bp, synthetic construct
  misc_feature 1..3543: note = Description of Artificial Sequence: Synthetic coding sequence
  source 1..3543: mol_type = other DNA
atgagcgccgacagcagccccctggtgggcagcacccccaccggctacgggacactgacaattggaacctccattgaccccctgtcatcctccgttagctccgtaaggctctctgggtattgcgggtccccgtggagggtgattggctatcatgtggtcgtgtggatgatggccggtatccccctgctcctcttcaggtggaaacctctctggggagtgaggcttcggctgaggccctgtaacctcgcccatgccgagacccttgtgatcgaaattcgcgacaaggaggattccagctggcagcttttcacagttcaggtgcagaccgaggcaatcggggaaggctccctcgaaccaagtcctcagtctcaggctgaagacgggagatcccaggccgctgtgggcgctgttcccgaaggggcctggaaggatacagctcagctgcacaagagcgaagaagcggtcagcgttggccagaaacgggtcctgcggtattacttattccaggggcagcgctacatctggatcgagacccagcaagctttctaccaggtctctctcctggaccatggacggagctgtgacgatgtgcacaggtcacgccacggactctcgctgcaagatcaaatggtgcgcaaggccatctatggacctaatgtaatatccatccctgtcaagagctaccctcaactcttggtagatgaagctctgaatccatactacggatttcaggcctttagtatcgctctgtggcttgcggaccattattactggtacgcattgtgcatcttcctcatctcatcgatcagtatatgcctgtcgctatacaagacgagaaagcagtcccaaacattaagagatatggtgaagctgagtatgcgggtgtgcgtttgtcgtcccggaggcgaagaagaatgggtagactcgtctgaactagtccccggcgactgcttggttctacctcaagaaggtgggctgatgccatgcgacgccgccctggttgctggcgagtgtatggtgaatgagtcctcactgacaggcgagagcatccctgtgctcaaaacagcgctgcctgaggggctgggtccatactgcgcagaaactcaccgcaggcatactctgttctgtggcacgttgattcttcaggctagagcgtacgttggccctcatgtcctagccgtggttaccagaactggattttgtacagctaagggaggactagtttcgagtatccttcatcctaggccgattaattttaaattctataaacactcgatgaagttcgtggccgcactgtcagtgttagctctcctcgggactatctactccatttttattctgtatcggaaccgggtgccactgaatgaaattgtaatccgggccctggaccttgtgactgtggttgttccccccgcactacccgccgcgatgaccgtgtgcacactctacgctcagagcaggttgcgaaggcaaggcattttttgcattcaccctctgcgcattaatttgggcggcaaactgcagcttgtctgttttgacaaaacaggaaccttgactgaggacggactggacgtcatgggggtagtcccactgaagggacaggcatttctcccacttgttccagagccccggagactccctgttggccccctgctgcgagcactggccacttgccatgccctctcgaggctgcaggatacgcctgtgggtgatccaatggacctcaaaatggttgaaagtaccggctgggtcctggaggaagaaccagccgccgactctgcctttggtacgcaggtgcttgccgtcatgcggccacctctgtgggaaccccagctgcaggcaatggaagagcccccagttccagtgtctgtcttacaccgcttccccttttcaagtgcactccaacgcatgagcgtcgtcgtcgcgtggcctggagctactcagcccgaagcctatgtgaagggttctcctgagctggttgctggtctgtgtaaccctgaaacagtgccaacagattttgcccagatgctacaaagttacaccgcagccggttacagagttgtggccctcgcttcgaaacccctccctacagtcccctcattagaggctgctcagcagctcacccgagacacggtcgaaggggacctcagcctcctggggctgctagtgatgcgtaacttgctcaaaccgcagactacgccagtcatacaggcacttagaaggactcgcatcagagcggtgatggtgacgggagacaatcttcagacagcagttacagtagcacgcggatgcggcatggtagcccctcaggagcacctgatcattgtgcatgccacgcacccagagagaggacaaccagcgtccctggaatttctgccaatggagtcaccaacagctgtgaatggggtgaaggatccggaccaggccgcatcttacacagtcgagcctgacccccgatccagacatctggcgctgtctggacctacatttggaatcatcgtcaagcatttccccaaactgcttcccaaggtattagttcagggaacagtgtttgcccggatggcgcctgagcagaagactgagctcgtgtgtgagcttcagaaactgcagtactgtgtgggcatgtgcggcgacggggccaacgattgcggagccctcaaggccgccgacgtcggcataagtctgtctcaggccgaagcgagcgtggtgtcaccgtttacgtccagcatggcctcaatcgaatgtgtgcccatggtgatacgagaggggagatgcagcttagataccagcttttctgtattcaaatacatggccctgtacagcttaacgcaattcatctccgtattgatcttatatacaatcaataccaacctcggagacctccagtttctggcaatcgacttagtaatcactacaaccgtggctgttctgatgtctcgcaccggcccagccctcgtgttagggagagtccggcccccaggtgcgctcctcagcgtgcccgtgctgtcatcactgcttttgcagatggtcctggttacaggggtccagctcggcggctacttcctaaccctagcccagccttggttcgtccccctcaatagaacggtcgcggcccctgacaatcttcccaactacgaaaatactgtggtgttctccctaagctcatttcaatacctgattctggcggccgctgtgagtaaaggggcacctttccggcggcctctgtacaccaacgtaccatttctggttgcgctggctctgctgagttcagtgttggtcgggctggtgctagtacccggcctcctgcaaggccccctggcactgagaaatattacagatacaggctttaaactgcttctgcttggtctagttaccctgaattttgttggcgcctttatgctggagtccgtgctggaccagtgcctgcctgcctgtttacggcggcttagaccgaagagggctagcaagaaacgttttaagcagctggagagagagctggccgaacagccatggccccccctgcccgctggaccactgaggtag

SEQ ID NO: 179745 - DNA, 3477 bp, synthetic construct
  misc_feature 1..3477: note = Description of Artificial Sequence: Synthetic coding sequence
  source 1..3477: mol_type = other DNA
atgagcgccgacagcagccccctggtgggcagcacccccaccggctatggaacactgactattggaaccagcattgatccccttagctcatccgtctcctctgtcagattgagcggctattgtggctctccctggagggtgatcgggtatcatgtggtcgtttggatgatggctggcattcccctgttgctttttagatggaaaccgctgtggggcgtgaggctgcgtcttcggccttgcaacctagcccacgctgagacattagtcatcgagattagagacaaggaggacagcagttggcagctgttcaccgtccaagtgcagaccgaggcaatcggcgaggggagtctggagcccagccctcagagtcaggcggaagatggacgttcccaggcagctgtcggggcagtgccagagggcgcgtggaaggatacagcccagctgcacaagtctgaggaagccaaaagggtgctgcgttattatttgtttcaaggacagcggtacatttggattgagacgcagcaagcattttatcaggtaagtcttttggatcacggaagatcctgtgatgatgtgcataggagcagacatggcctgagcctccaggaccagatggtcaggaaggccatctacggccccaacgttatctctatcccagtaaaatcctacccccagttgctggtcgacgaggccttaaacccatactacggtttccaggctttctctattgccttatggcttgccgatcattattactggtatgccctgtgcatatttctgattagttccatcagcatttgcttgagcctttataagacccgcaaacagagccagacacttcgggatatggtcaagctgtccatgcgggtctgtgtctgcagacctgggggagaggaagagtgggtagatagctctgaattagtgccaggggactgcctggtcttgcctcaagagggggggcttatgccttgcgatgctgctcttgtggcaggagagtgtatggtcaatgagtctagtctgacaggcgaatccatccccgtcctgaaaacagcccttccggaaggactgggcccgtactgcgcggagacccataggagacacacgcttttctgcgggacgctgatcctccaggcaagagcgtatgttggtcctcatgtgctcgctgtggttacgaggaccggattttgtacggctaagggtggactcgtgagcagcatcctccatcctagaccaatcaatttcaagttctataagcattccatgaaattcgtggcggctcttagcgtcctggccctgttaggaaccatctatagcatattcatcctgtataggaatagagtacccctaaacgagattgtaatccgagcactcgatctcgttacagtggttgtgcctcccgccttacccgctgccatgacagtctgcactctgtacgctcagtctcgtttgcgtcggcagggcatcttttgcatccacccgcttcggattaacctggggggaaagttgcagctggtatgcttcgacaaaacgggcacacttaccgaagacggcctcgatgttatgggagtcgtgcccctcaagggccaggctttcctcccccttgtgccagaaccacgtcgtttaccagtgggtcccctcctacgggccttagctacctgtcatgccctgagccgccttcaagacacccccgtaggggaccccatggacttgaagatggtggagagcactgggtgggtgctggaggaggagcctgccgccgactctgcttttgggactcaggtcctagcggtgatgcggccacctctctgggagccccagctccaagccatggaggagccacccgtgcctgtgtcggtgctgcatcggtttcccttctcatcagccctgcaaagaatgagtgtggtggtggcttggccaggcgccacccagcctgaagcctacgttaaggggtctccggagctggtggctggactatgcaaccctgagaccgtgcccaccgacttcgcacagatgctacagtcctatacagctgcagggtatcgggttgtggctctcgcatcaaaacccctgccaacggttccttctctggaggccgcgcaacagcttacccgtgacacagtcgaaggggatctctcattattgggactgctagtgatgcgcaatctgttgaagcctcaaaccacgccagttattcaggctcttcgaagaacccgaattagagccgtgatggttacaggggacaatctgcagacagcagtcaccgtggcccgcggctgcggaatggtagccccccaggaacatttgattatcgtgcatgctacccaccctgaaaggggccaaccagctagtttggaatttctgcccatggagtctcctactgcagtgaacggggtcaaggtcctggtccagggtaccgtgttcgctagaatggccccagagcagaagaccgaactcgtctgcgagttgcagaagttacaatattgtgtgggtatgtgcggagatggagcgaatgactgcggagccctcaaggccgctgatgttggaatctccctgtcacaagctgaagccagcgtcgtgtcgccctttacctcttccatggccagcattgaatgtgtgcccatggttataagagaaggccgatgctcccttgatacatctttttctgtatttaagtacatggcactgtatagtcttacccaattcattagcgttctcatcctgtacaccataaatacaaatctgggtgatttgcagttcctggcaattgatctggtcatcacaacaaccgtggccgtgttaatgagccgcacgggacctgccctggtgttaggaagagtccgacctccgggtgccttactgtcggtcccggtacttagttcattgttgctccagatggtcctggttactggtgtgcagctgggcgggtattttctcacgcttgcccaaccttggtttgttcctttgaacagaacagtggccgcccctgacaaccttccaaattacgagaacacagtggtgttctcactctccagctttcaatacctaatccttgcggccgccgtttccaaaggcgccccttttagacgccctctgtacacaaatgagcgagccaggcccgtgccccccaggctgcctgcccctcccccagcccaggccggtctccaagaggctctgcaggccgcgggcactcgcgctgggcgggccgctttagcagccgctgcaaggcgccccccggaggtcgtacaggcccacggtcatccaaggcactggaactcattgcccttgtcacaccagctagacccctcccccgctacccccccaccaccccctcccacaagcttaagactggccacggtgtatacaccgccccctcgaccgccccccccatggggatcggtcgattactgtcctttaccatggacaatcccgcgcagggggggatcaccccagctgccaagcgttttgctcagcgtgtag

SEQ ID NO: 179746 - DNA, 3528 bp, synthetic construct
  misc_feature 1..3528: note = Description of Artificial Sequence: Synthetic coding sequence
  source 1..3528: mol_type = other DNA
atgagcgccgacagcagccccctggtgggcagcacccccaccggctatggaactttgactatcgggacctccatcgaccctctatccagttcagtgtcctctgtgagattatctgggtattgtggcagtccctggagagtcatcggctaccatgtggtggtctggatgatggccggaattccgctgctgctcttccgctggaagcctctctggggggttcggctgcgtctccgtccctgtaacctggcacatgccgagactttggtcattgaaattcgcgataaggaagacagttcttggcaactgtttactgtacaagtacagaccgaagctatcggagaaggctccctggagccttctccccaatcccaggccgaagacggaagatcacaggccgccgtgggcgccgttcccgaaggcgcgtggaaagacacagcacagctgcataaatcagaggaagcgaagcgggtgctccggtattatctctttcagggacagcgctatatctggattgagactcagcaggcattctatcaagtgtcactgctcgatcatgggaggagctgtgacgatgttcatcggagtaggcacggactgtctctgcaagaccagatggtccggaaagctatctacggccctaacgtgatcagtatcccagtgaagtcctacccgcaactgctcgtggacgaggctcttaatccctactatggctttcaggcattctccatagccttgtggctggccgaccattattattggtatgctctttgcatcttcctcatatccagcataagcatctgcctctccctttacaagactagaaaacagagtcagaccttgcgcgatatggtgaagctgagcatgagggtgtgcgtctgccgtcccggcggggaggaagaatgggttgatagtagcgagcttgttcccggagactgcctggtactgccgcaggaaggtggattgatgccgtgcgacgcagcactggtggccggcgaatgcatggtcaatgaatcttcccttaccggggagtccattccagtcctgaagaccgcattacctgagggactgggaccctactgtgctgagacccatcggcggcatacgttattttgcgggacattaatcctgcaggcacgggcctatgtcggaccacacgtgttagccgttgtcacaaggacgggattttgcacagcaaagggaggcttagtgtcttcaatactccacccccgtcctatcaattttaagttttacaaacacagcatgaaattcgtggcggctctgtcagtgttggctctgctcggcactatctacagtatattcatcttgtatcgtaaccgtgtccctctgaatgagattgttatccgggctcttgacctcgtgaccgtagtggtcccgcccgctctgcctgcggcaatgaccgtgtgtactctgtatgcacaaagtcgactgcgcaggcaagggatcttctgcatccacccacttagaatcaatcttggaggcaagctgcaattggtgtgttttgacaagacaggaacccttacggaggacgggctggatgtgatgggggtcgttccactgaaaggtcaggcctttcttccactggtgcccgagccaagaagactgcctgtgggaccactgttgcgcgcactagctacgtgccatgcgctatcccggctccaggacaccccagtgggcgaccccatggacctgaaaatggtggaaagcactggctgggtgctggaggaggaacccgctgcggattccgcctttggtactcaggttctggcagtgatgcggccccccctctgggaaccacagctacaagccatggaggaaccgccagtgccagtttccgtcttgcaccggtttcccttctcctctgcgttgcagagaatgagtgtcgtagtggcctggcctggagccactcagcccgaggcctatgttaagggttccccagaattggtggctggcctctgcaatccggaaaccgtccctaccgatttcgcccaaatgctgcagagctacacggccgctggttaccgggtcgtggccctggcttctaagccactgcctacggtcccttcgctggaagcagcccagcagctgactcgcgatacagtggagggtgacctgtccctgttaggcttgctcgtgatgagaaatctcttgaaaccccagactacccccgtcatccaagccctcagaaggactcgaatcagagccgtcatggtgactggtgataatctgcaaactgccgtgacggtcgcacgagggtgtggaatggtcgccccccaggaacacttaataattgttcatgcgacccaccctgagcggggccagcctgcctcactggagttcttaccaatggaaagcccgacagcagtgaatggcgttaaggaccccgaccaggcagcttcttatactgtggagccagacccacgcagtagacacctggctctctccgggcctacttttggcatcattgtgaagcactttcctaaactgttgcccaaggtccttgtccaagggacagtgtttgcccgcatggccccagagcagaaaactgagctcgtatgtgagctgcagaagctgcagtattgcgtggggatgtgcggggatggagccaatgactgtggcgccctcaaggccgctgatgtcggaatttctttgagccaggcagaggccagcgtagtgtctccttttaccagcagcatggcctccatcgaatgcgtgccaatggtgatacgcgagggccggtgttcactggacactagtttttctgtttttaagtatatggccttgtattccctcactcagtttatcagcgtgttgatcctgtacacgatcaataccaatttgggggacctgcagtttctggccatcgatttggtcattaccaccaccgtggccgtactaatgagccgtacggggcccgccctggtgctcggaagggtgagacctccaggagcgctgcttagtgtgcccgtgttgtcgagtctgttgttacagatggttctcgtgaccggagtgcagctgggcggctatttcctgaccctggcccagccatggttcgtacccctgaatcgtaccgtggccgcaccagacaatctgccaaattacgagaatacggtggtgttctcactcagtagcttccagtatctcattctggcagccgccgtgtccaagggcgcaccctttagacgacctttgtacaccaacgtgccatttctggtggccctggccttgctgagctccgttttggtgggtcttgtgctcgttcccggtctgttacagggccccctagcactgcgcaatatcaccgacaccggctttaagctcctgttgcttggtctagtcacgctcaactttgtaggcgcattcatgttggagtccgtgctcgaccagtgtctgccggcatgcctgagaagactgagacctaagagggcttcgaagaagaggttcaagcagctggagagggaactcgctgaacagccctggccccccctccccgccggacctttgcgctag

SEQ ID NO: 179747 - DNA, 3372 bp, synthetic construct
  misc_feature 1..3372: note = Description of Artificial Sequence: Synthetic coding sequence
  source 1..3372: mol_type = other DNA
atgagccgggccaccagcgtgggcgaccagctggaggcccccgcccgtacaatctatcttaaccagccccacctgaacaaatttcgcgacaatcagatctccacagccaaatattcggttctaactttcttgccgagattcctgtacgagcaaattcggcgggccgccaacgctttcttcctgttcattgctctgctgcagcagatcccagacgtaagcccgaccggaagatacaccaccttggtgcctctgataataattctgaccatcgcaggcataaaggagatcgtcgaagacttcaaaaggcacaaagctgacaatgctgttaacaagaagaagaccattgttctgcggaatggtatgtggcacacaatcatgtggaaggaagttgccgtgggagatattgtgaaagtggtgaacggtcagtacctgcctgcagacgtggtgctgctgtcctcctctgagcctcaggctatgtgttatgtggaaacagccaatctggatggggagaccaatctgaaaatcagacagggcctgagccataccgccgatatgcagacccgggaagtcctaatgaagctcagcgggaccatagagtgtgagggcccaaacaggcatctctacgacttcaccgggaatctaaatctcgacggaaaaagcttggtggccctggggcccgaccagatactgctgcgaggcacacaactgagaaatacccagtgggtatttggcatcgtggtatatacgggacatgacactaagctaatgcaaaacagtacaaaggcccctctcaaacggtcgaacgtcgagaaggtgactaatgttcaaatcttggtcctatttggcattcttctggtgatggctctcgtttcaagcgccggcgccttgtactggaaccgctcgcacggtgagaagaactggtacatcaagaagatggacaccactagcgacaatttcggctacaatctgctaactttcattattctgtataataatctgattcctatctcactgctggtcaccctggaagttgttaaatacacccaggcgctttttatcaactgggataccgatatgtattacatagggaatgacacccccgccatggcacgcacatcaaacctcaatgaggagctcggccaggttaagtacctgttctccgacaaaacaggaacgctcacatgtaatataatgaattttaagaagtgtagcattgccggcgttacatatgggcactttccagagctggcccgcgaaccctctagtgacgatttttgcagaatgccccccccttgctcggatagctgtgattttgatgatccaagactgttgaaaaacatagaagataggcacccgacagcaccctgcattcaggaatttctgaccctattggcagtctgtcataccgtggtgcccgagaaagatggggacaatataatttaccaggccagtagtcccgatgaggccgcactggtcaagggggccaagaaacttgggttcgtgttcaccgctagaaccccatttagtgtgatcatcgaggctatgggacaggagcaaactttcgggatcctaaatgtcctggaattcagctcggacaggaagcggatgtcagtgatcgtgaggactcctagtggccgacttcgtctttattgtaaaggcgctgataatgtgatctttgaacggctgtctaaggacagtaagtacatggaggagaccctgtgtcacttggagtactttgcgacagaaggcctcagaacactctgcgttgcctacgctgatctctccgaaaacgaatatgaggaatggctgaaagtctaccaagaggcttcaacaattctaaaagatagggcacagagattagaggaatgctatgagatcatcgagaaaaatctcctgctcctcggcgccacagccatcgaggaccggctccaagccggggtacctgaaaccatagccactctgttaaaggccgagatcaaaatctgggttttaacaggggataagcaggagaccgcaataaatataggatattcatgtaggctggtgagtcaaaatatggcactgattctcctgaaggaggacagtctcgacgccacacgtgcagccatcacacagcactgtacagatctaggaaatctgcttggtaaggaaaacgacgtggccctgatcattgacggccacaccctgaaatacgctctcagcttcgaggtgaggcgtagctttttggacttggccctatcctgtaaggctgtgatttgctgcagggtttccccactgcagaagtcggagattgtagatgtggtgaaaaagagggtgaaagcgatcactctggcaattggagacggggccaacgacgtgggcatgattcagactgctcatgtgggcgttggcatctctggcaacgagggaatgcaggccaccaataacagtgactatgcgattgctcagttctcttatctggagaaactgctcctcgtgcacggtgcgtggagctacaatcgcgttacaaagtgcatactctactgtttctataagaacgttgtgctttacatcatcgagatcttcacagccttgccaccatttacactgggtatctttgaacggagctgtactcaggagtccatgctgcgctttccacagttgtacaagattacacagaatggagaaggctttaatactaaggtgttttggggccactgtattaatgctctggtgcactccctgattttgttttggtttccaatgaaagcactcgagcacgataccgtactgacaagtggccacgctactgactacctgttcgtgggaaacatcgtgtatacatatgttgtagtcactgtgtgtctgaaggcaggcctggaaaccaccgcatggacaaaatttagccacctcgctgtgtggggttccatgcttacttggctcgtgtttttcggcatttattcaactatttggcccacgattcccattgccccagacatgcgcggccaagccacaatggtcctttcctctgcgcatttttggctgggattgtttctggtcccaaccgcatgtctgattgaagatgtcgcgtggcgcgccgccaaacatacatgtaagaaaaccctgttagaggaggtccaggagctcgagaccaagagcagagtcctgggtaaggctgtgctcagggactcaaacggtaaacggctgaatgagcgcgacaggctcatcaaacggcttgggagaaagactcctccgaccctgttccggggtagttcactgcagcagggggtgccgcatggctacgcattttctcaggaggagcatggcgccgtcagtcaggaagaagttatccgggcttacgataccacaaagaaaaaatccagaaagaaatag

SEQ ID NO: 179748 - DNA, 426 bp, synthetic construct
  misc_feature 1..426: note = Description of Artificial Sequence: Synthetic coding sequence
  source 1..426: mol_type = other DNA
atgagccgggccaccagcgtgggcgaccagctggaggcccccgcccgaactatctacctcaatcagccgcacctgaataaattccgggataaccagatctcgacggccaaatacagcgtcctgaccttccttcccagatttctatacgagcagataaggagagccgccaacgcgtttttcctatttatagcactgctccaacagattcctgacgtatctcctacaggtcgatacacaactctcgtccccctgatcatcatcctgaccattgcgggtatcaaagaaattgtagaagattttaagcgtcacaaggctgacaatgccgtgaacaagaagaagactatcgtcttacgcaatggcatgtggcatacaatcatgtggaaggaggagaacagccctcctttcaaggagatatcacccctgtag

SEQ ID NO: 179749 - DNA, 3567 bp, synthetic construct
  misc_feature 1..3567: note = Description of Artificial Sequence: Synthetic coding sequence
  source 1..3567: mol_type = other DNA
atgctgaacggcgccggcctggacaaggccctgaagatgagcctgccacgccgatctaggataagatcgtccgtcgggccggtccgctctagcctgggctacaagaaggccgaagacgaaatgagccgagccacctctgttggagatcaactcgaagctcccgcccggactatctacctgaatcagccccatcttaacaagtttagagataaccaaatttcaactgccaagtattccgtcttaaccttcttgccgaggtttctgtatgaacagatccgaagagccgccaacgccttctttctcttcatcgctttactgcagcagatcccggacgtttctccaactgggagatatactactcttgtgccgcttattattatactgaccatcgccggaatcaaagagatcgtcgaagattttaaaaggcataaagcggataacgcagtcaacaagaaaaaaaccattgtgctccggaacggaatgtggcacaccataatgtggaaggaggttgctgtgggtgacatcgtgaaggtggttaatgggcagtacttgccagctgacgtggtgctccttagcagttcagaaccccaagctatgtgttacgtggagaccgctaatttagatggggaaactaacctaaaaatccgccagggactttctcacactgcggacatgcagacccgcgaagtgctgatgaagttgtccgggaccattgagtgtgagggtcccaacagacacctatatgacttcacggggaacttgaatctggacggaaagtccctggttgccctgggacccgatcaaattttgctgaggggcacgcagctgcgcaacacccagtgggtgtttggcatcgtcgtctataccggccatgacactaaattgatgcaaaattcaaccaaagcaccattgaagaggtcgaatgtggagaaagtgacgaacgttcagattttggtgctcttcggaatcctgctcgtgatggctctggtctccagcgccggagcactgtattggaatcgaagtcacggggaaaaaaattggtatatcaaaaaaatggataccaccagcgacaactttggatacaacctgttgaccttcatcattctgtacaacaaccttatccccatctctctcctggtcactctggaagtggtgaaatacacccaggcgctctttatcaactgggacaccgacatgtactacattggtaatgacaccccagccatggcccggacaagcaatctgaacgaggagctcggccaggtaaaatacctgtttagcgacaagaccggtaccttgacttgtaatataatgaattttaaaaaatgttctattgctggggtgacctacggccactttccagaacttgcacgtgaaccatccagcgatgatttttgtcggatgccacctccatgtagtgatagctgtgacttcgacgaccccagactcctcaagaacatcgaggataggcatcctaccgcgccgtgcatccaggagtttctgacgctgctcgcagtctgccacaccgtcgtcccagagaaggacggggacaatatcatttatcaagcttcatcccccgatgaggcagcactggtcaagggagctaagaagctgggattcgtctttacagcccggaccccttttagcgtcatcatcgaagctatgggccaggaacagaccttcggcatcttaaacgtgctcgagttctcctcagataggaaacggatgagcgtaatcgttcgcacccccagcgggcggctccgactgtactgcaaaggggccgataatgttatttttgaaaggctgtctaaggactctaaatacatggaggaaaccctgtgtcacctggagtattttgcgacggaaggcctgagaactctatgtgtcgcttacgccgatctgagtgagaatgagtacgaggagtggctgaaggtttatcaggaagcatccacaattctcaaagaccgggctcagcgactggaggagtgctacgaaattattgaaaaaaatctcctgcttctgggcgcgacagctatcgaagacagattgcaagccggggtccccgaaacgatcgctacactcctgaaagctgaaatcaagatttgggtcctgacgggggataagcaggaaaccgccatcaacattggctactcttgcaggctcgtgagtcaaaatatggcactcatcctcctgaaggaggacagtttggatgctacccgcgcagcaatcacgcagcactgcacagatctgggaaatctactcggtaaagagaatgacgttgctttgataatcgacggccacacccttaagtacgccctgtcattcgaagtgaggagaagctttttagatttagccctctcctgtaaagcagttatatgttgtagagtcagccctcttcaaaaatccgagattgtagatgtggtgaaaaaaagggtgaaagctatcacactcgcgataggcgacggagctaacgacgtcggtatgatccagactgcccacgtgggtgtgggaatctcaggcaatgaaggcatgcaggctaccaacaactcagattatgctattgctcagttctcttacctcgagaaactcctgctggtccacggggcgtggagttacaacagagtcacaaaatgtattctgtattgtttttataagaacgttgttctgtacatcattgagctgtggtttgccttcgtaaatggttttagcggccagatcctctttgaaagatggtgcatcggcctctacaacgtaatctttactgctttgccaccttttaccttgggaatctttgaaaggagctgtactcaagagagcatgttgcgtttccctcagctgtataagatcactcaaaatggcgaaggttttaacacaaaggtgttctggggccattgcattaatgcactggtacattctcttatactcttttggttccctatgaaagccctggagcacgatacagtgctgacctcgggacatgccaccgattatctctttgtgggcaatatcgtctatacctatgtagtagtgacagtgtgtctgaaggcgggactggaaacaacagcgtggacgaagttttctcatcttgctgtttggggctccatgctcacatggttagtctttttcgggatctattccaccatttggccgaccatccctattgccccagacatgcggggtcaagccactatggtcttatcttctgcgcatttctggctcggcttattccttgtgcctacagcctgtctgattgaagatgtggcctggagagcggctaaacacacatgcaaaaaaactctgctcgaagaagtccaagagctcgaaacgaaatctcgtgtcctaggaaaagccgttctcagagatagcaatggcaagcggttgaacgaaagagaccggctcatcaagaggctaggaagaaagacaccccccaccctgttcagggggagttccttgcagcagggcgtgccacatgggtatgctttctctcaagaggaacatggcgcggttagccaagaagaagtcatacgcgcatacgacaccactaagaagaagagtcggaagaagtag

SEQ ID NO: 179750 - DNA, 2907 bp, synthetic construct
  misc_feature 1..2907: note = Description of Artificial Sequence: Synthetic coding sequence
  source 1..2907: mol_type = other DNA
atgcggtgccccggcccccggctgctggagaccagctggcggcaccctcctgccccatttacatctaccaatcgccatctctacgacttcaccgggaacctcaatctagatggaaagtccctggtggctttaggccctgaccagatcctgctgcgcggcactcagctcagaaatacccagtgggtgttcggcatagtagtgtatactggccatgacacgaagctcatgcagaacagtaccaaagcccccctcaaacgaagcaatgttgaaaaggttaccaatgttcagatcttagtcttgtttggaatccttctggtgatggcgttggtcagctctgccggtgctctctactggaataggtctcacggagaaaaaaattggtatattaaaaaaatggacacaacctcagataatttcggatacaatctgctgacgtttatcatactctacaataatctgattccaatatctctcttagtgactctcgaagtggtaaaatatacccaggcgctgtttattaattgggatacggacatgtattacattggaaacgatacacccgccatggctcgaacaagcaatctgaatgaggagctgggtcaggtgaagtacctcttctctgataaaactggaactcttacttgtaatattatgaacttcaagaagtgctctatcgcaggcgtgacttatgggcacttccccgaactcgcaagggagcctagtagtgacgatttttgtcgcatgccgccaccatgcagtgatagctgtgatttcgatgatcctcggctattaaaaaatattgaggaccggcacccaacagccccctgcatccaggagtttctgacactcttagcagtttgccacacagtcgtccctgaaaaagacggcgacaacattatataccaggcctcctctcccgatgaggccgcgctggtcaagggtgccaaaaagctggggtttgtgttcacagccagaactcccttcagtgttattattgaggctatgggtcaggagcagacttttggaatactgaacgtgctagagttctctagcgaccgcaagcgaatgagcgtcatagtccggacccctagtgggagactgagattgtactgcaaaggcgctgacaacgttattttcgagagactaagtaaggatagtaaatacatggaagaaactctgtgccacctggaatacttcgctaccgaggggctcagaaccttatgtgtggcttatgctgacttgtccgagaatgagtacgaggaatggctgaaggtgtaccaagaagctagtacaatcctgaaggacagagctcagaggctggaagaatgttatgagattattgaaaaaaatctcctgctgctcggggcaacggcaatcgaggatcgacttcaagcaggtgtgcccgaaactattgccacgctgctaaaggctgagattaagatctgggtgttaactggcgataagcaggaaacagccatcaacatcggatacagctgtagactggttagtcaaaatatggccctgattcttctcaaggaagattccctggatgccacacgggcagccataacacagcactgcacagatctgggcaatctgttagggaaggaaaatgacgtggcactgattatagatgggcacaccctgaagtatgccttgtcatttgaagtgaggaggagtttcctcgacctcgcgttgagctgtaaggctgtgatctgctgtagagttagccccttgcagaagagcgagattgtggatgtagtcaaaaagagggtgaaagccatcaccctggcaataggagatggcgctaatgatgtgggtatgatacagactgcgcacgtgggtgtgggcatctctggcaacgagggtatgcaggctaccaataacagcgactatgcaatcgcccagttctcctacctggagaagctgctcctggtgcatggtgcctggtcttataatagggttactaaatgcattttatactgcttttataagaacgtcgtgctatacattatagagctgtggtttgctttcgtgaatggattcagcgggcagatcctgttcgaaagatggtgtattggactttataacgtgatattcactgctttgcctccgtttactttagggattttcgaacgtagctgcacacaggaaagcatgttgcgcttccctcagttatacaagattacacagaatggagagggcttcaacaccaaggtcttttgggggcattgtattaatgctctcgtgcactctttgatcttgttctggtttcctatgaaagccctggaacatgatactgtgctcacatctggacatgctacagactacctcttcgtggggaacatcgtatacacctatgtcgtagtgaccgtttgtctgaaagcaggacttgagacgacagcgtggacgaaattttctcatttagctgtttggggttctatgctcacatggctcgtgttttttggtatttatagtactatatggccaacaattccaattgcacctgatatgcgggggcaggcaacaatggtattatcttccgcgcacttttggctgggattatttctcgtcccgacggcctgtcttatcgaagatgtcgcctggagggcagctaagcatacatgcaaaaaaaccttgttagaggaagtgcaggagctggagacaaagtctcgcgtgctgggcaaggcagtattgagagattctaacgggaagcgcctgaacgagcgagaccgactgattaagaggttgggccgaaaaactcccccaaccctctttcgtgggagctctctgcagcagggcgtacctcatggatatgcattctcgcaagaggaacacggtgctgtgagccaggaggaggtcatcagggcgtacgacaccacaaagaagaagtctcgcaaaaaatag

SEQ ID NO: 179751 - DNA, 3903 bp, synthetic construct
  misc_feature 1..3903: note = Description of Artificial Sequence: Synthetic coding sequence
  source 1..3903: mol_type = other DNA
atgggcaccggccccgcccagaccccccggagcacccgggccggcccagaaccaagtcccgctcctcctggacccggagacaccggagactccgacgttactcaagagggctccgggccagccggtattcgggggggggagaccgttattcgagccggcatgggtgattcgcccggccggggcgcacccgagcgccgacacaaggcacagccagggcgcgcgaggaaatacgagtggaggcctgaagggcccaccagtatgggctccctgggacagagagaagaccttcaggacgaggatcgcaacagtgcctttacctggaaagtgcaggccaacaacagagcatacaacggacagtttaaagagaaagtgatcctgtgctggcagaggaagaagtacaagaccaacgtgatcagaactgctaagtacaacttctactcttttctgcctctgaacttgtatgagcagtttcatcgcgtgtctaacctgtttttcttgataatcattatcctgcaatccatccccgatattagcactctcccatggttcagcctgagtacccccatggtgtgcttgctcttcatccgtgccaccagggatctggtggatgacatgggcagacataagtccgaccgggctatcaacaaccgcccttgccagatccttatgggcaaatcttttaaacagaagaagtggcaggacctgtgcgtgggagacgtagtatgcctgcgaaaggacaacatcgttcctgcagacatgctgttactcgcatctaccgagccatcatcactttgctatgtagagaccgtggacatagatggcgaaacaaacctgaagttcagacaggcattgatggttacgcacaaggagcttgcaactatcaaaaagatggcctccttccagggcacggttacgtgcgaagctcccaactcccgcatgcaccacttcgtgggttgccttgaatggaacgataaaaaatactccttggacatcggcaacctgttactccgcggctgcaggatccgcaacaccgatacctgctacgggttggtgatatacgccggtttcgacacaaaaatcatgaagaactgtggcaagattcatttgaagagaactaagctggatttgttgatgaacaagctggttgtggtaattttcatctctgtggtcttagtctgcctggtgctcgcatttggctttgggttctctgttaaggagttcaaggatcaccactactatttgagcggcgtccatggcagcagtgtagccgcagaaagtttcttcgtgttctggagttttttgattctgctctcggtgactatcccaatgtctatgttcatcctctctgagttcatttaccttggcaattcggtgttcatagactgggacgtgcagatgtactataagccacaagatgttcctgccaaagctaggtccacttctctcaacgatcatctgggtcaggtcgagtatattttttcggataaaacaggcacactcactcagaatattttgacctttaacaagtgttgtatcagtggaagagtatatggccccgattctgaagccacgacacggcctaaggagaacccatatctgtggaacaagtttgctgatggaaaactcttattccacaatgccgcccttctgcatttagtgaggaccaatggagatgaggctgttagggagttctggcgtcttttggcaatctgtcacaccgttatggtgcgtgagagtcctcgggaaagacccgaccagctgctgtatcaggcagcctcgccagacgagggcgccctggtcacagctgcccgcaacttcggatacgtttttttgtctaggacccaggacaccgtcacaattatggaacttggcgaggaaagagtatatcaggtgctggcaataatggattttaattctactaggaagcggatgtcagtgctggtacgcaaacctgagggagcaatatgtttgtacaccaaaggcgccgatacagtaatttttgagaggctgcaccgccggggagccatggagttcgccactgaggaagcgttggccgctttcgcgcaggaaaccctgagaaccttatgccttgcctatagagaggtcgcagaggacatctacgaggactggcagcagagacaccaagaggcctcactactgttgcagaaccgcgcccaggccctgcaacaacttctgggggctactgccattgaggacagactgcaggatggggtacctgagacaataaagtgtcttaagaaaagcaatatcaaaatttgggtgcttacgggcgacaagcaagaaactgcagtcaacatcggttttgcatgcgagttgctgtccgaaaatatgctgattctggaggaaaaggaaatttcgaggattctggagacgtactgggagaactcgaacaacctgctgacccgcgagtctttaagtcaagtcaagctggccctggttattaacggagatttcctcgacaaactcctcgtgtccctgcggaaggagccacgggcattggcacaaaacgtcaacatggatgaggcctggcaggagctgggacaatctaggagagatttcctgtacgcaaggaggctgagcctcttgtgtcgccgatttggcttgcccttggcagctcctccagcccaggactcaagggcccggcggtcatcagaggtcttgcaggagcgggcttttgtggacttagctagcaaatgtcaagccgtcatctgctgccgagtcacaccgaagcagaaagccctcattgtcgcgttggtcaaaaaatatcatcaggtcgtcaccttagccattggagacggggcgaatgacataaatatgatcaagactgcggacgtgggggttggtcttgccggccaagagggtatgcaggctgtccagaatagtgactttgttctgggccagttctgctttcttcagcgactgttgctggtccatggaaggtggtcctatgtgaggatctgcaagttcttgaggtactttttctacaaaagtatggcctctatgatggtccaagtctggttcgcatgctacaatggatttaccggacaacccttgtacgaggggtggttccttgctctattcaatttgctctacagcactctgccagtgttatatatcggcctctttgagcaagacgtctccgccgaacagtccctggagaagcccgagctttacgttgtcggccaaaaagacgagcttttcaattactgggtttttgtgcaggccatcgcccacggggtcactaccagcctggtaaacttttttatgaccctgtggatctcaagagacaccgccggtcctgcctctttttcagatcaccagtcatttgctgtcgtcgttgccctgtcttgtttactctctataacgatggaagtgattctgattatcaaatattggaccgctctgtgtgttgccaccatcttactgagccttgggttctatgctataatgacaaccacaacccagagcttttggctcttccgcgtaagtccaactacgtttccattcctgtatgctgacctctcagtgatgagcagccctagcattctcttagtagtgcttctgagcgtttccattaacactttccccgtcctggcattgagggttatattccctgccttaaaagaactccgcgcgaaggaagagaaagtcgaggaaggcccatcagaagagatcttcacaatggagccattgcctcacgttcacagggagagccgtgcgcgccgttcaagttatgccttttcacacagagagggctacgctaatctgatcacccagggaacaatcctcaggcgagggcccggcgtctcgagtgatattgcctctgaatcactggacccttccgacgaagaagcggcctccagcccaaaggagtcccagtag

SEQ ID NO: 179752 - DNA, 1737 bp, synthetic construct
  misc_feature 1..1737: note = Description of Artificial Sequence: Synthetic coding sequence
  source 1..1737: mol_type = other DNA
atgggcgacagccccggccggggcgcccccgagcggcggcacaaggcccagcccggacgggcacgaaaatacgagtggcgaccagagggccctacaagcatgggctctttggggcagagggaagatctccaggacgaggaccgcaattcggctttcacatggaaggtccaagcgaacaatcgggcctacaatggccagtttaaggagaaagtgattttgtgttggcagagaaaaaagtacaagaccaatgtgattcgcacagctaaatacaatttttactctttcctgcccctgaatttgtatgagcagttccacagagtctccaacctgtttttcctgatcatcattattctgcagtcgatacccgacataagcactctgccatggtttagcttgagtactcccatggtgtgtctgctcttcattagggcgacacgggacttagtggatgatatgggacggcacaagtccgatagagccattaacaatcgcccgtgtcaaattctgatgggcaagagtttcaagcagaaaaaatggcaggacctgtgtgtgggggatgtcgtgtgcctgcggaaagataatattgtgccagctgatatgctgttgttggcgtctaccgagcccagttccctatgctatgtggagactgtggacattgatggagaaaccaatctgaagtttcggcaagccttgatggtgacccataaggaactagcaacaattaagaaaatggcttcttttcaagggacggtgacatgcgaagctcccaacagccgaatgcatcacttcgtcggttgtttggagtggaacgacaaaaaatatagccttgacatcggaaatttactgctgcggggctgccgaatacggaacaccgatacctgctatgggctcgtgatatacgctgggtttgatactaaaattatgaagaactgtgggaaaatccaccttaagcgcacaaagctggacctactgatgaacaagttggtcgtggtgatctttatcagcgttgtgctggtgtgtctagtgctcgcttttggcttcggttttagcgtgaaagagtttaaggatcaccactactacctgagtggtgtgcacggctctagcgtcgcagccgagagctttttcgtcttttggtcattcctcatcttactctcagtaacaatccccatgtccatgttcattctctcggagttcatttacctcggtaattctgtctttatagactgggatgtgcagatgtactataagcctcaagacgtgcctgccaaagcccgatccacctcactgaacgatcatctcggacaagtcgaatacattttttcagacaaaactggcaccctgactcagaatattctgactttcaataaatgttgcatttctggccgcgtatacggggctgctcctactcccgagctgccggcgggctcatctattttcaaaggcttgcgcgtccccgagaaccaaagtcatgtgtggccacacgcccagcacctgagaccgaatctgaaccaaggcacagttgctagatggcctggctttctgtggagaggcccaggtaaattcttcttctttctgagacagtccttgacgctttcaactcaagccgggatgcagtggtgcaatctgggatcactgcagtctccgccacctaggttcaaacgattctcatggctgagcctgccctcctcatgggattaccgccatttaccacctcacctgatcttcttgtatttctag

SEQ ID NO: 179753 - DNA, 3792 bp, synthetic construct
  misc_feature 1..3792: note = Description of Artificial Sequence: Synthetic coding sequence
  source 1..3792: mol_type = other DNA
atgggcgacagccccggccggggcgcccccgagcggcggcacaaggcccaacctggtcgagcgagaaagtacgaatggaggcctgagggccctaccagtatgggtagccttggccagcgcgaagacctgcaggacgaggatcggaatagcgccttcacctggaaagtgcaggcgaacaatcgcgcttacaatggccagttcaaggagaaggtcattctttgctggcagagaaagaaatacaaaacaaacgttatcaggacggcgaagtataatttctacagcttcctcccattgaacctctatgaacaatttcatcgggtttcaaatcttttttttctgattatcatcatcctgcaatccattcctgacatatccactttaccatggttttcccttagcaccccgatggtttgcctgctgtttatacgggcaactcgtgaccttgtggacgatatgggtaggcacaaaagtgatcgagccatcaacaaccgaccatgccagatcttgatgggtaagtcattcaagcagaaaaaatggcaggacctgtgtgttggcgacgtcgtgtgtttacgaaaagacaatattgtccccgctgacatgctgctgcttgcaagcactgagcccagttcgctctgctatgtcgagacagtggatattgacggagagaccaatctcaagttccggcaggcacttatggtcactcataaggagttggcaactatcaagaagatggcaagtttccagggcaccgtgacgtgcgaagcacccaattcacgtatgcaccatttcgtgggttgtctggaatggaacgataagaagtatagcctggatatcggaaatctcttgttacgcggctgcagaatcaggaataccgacacctgctatggattggtcatctacgccgatggatacatgtttgtcggcttcgatacaaagattatgaagaattgcggtaaaatccatctgaaaaggactaagctcgaccttctgatgaacaagctcgtggttgtgattttcatttctgtggtccttgtttgtctagtgttggcgttcggatttgggttttccgtcaaggagtttaaagaccatcactactacctgtctggagtgcatggctcatctgtggccgctgagtccttcttcgttttttggtccttcctcattctgttatcggtgactattcccatgtctatgttcatcctatctgagttcatctatctgggtaactctgtgttcattgattgggatgtccagatgtactacaaaccccaggatgtccccgcaaaggcgcgctcaaccagtctgaatgaccatctgggccaggtagagtacatcttctcagataagactggtaccttgacccagaatatcttgacattcaataaatgctgtatttccgggcgggtgtatggtccagattctgaggcaacaacccggcccaaagagaatccctatctatggaacaaattcgcagacggaaaactgcttttccataacgcagctctcttgcacttagtgcgaaccaacggtgatgaggcagtgcgcgaattttggagattgttagcgatatgtcacacagtaatggtgagagagtcaccgagggaacgacctgatcagcttctctaccaggccgcgtcacccgatgagggggcactagtgacagcggcacgtaactttgggtatgtgttcctctctcgaactcaggataccgttaccattatggaactaggcgaggagcgcgtctatcaggtgttggctattatggactttaattccacccgtaagcggatgtctgtgcttgtacgcaagcctgagggcgccatatgtctgtacacaaaaggcgcagacactgtcatcttcgagcgcttgcacaggcgcggggccatggaattcgcaactgaagaagcactcgccgcctttgcccaagagactctcaggactctgtgcctggcctatcgcgaggttgctgaggacatatacgaagattggcagcagaggcatcaagaagccagcctgctcctgcaaaatcgagctcaggcccttcagcaagtttacaacgaaatggagcaggatctgaggctcctgggagcgaccgcgatcgaggatcggttacaggatggggttccagagaccattaagtgcctcaagaaatctaacattaaaatctgggtcttgaccggggacaagcaggagacagccgtgaatattggcttcgcctgcgaactgctttcggaaaacatgttgatcttagaagagaaagagatctctaggattttagagacctattgggaaaattcgaataacctcttgacgagagagtcactgtcgcaagtgaagctggctctggtgattaacggcgatttcttggacaagctcctggtgtcactgcgtaaagaacctcgggctctggcccagaacgttaacatggacgaagcatggcaggagcttggtcagtcgaggagagacttcttatatgctcgccgactcagtctgctgtgccggcgttttggcctccctctcgcagcacctcctgcgcaggacagtcgtgctaggcgaagttctgaggtgctccaggagagggcctttgttgatctggccagcaaatgccaagccgtgatctgctgccgagtgacacccaaacagaaggctctgattgtggcactggtgaagaagtaccatcaagtagtcactctggccattggcgacggggccaatgacattaatatgattaagactgccgatgttggggtcggcttggctggccaggaagggatgcaggcagttcagaactccgactttgtcctcggacagttctgctttctccaacggctgctacttgttcatgggcggtggtcatacgtccggatctgcaaatttctgagatacttcttctataagagtatggcatccatgatggtgcaggtgtggttcgcttgctacaacggcttcacgggtcagcccctgtacgagggctggttcctggcactcttcaaccttctgtattctacactgccagtgctttacataggactattcgagcaggacgttagcgccgaacagagcctcgaaaaacccgaactgtacgtagtgggacaaaaggacgagctgtttaattattgggtattcgtccaagcaattgctcacggagtgactacaagtctcgtaaactttttcatgaccttgtggatatcccgagataccgcgggaccagcatcttttagcgatcatcagagcttcgctgttgtggtcgcactaagctgtcttctcagcataacaatggaggtcatcctgatcattaaatactggacagcactttgcgtcgctactattctcctgtctctcggcttttacgccattatgacaaccacgacacagagcttctggttgttcagagtctccccaaccacgttccctttcttgtatgctgatctctccgtgatgtctagcccctccatcttgttagtggtcctgttgagtgtgtctattaacacttttccagtgcttgctttaagagttatatttcccgccttaaaagagctcagagcgaaggaggaaaaagtggaagaggggccttccgaagaaattttcaccatggagcctttgccacatgtgcatagggagtctcgcgcccggcgcagtagctacgccttctctcaccgtgagggatatgccaatctgatcacacagggtactatcctgaggcggggccctggggtatctagcgacatagcctcagagtccctggacccctccgacgaagaagcggcatctagcccaaaggaaagccagtag

SEQ ID NO: 179754 - DNA, 3933 bp, synthetic construct
  misc_feature 1..3933: note = Description of Artificial Sequence: Synthetic coding sequence
  source 1..3933: mol_type = other DNA
atgggcaccggccccgcccagaccccccggagcacccgggccggcccggaacctagccccgcgccacccggccctggtgacacaggggatagcgatgtaacgcaggaggggtctggacctgccgggattcgggggggagaaacggtgatcagggccggcatgggggatagtcctggaaggggtgcgcccgagaggcgccacaaagcacagcccggacgcgcccggaaatatgagtggagacccgagggacccaccagtatgggctccctgggacaacgggaggatttgcaggacgaagataggaattccgcattcacctggaaagttcaggcaaataacagagcctacaatggacagttcaaggagaaagtgattctgtgttggcagcgaaagaagtacaagacgaacgtaatccggactgccaagtacaacttttactcattcttgcccctgaacctctatgaacagttccaccgggtatccaacttattctttctgatcattataatcctccagagtatcccagatatctcaacattaccttggttcagtttatcaacgccaatggtttgcctgctctttattcgtgctaccagggacctggtagatgatatgggcaggcataaatctgacagggctataaataatcggccgtgtcagatattgatgggtaaatccttcaaacaaaagaagtggcaagacctctgtgttggggacgtggtctgtctaagaaaagacaacattgttcctgccgatatgctacttctggcttccacggaaccttctagcctctgttatgtcgaaacagtggacattgacggagaaactaatctcaagttcagacaagccttgatggtcacacacaaggagctcgccactattaagaaaatggcctccttccaggggacggtgacttgcgaggctccaaattctaggatgcaccactttgttggttgcctagagtggaacgataaaaagtattctctcgacattggtaacctgctgctgcggggatgtagaatccgaaacactgatacttgttacggccttgtcatctatgctggctttgacaccaagatcatgaaaaattgtggtaaaatccatttaaagcggaccaaactggacctcttgatgaataagctggtggtggtaatattcatctctgtagttctggtttgtctcgtgcttgcgtttggctttgggttctccgtgaaagagtttaaggaccatcattactatctgtccggcgtgcacgggtcgtctgtggccgccgaatcctttttcgtgttctggagctttctcattttgttgtccgtaacaattcccatgagtatgttcatcctcagtgagttcatctacctggggaacagcgtgttcatcgactgggatgtgcagatgtattataagcctcaagatgtccctgccaaagccagatccacttcgctcaacgatcacctggggcaggtggaatatatcttttccgacaagacagggacactcactcagaatatcctgacctttaacaagtgctgcatcagcggtagggtgtatgggcctgactcagaagctaccacccgtcccaaagagaacccctacctgtggaacaaatttgcggacggaaagctgctctttcacaatgcggcactgctgcatctggtgagaacgaatggtgacgaagcagttcgagagttttggagacttctcgccatatgccatactgtaatggttagagaatctccaagggagcgacctgaccagcttctttaccaagcagcctcccccgacgagggagcactcgttaccgctgctcgcaatttcggatatgtgtttctcagtagaactcaagacactgtgacaatcatggagctgggggaggaacgggtctatcaggtgttggcgataatggattttaacagtactagaaagcggatgagcgtgctggtcagaaaacctgagggtgcaatttgcctttataccaaaggagccgatactgtgatcttcgagagactccatagacgcggagctatggaatttgccaccgaggaggccttagctgcgtttgcgcaggaaaccctgcggacattatgcctggcttacagagaagtcgcagaggacatatacgaagattggcaacagcggcaccaggaagcttccttgcttctccagaaccgcgcacaggccctacagcaggtgtataacgagatggaacaggatcttagattactgggcgccactgcaatagaagatcgcctgcaggacggtgtgccagaaacaatcaagtgtctgaaaaagtcaaatataaagatatgggtgctaaccggcgacaagcaggagacagctgtcaatattggttttgcatgtgagctcctctctgagaacatgctaatcctggaggaaaaggaaatctcccgcatcctagaaacctactgggagaatagtaacaatcttttgacccgagagagtctgagtcaggttaagctggccctggtcatcaacggcgatttcctggataagctgctggtgtccttgagaaaggaaccacgcgccctggctcaaaatgtaaacatggacgaagcctggcaggagctgggccagagtcggagggatttcttgtatgcacggcgattgtctctactgtgcagacgattcgggctgccattggcagccccccccgcgcaggactccagagctcgccggagcagcgaggtattgcaggaacgagccttcgtcgatctagccagcaaatgtcaggccgtcatttgttgtagggtgactcctaagcagaaggccttgatcgttgcattggtgaagaaatatcatcaggttgtcaccctggccatcggggacggagccaacgacattaacatgattaagactgcagacgttggcgtgggcctagctgggcaggagggcatgcaagctgtgcagaattcagatttcgtgctcgggcagttctgcttcttgcagagactcttactggtccacggacggtggtcttatgttcgaatttgcaagtttttgagatattttttctataagtctatggccagtatgatggtgcaagtctggtttgcttgttataatgggtttacggggcagcctctgtacgaaggatggttcctggctctttttaatctactgtactctactctgcccgtactttatattggcctgttcgagcaggacgtgtcggcagagcagagccttgaaaagcctgagctttacgttgtggggcagaaggatgagctgtttaattattgggtgttcgtgcaggcaatcgcacatggcgtaacaacaagcttggtgaatttctttatgacgttgtggatctccagagacaccgcagggcctgcgagcttcagcgatcatcagagtttcgctgtcgtggtagcgctgtcatgcctgctgtccatcacgatggaggtcatcttaattattaagtattggacagctctttgcgtcgcgactatcctactttctctgggattctacgcgatcatgactacaacaacccagtccttctggctgtttagagtaagtcctactacgttcccctttttgtatgccgacctaagcgtgatgagctccccctctatactgctagtcgtgttacttagcgtgtccatcaacaccttccccgtgttggctctgcgggttatcttccccgcactcaaggaactgcgagccaaagaagaaaaggtggaagagggaccatcagaggagatctttacaatggagcccctcccccatgtgcatagggaaagtcgcgcaaggaggagctcatacgcattttctcacagggaaggatacgcgaatctgatcacccagggtactatcttgcgtagaggaccaggggtttcctccgatatcgcgagcgagagcttggacccctcagacgaagaggcagcatctagcccaaaggagtctcagtag

SEQ ID NO: 179755 - DNA, 3006 bp, synthetic construct
  misc_feature 1..3006: note = Description of Artificial Sequence: Synthetic coding sequence
  source 1..3006: mol_type = other DNA
atggaggccgcccacgccaagaccaccgaggagtgcctggcctactttggagtgtcggagacaaccggtttaacccctgatcaggtgaagcggaacctcgagaaatacgggctcaacgaactgcccgctgaagaaggaaagaccctatgggagctggtcattgaacagtttgaagatctcctggttaggatcctgctgctggctgcctgcatctccttcgtcctggcttggttcgaggagggcgaagagaccattaccgcgttcgtggaacccttcgtcatactgctgatccttatcgcgaacgcaattgtgggcgtctggcaggagaggaacgctgaaaacgcgattgaagccctcaaggaatatgaaccagaaatgggaaaagtttatagggccgaccggaaatccgttcagagaattaaggcccgcgatattgtgcctggcgatatagtggaggtcgcagtgggagacaaggtacccgccgatatccgcattctggccatcaaatcaactactctcagggtcgaccagtctatcttgaccggtgagtccgtgtctgtgattaaacacacagagcctgttcctgacccgcgggctgtgaaccaggacaaaaaaaacatgctgttttcagggaccaatattgcggccggcaaagccttgggaatagtggccactactggtgtgggcactgaaattggcaaaatccgcgatcaaatggctgcaactgagcaagacaaaactcctctgcagcaaaagttagacgagtttggtgagcagctatccaaagtgatctccctcatctgcgttgctgtgtggctaatcaacattggtcacttcaacgacccggtgcacggcgggagttggttcagaggcgccatctactacttcaaaatagccgtcgccttagcagtcgcagccatacctgaaggactcccggcagtaatcacaacttgtttggcgctgggcactcgaagaatggccaagaaaaatgccattgtccgttctcttccctccgtggagacgctggggtgcacatctgttatttgtagcgacaaaactggaaccctgactaccaaccagatgagcgtatgtaagatgttcattatagacaaggtggatggggacatttgtctcctcaacgagttttctataaccggttctacctatgcaccagagggcgaggttctgaagaacgacaagcccgtccgtcctggtcaatacgacggtctcgttgaattagccaccatctgcgccctgtgtaacgattcctctctggactttaatgaggccaagggagtatatgagaaagttggggaggctaccgaaacagccctcaccacgctggtggagaaaatgaatgtattcaacaccgacgtacgaagcctcagcaaggtagagagagccaacgcctgcaattccgtgataagacagctcatgaaaaaggagttcactctcgagtttagccgggaccggaagagtatgagcgtatattgctcccctgccaaatcttctcgggctgcagtaggcaacaagatgtttgttaaaggtgccccagagggcgtaatcgaccgatgtaactacgtacgcgtgggtacgacaagagtccccctaaccggtcctgtgaaggaaaaaatcatggctgtgatcaaagaatggggaactggacgtgacaccttgcgctgtctggccctggctacaagagacacaccacctaagcgggaggaaatggtactggatgactctgcccgattcttagagtacgagaccgacctgactttcgtaggggtcgttggcatgctggatccgccaagaaaagaagtgacaggctctatacagctttgtagggacgccggtattcgggtaataatgattacaggggataacaaagggaccgcgatcgctatctgcagacgtatcggtatttttggcgaaaatgaagaagtggcggacagagcctatactgggcgggaatttgacgacctgccattggccgagcaacgcgaggcctgcaggagagcttgctgcttcgcgcgagtggaaccctcgcacaagtccaaaatcgtggagtatttacagtcatacgatgaaatcaccgctatgaccggagacggggtgaatgatgcgccggccctcaagaaagccgagatcggaatcgcaatggggtctggcacagccgtcgccaagacagcaagcgagatggtgctcgcggacgacaatttttccaccattgtggctgctgttgaggaaggacgggctatatataacaacatgaaacagttcattcggtacttaattagttcaaacgtgggagaggtcgtgtgtatcttcctgacggcagccctgggcctacctgaagccttaatccctgttcagctgctatgggttaatctggttacggacggcctacccgcgaccgcccttgggttcaacccccctgatctggacatcatggaccggcctccacgcagcccaaaagagcccttaattagcggatggctcttctttaggtatatggcaattggcggatatgtgggcgccgccaccgtcggagctgcggcttggtggtttctgtacgctgaggatgggccccatgttaactacagccagctgacacatttcatgcagtgtaccgaggataacacccactttgagggaattgattgcgaagtgttcgaagctcctgaacccatgacaatggcacttagcgtgctggtcacaattgagatgtgcaatgctctaaatagcctgtcagagaatcagagcctcctacgcatgcctccttgggtcaatatctggctcttaggctctatctgcttgtctatgtcacttcactttctgatcttgtatgtggatcctctcccaatgatctttaaactgcgggcgctggatcttacacagtggctgatggtgctgaaaattagcctacccgttattggactggacgaaattctaaagtttgtcgcccgtaactacctggaagacccagaagacgagcgtagaaagtag

SEQ ID NO: 179756 - DNA, 2535 bp, synthetic construct
  misc_feature 1..2535: note = Description of Artificial Sequence: Synthetic coding sequence
  source 1..2535: mol_type = other DNA
aagcggcggaaccccggccggcaggccgtgggccacaccgaggaggatcctcctcgggtggggactccgtggaaggagcacaccggtcccggcccacaggagggctccacgatggaagcggcgcacgccaagaccaccgaggaatgcctggcttattttggcgtctccgaaactaccggacttacccccgaccaggttaaacggaacctcgagaaatacggacttaatgaactgcccgccgaagaaggtaagaccctgtgggagctggttatagagcagtttgaggatttgctggtgcgcatcctcctccttgcagcctgtatttcttttgtcctagcgtggttcgaggagggcgaagaaaccatcaccgcctttgtagaaccttttgttattttgttaattctgatagcaaacgccatcgttggcgtatggcaggagcggaacgctgaaaacgcgattgaagccctcaaggagtatgagcctgaaatgggcaaggtctaccgagccgaccgcaagtcggtccagcgtattaaggccagggacattgtgccaggcgatattgttgaagtcgccgttggcgataaggtccccgcagatattcggatcctggctattaagtctactaccttaagggtagatcagagtattttaacaggggaatctgttagcgttattaagcacacagagccagtcccagatccaagggctgtcaatcaagacaaaaaaaatatgctgttctccggcacaaatatcgctgcagggaaagctctgggcatagtggccacgactggagtggggaccgaaataggaaagatcagagatcagatggcagctacggagcaggacaagaccccgctccagcagaaactggacgaattcggggaacaactgtctaaggttatttctctcatctgtgtggcagtgtggctcataaacattggacactttaatgaccctgttcatgggggtagctggttccgaggcgctatctattatttcaaaatcgccgtggcattggccgtcgcagccattcccgaaggcctgcctgctgttatcaccacatgcctggctttgggcactagacggatggccaagaagaatgctatcgtgcgcagcttaccatctgtggaaacattgggttgtacgtctgtgatatgctccgacaagacaggcacgctgacaacaaatcaaatgagtgtctgcaagatgtttatcatcgacaaggtggacggtgatatttgcctgctaaacgaattttcaatcactggctcgacttacgccccagagggcgaggtgctcaaaaacgacaagcccgtgagaccaggacaatacgatgggctggtggagctggcgaccatttgcgccctctgcaacgacagctcactagactttaacgaagcaaaaggcgtttacgagaaagtgggcgaggctacagaaaccgcactgaccactcttgtcgagaagatgaacgttttcaataccgacgttcggtccctttcaaaagtagaacgcgccaacgcctgcaacagcgtgataaggcagcttatgaaaaaggagttcactctggagtttagtcgcgacaggaaaagcatgtctgtgtattgttcccctgccaaaagttcacgtgcagccgtgggcaacaagatgttcgtgaagggggcccctgagggtgtgattgatagatgcaactatgtcagagtgggcactacccgggtgcctctcacgggccctgtgaaagaaaaaataatggcagtgatcaaagagtggggcactggaagggacactctaagatgccttgcacttgccacaagggacactccgcctaaaagagaggaaatggtgttggacgacagtgcacgcttcctcgagtatgagacagacttgacttttgtgggcgtagtcggcatgttggacccaccaaggaaggaagtgactggatccatccagctctgtagagatgctggaattcgggtgatcatgatcacgggcgataacaagggtactgcgatagctatttgtcgaagaattggaatttttggagaaaatgaggaagtggccgatcgggcttacaccggtcgggagttcgacgacctcccccttgccgaacagagggaagcctgtcgccgggcatgctgctttgctcgagtcgaaccctcccacaagtctaaaatagtggagtatttacagtcatacgatgagattaccgccatgaccggcgatggagttaacgacgctcctgccctcaaaaaggctgagatcggcatcgcaatgggatccggtaccgctgtagccaagactgcaagcgagatggtactcgctgacgataactttagtacgatagtggcagccgttgaggagggacgcgccatctataacaacatgaaacagtttattcgatatctgatatcttcgaatgttggggaggttgtatgtatcttcctgactgcagccctggggctccccgaagctcttattcctgtgcagctgctgtgggtaaatctggtgaccgactgtgctgagcttcttatttactag

SEQ ID NO: 179757 - DNA, 2985 bp, synthetic construct
  misc_feature 1..2985: note = Description of Artificial Sequence: Synthetic coding sequence
  source 1..2985: mol_type = other DNA
atggaggccgcccacgccaagaccaccgaggagtgcctggcctactttggcgtttctgagaccacaggtttgacgccagaccaggttaaacgcaatctggagaagtacgggctgaatgagctgcccgccgaggaaggcaaaactctgtgggaactggtaatcgagcagttcgaggatttattggtgaggatcctgctgctcgccgcttgcatatctttcgttctggcctggtttgaggagggggaagagacgatcactgcattcgtggaaccctttgtaatcctcctcatcctgatcgccaatgcaatcgtgggtgtatggcaggagagaaacgctgaaaacgcaatagaggccctgaaagaatatgagccagagatgggtaaggtgtatcgtgctgaccggaaaagcgtgcagaggattaaggctcgggatattgttcccggagatatagtggaagtcgccgtcggagacaaagtacccgcagatatccgtatcctcgccatcaaatccacaaccctgcgcgtggatcaatcaatcctgacgggcgagtccgtttccgtcatcaaacatacggaacctgtgccggaccctagggcggtgaatcaggacaagaagaatatgctcttttcaggaacaaatatcgccgcaggaaaggcactaggtatcgtggccactacaggagtgggcactgaaattggcaaaattcgggatcaaatggctgctaccgagcaagacaagacgcccttacagcagaaactcgacgaatttggggagcagcttagcaaagttatttctctgatttgcgtcgccgtctggctgattaacatcggacactttaatgatcccgtacacggaggatcctggttccgtggtgctatatactactttaagatcgctgtggcactggccgtagctgctatccccgaaggcctccccgccgtgatcactacatgtctggctttgggcacacgcaggatggcgaaaaaaaacgctatcgtgcgttcactgccaagcgtggagacactggggtgtacctctgtaatttgttccgataagacaggtacccttacgactaaccagatgagcgtctgcaaaatgttcatcatagataaagtggacggcgacatttgtctgctgaatgagttttccatcactggatctacatatgcaccagaaggcgaggtcttaaagaatgataagccagtgaggcctggccagtacgacggcttggtggagctagctacaatctgtgcactgtgtaacgattcttccttggacttcaacgaagctaagggcgtgtatgaaaaggtgggtgaagctaccgaaactgctctgacaacacttgtggaaaaaatgaacgtgtttaatacagatgtgcggtcactgtctaaagtcgagagggccaacgcctgcaacagcgtgattcgacaattgatgaaaaaggagtttacattagaattcagcagggatcggaaatctatgtctgtgtattgtagtccggccaaatcttctagggctgctgtaggcaataaaatgttcgtgaagggcgcacctgaaggggtgattgacaggtgcaactacgtgcgtgtcgggacaactagggtgcccctcactgggcccgtgaaagagaaaattatggctgtaatcaaagagtggggaaccggacgagatacacttaggtgtctggctctggctacgcgcgatacgccccctaagagggaggaaatggtgctcgacgattccgctaggtttctggagtacgagactgacctcacattcgtcggggtggtaggaatgctggaccctccccggaaggaggtcactggatccatccaactgtgtagggatgccggaataagagtcataatgattaccggcgataacaagggtaccgctatcgctatttgtaggaggattggcatctttggcgagaacgaagaggtggcagatcgagcctataccggccgggagtttgacgatttaccattggcagagcaaagagaagcttgccgccgtgcttgctgtttcgctcgagtggagccgagtcataagtcaaagatcgtggaatacctgcagagctacgacgagataaccgccatgaccggtgatggcgtcaatgatgcccccgctttaaagaaggctgagataggtatcgcgatgggtagcgggactgcagtggcgaaaaccgccagcgagatggtgctggctgatgacaactttagtaccatcgtagccgctgttgaggagggacgagcgatctacaataacatgaagcagtttatccgatacctcatcagctccaatgtcggggaagttgtctgtatttttttgactgccgcgcttggtctgcctgaagccctgattccagtgcaactcctttgggtaaatctagtcaccgatggactgcctgcaacagctctgggtttcaatccgccggatctggatattatggacaggcctccaagatccccaaaagaacccctcataagcggctggctctttttccggtatatggccatcggtgggtacgtgggcgcagccaccgtgggggccgcagcttggtggttcctgtatgctgaggatgggcctcacgtgaattactcacagttgacgcatttcatgcagtgcacggaagacaacacccattttgaagggatcgactgcgaagtatttgaggcacccgaaccgatgaccatggctctttcagttctggtgacaatagaaatgtgtaacgccctcaattccctatcagaaaatcaatcactgctgaggatgcctccttgggtaaacatctggcttctcggatccatctgcctgtctatgtcgcttcacttcttgatcctgtatgttgaccctcttcctatgatatttaagctgcgtgccctcgacctcacgcagtggctaatggtgttgaaaatatctctgccagttataggtctggacgagatcctgaaattcgtggctaggaattaccttgaaggttag

SEQ ID NO: 179758 - DNA, 2610 bp, synthetic construct
  misc_feature 1..2610: note = Description of Artificial Sequence: Synthetic coding sequence
  source 1..2610: mol_type = other DNA
atgggcaaggtgtaccgggccgaccggaagagcgtgcagcggatcaaggcacgtgacattgtccctggcgatattgtggaagtggctgtcggcgacaaagtgcccgccgatatccgaatcctggcaatcaagtccaccacactgagagtcgaccagtccatcctgacgggagaaagtgtatccgtcattaagcacacagagcccgttccagatccccgtgctgttaaccaggataagaaaaacatgctgttctccggtactaacattgctgccggaaaagcccttgggatcgtggcgacgaccggagtcggtacagagattgggaaaataagggatcaaatggccgcaactgagcaggataagacacccctccaacagaagctggatgagttcggtgagcagctctcaaaggtgatctcactgatatgtgtggcagtgtggttaattaatatcggccacttcaacgatcccgtacatgggggtagttggttccgtggggcaatttactattttaaaattgcagtagcacttgctgtggcagccatcccagagggtctgcccgccgtgatcacaacgtgtctggccttgggtacccggagaatggcgaagaagaacgctatcgtgcggagtctgcccagcgtggagaccctaggttgtaccagcgttatttgtagtgacaaaacaggtacactgactacgaaccagatgtcagtctgcaaaatgtttattatcgacaaggtagatggtgatatctgccttctgaacgagttcagcatcaccggatcaacttacgcgcctgagggagaggtcctgaagaacgataagccggtgaggcccgggcagtacgatggattggtagagctggctacaatttgtgccctttgcaacgattcgagtctggatttcaacgaggcgaagggcgtttacgagaaagtgggcgaggccaccgagactgctctgacaacacttgtagaaaagatgaacgtgttcaacactgatgtacgctctctgtccaaagtggagagggcaaatgcgtgtaacagtgttattaggcagctgatgaaaaaggagttcaccctcgagttttctcgagaccggaaaagtatgtcagtgtattgctcaccagcaaaatccagcagggcagccgtcggcaataaaatgtttgttaaaggagccccagaaggagtgatcgacagatgtaattatgtacgggtaggcacgaccagagtgcccctgacgggccctgtgaaagaaaaaatcatggccgtgataaaggagtggggaacgggtagggacacattgaggtgtttagccctagctacaagggacacacctccaaaacgagaggagatggttctcgatgattcagccagatttctcgagtatgagacagacttgactttcgttggcgtcgtcggcatgctggacccgccgcgcaaggaggtgaccggctctatacagctgtgtcgcgacgcgggaattagggttattatgattacaggagataacaaggggacagccatcgcaatctgccgaagaatcggcatctttggggaaaacgaggaagtggcggacagggcgtacaccggcagggaatttgacgaccttccactggccgagcagcgggaggcttgcaggagagcttgttgttttgcgcgagtggagcctagccataagagcaaaatcgtggagtacctccagtcatacgatgaaataacagccatgacgggcgacggtgttaatgatgcgcctgcacttaagaaagctgaaattggcatagcaatgggatcaggaacagctgtcgctaagacagcctctgaaatggtgctggctgacgataatttctctacaatagtggccgccgtcgaagaaggccgggcaatatacaacaacatgaagcaatttattagatatctcatctcatctaacgtgggcgaagtagtgtgtatcttcttgactgctgccctaggattgccagaagcactgatcccagtgcagctcctgtgggtcaacctggtgacagacggcctgccagctacggccctgggattcaacccaccagatctggatatcatggatcggcctccccgctcgcctaaagagcctttgatctcaggatggctattctttagatacatggcaatcgggggatacgtgggtgctgccacggtcggtgccgctgcatggtggttcctgtacgccgaagacggccctcacgtgaactatagccagcttacccacttcatgcagtgtactgaggacaatacgcactttgaaggcatagattgcgaggtcttcgaggcccccgagcctatgactatggccctgtccgtgttggtgactatcgagatgtgcaatgcgctgaatagcctctctgagaatcagagtctgctcaggatgcccccctgggttaacatatggctgctcgggagtatctgtctgtctatgtcccttcactttttgattctttacgtggacccgctgcccatgatcttcaaattgagggctctcgacctaactcagtggcttatggtactcaagatttccctgcccgtaattgggctcgatgaaattctgaagttcgtagcccgaaactacctcgaggggtag

SEQ ID NO: 179759 - DNA, 2994 bp, synthetic construct
  misc_feature 1..2994: note = Description of Artificial Sequence: Synthetic coding sequence
  source 1..2994: mol_type = other DNA
atggagaacgcccacaccaagaccgtggaggaggtgctgggccacttcggcgtaaacgagtcaaccggcctgagccttgaacaggtgaaaaaacttaaagaacgatggggatccaatgaattgcctgccgaggagggaaaaacacttctagagcttgttatcgagcagtttgaagacctgttggtccggattctcctgctggcggcctgcattagtttcgtgcttgcttggttcgaggaaggcgaagagaccattactgcctttgtggagccgtttgtcatccttctgattctagttgctaacgccatcgtgggggtctggcaagaaaggaatgctgagaatgccattgaagctctgaaggagtacgagcccgaaatgggtaaagtgtacaggcaggaccgaaagtctgtgcagcgcatcaaggctaaagacattgtgccaggtgacatagtcgagatcgcagtcggtgacaaggtaccagcggacatccgccttacgagtatcaaaagtacgaccttgagagtcgatcagtctatcctcacaggagagtcagtaagtgtcatcaagcatacagacccagtgcctgacccaagggcagtcaaccaggataaaaagaacatgctgttttcaggcaccaacattgcagcggggaaggccatgggggtagtcgtggccacaggagtgaacaccgagatcggcaaaatccgcgacgaaatggttgccacagaacaagaacgtacccctctgcagcagaaactggacgagtttggagagcagctttcaaaagtgattagccttatatgcattgctgtgtggattatcaatatcggacattttaatgacccagtgcatggagggtcttggatccgcggggcaatttactactttaagattgcagttgcgttagcagtcgcggcaatacctgaagggctcccggccgttatcacaacttgtctagccttgggcacccgcaggatggctaaaaagaacgccatcgttagatctctgccctcagtggaaaccctcggatgcacctcagtcatatgtagtgataaaactggtactctcactacgaaccagatgtcagtgtgccggatgtttattctggacagggtggaaggcgacacatgttctcttaacgagttcactatcactggctccacttacgccccaatcggggaggtgcataaagatgataaaccagttaattgccaccagtacgatggacttgtggaactagccaccatatgcgcgctttgcaatgatagtgctctcgattacaatgaagctaagggggtgtacgaaaaggtgggggaggctactgaaacagccctgacatgtctggtcgaaaagatgaacgtcttcgacacagaactaaagggcctgtcgaaaatcgagagagctaatgcatgtaattctgtaataaagcagttgatgaaaaaggaattcacactggagttttccagagacaggaagtcaatgtctgtgtactgcacccctaacaagccatccaggacctccatgagcaaaatgttcgttaaaggggcccctgagggcgtgatcgaccgctgcacccatatccgtgtgggctcgactaaggtccctatgacctcaggcgtgaaacagaagattatgagtgtgatcagagaatgggggtccggttctgacactctccgttgtctggccttggcaactcacgataatccccttcggagagaggaaatgcatctggaggatagcgccaattttatcaagtatgaaacgaatctgaccttcgtgggttgcgtgggtatgttggaccctccacggatcgaggtggcctcgagtgtgaagctttgtcgacaggccggaattcgtgtcatcatgataacgggagacaacaaagggacagccgtggctatctgccgtcgcatcggcatcttcgggcaggatgaagatgtgacctccaaggccttcaccggccgagaatttgatgaactcaacccctcagcccaaagggacgcctgcttaaacgccagatgttttgctagagtggagccttctcacaaaagcaagatagtcgaattcctccagtctttcgatgaaatcaccgcaatgacaggggatggtgtcaatgatgcacccgcgctgaaaaaagccgaaatcggaattgccatgggatccggcactgcagtggctaaaacggcgagtgaaatggtgctggctgacgacaacttcagcacgatcgttgctgccgtcgaggagggcagggcaatatataacaatatgaaacagttcatacggtacctgatctcaagcaacgtgggtgaggtggtgtgcatcttcctaaccgctgccctaggcttcccggaagccctgatccctgtgcaactgttatgggtcaaccttgtgactgacgggctccctgccaccgcactcggatttaatcctccagatttggatattatgaacaagcctcctcgaaatcccaaagaacctctgatcagtggctggctgttttttaggtatctcgcaattggatgctacgtgggcgccgccacagtgggcgccgctgcttggtggttcatcgctgctgacggcggccccagggtcagcttctatcagctgtctcattttctgcagtgcaaggaagacaaccccgactttgaaggtgtcgattgtgcaatttttgagtccccctaccctatgacaatggccctatccgtgcttgtgacaatagagatgtgcaatgcactgaattcactctcagagaaccagagtcttctccgaatgcctccctgggaaaatatttggctggtggggtcaatatgcctgtccatgtctcttcacttcctcatcctatacgtcgagccgttgccgcttatctttcagatcacaccactcaacgtaacccagtggttgatggtactgaagatctcgttgccagtaatcctcatggacgagaccttaaaatttgtggctaggaactacctcgagcccgccatcctcgagtag

SEQ ID NO: 179760 - DNA, 3048 bp, synthetic construct
  misc_feature 1..3048: note = Description of Artificial Sequence: Synthetic coding sequence
  source 1..3048: mol_type = other DNA
atggagaacgcccacaccaagaccgtggaggaggtgctgggccactttggagtgaatgagtccacaggtttatcactggagcaagttaagaagttaaaggaaaggtggggcagtaatgaactcccggcagaggaggggaaaactttgctggagctggtgatcgagcaattcgaagatttgctagtgcgaatcctgctgctggcggcatgcatttctttcgtgctcgcatggtttgaagagggagaggagaccatcacggcatttgtggaaccgttcgtgattttgctcattctggtcgctaacgccatcgtcggcgtgtggcaggaacgcaatgcagagaatgcgatcgaggccctcaaagagtacgagcctgagatggggaaggtgtaccgccaggatcgcaaatctgtacagcgcataaaggccaaagatatcgtacctggggatatcgtggagattgccggtgagagcgtgtccgtaataaaacacaccgacccagtcccggaccctagagcggtaaaccaagataagaagaacatgctgttttcagggaccaatatcgctgccggtaaagcaatgggagttgtggttgccaccggtgtgaacacagagataggtaaaatcagggacgagatggttgcaacggagcaggagcgtaccccccttcagcagaagttagatgagtttggagaacaactgtcaaaggtcatctcattgatatgtattgcagtctggataatcaatattgggcactttaatgaccccgtgcatggcggatcatggatcagaggcgctatctactacttcaagatagctgtcgccctcgccgtcgctgccattccagagggactgcctgcagtcattactacgtgtttggcattaggaacgcggaggatggccaagaagaacgccatcgtcaggagcctgccatctgtggagacgctcggatgtacctctgtgatatgctctgataaaaccggcacccttacaactaatcagatgagcgtatgtcgcatgtttatattggatcgtgtcgagggagacacgtgcagcctgaacgaattcacaattaccggttcaacgtatgcacccattggcgaagttcacaaggatgacaagcctgtgaactgtcatcaatacgatggtctcgtcgaactagctacaatctgtgccctatgtaacgacagtgcgctggactacaatgaagccaagggggtgtacgagaaggtgggcgaggccacggagaccgctctcacttgcttggtcgaaaaaatgaacgtatttgatacagagctgaaaggcttgtccaagatagagcgggcaaatgcttgcaattctgtgatcaagcaactaatgaagaaggagtttactcttgagttttcccgcgacaggaagagcatgtccgtgtactgcactcccaacaagcccagccgaacgtctatgagcaagatgtttgttaaaggcgcgcccgagggtgtaatagaccggtgtactcatatcagggtgggatcaactaaggtgcccatgacatccggcgtgaagcagaagattatgtctgttatacgagaatggggctctggatctgacaccctgaggtgtttggctctggccacgcatgacaatcccctccgcagggaggagatgcatctggaagactcggccaacttcattaaatacgagaccaacttgaccttcgtgggttgtgtcggcatgctggaccctccacgcatagaagtggcgtcctccgtaaaactttgcaggcaggccggcatacgggtcataatgataacgggagataataagggtacagctgtggcgatctgtcgtagaattggcatttttggccaagatgaagacgttaccagcaaggccttcactgggagggaatttgacgagttgaatccgtcagcccagcgggacgcttgcctcaacgcacgatgttttgcacgcgtcgagccctcacacaaaagcaaaatagtagagttcctccaatctttcgatgagatcactgccatgactggcgacggcgtgaatgacgcccctgcattgaagaaggccgaaatcggcattgccatgggctccgggactgccgtggcaaagaccgcaagtgaaatggtgttagcagacgacaacttctcaacaatcgtggcggccgtggaggaggggagggcaatctacaataatatgaaacagtttattcgctatttgatttcatcgaacgtcggtgaggtcgtttgtatttttctaacagccgcccttggattccctgaagctctgatcccagtgcagcttctgtgggtgaacttggttaccgacgggctgcccgcgactgcactcgggtttaatccgcctgacttagatattatgaataaacctcccagaaaccctaaggagcccttaatatccggctggctgttttttaggtacttggctataggctgctatgtgggagctgctaccgtcggggcagccgcctggtggttcatcgccgcggatggtggtccaagagtgtctttttaccagctcagtcacttcctgcagtgcaaggaggataaccctgatttcgagggagttgattgcgctatattcgagtcgccctacccaatgacgatggcactttccgtgctggtgactatcgaaatgtgcaacgcactcaactcactatcggagaaccagtcattactgcgtatgccaccttgggagaacatatggctggttggctcgatttgcctgtccatgtcgctgcattttctgattttgtatgtagagcccctgccattgatcttccagattactcctttaaatgtcacccagtggctaatggtgttgaagataagccttcccgtcatcttaatggacgaaacgttgaagttcgtggccaggaattacttggaacctggaaaggaatgcgtgcagccggctacaaaatcttgctcattctcagcctgtaccgacggaatctcatggccattcgtgctgttgataatgcctctggttatctgggtgtacagcactgataccaatttctctgatatgttttggtcgtag

SEQ ID NO: 179761 - DNA, 3129 bp, synthetic construct
  misc_feature 1..3129: note = Description of Artificial Sequence: Synthetic coding sequence
  source 1..3129: mol_type = other DNA
atggagaacgcccacaccaagaccgtggaggaggtgctgggccacttcggagtaaacgagtcaacaggactcagcctggagcaagttaagaaactgaaagagcgatggggcagcaatgaattgcctgctgaagagggtaaaactctgttggagctcgtgattgagcagtttgaagatctcctagtgcgaattctgcttctggcagcttgcatttcatttgtgctggcctggttcgaggaaggagaagaaactatcaccgcattcgtggagccgtttgtaatcctcttgatcctggtggctaacgcaatcgtcggggtgtggcaagaaagaaacgctgagaatgcgattgaagctctaaaagaatacgagccagagatgggcaaggtgtatagacaggaccgaaaaagtgtccaacgcattaaagcaaaggacattgtccctggcgacattgtcgagatcgccgtcggcgataaagtgcccgcagatattcggctcacgtctatcaagagcaccacactaagagtggatcaaagtatactcacaggagaaagtgtgtcagtcattaagcatacagatcctgtgcctgaccctagagctgtgaaccaggataagaagaatatgctgttttctgggacgaatattgcggcaggtaaggctatgggagttgtcgttgcaacgggggtgaatactgaaattgggaaaatcagagatgagatggtagccacagagcaagagaggacgcccctccagcagaagctagacgagttcggcgaacagctctccaaggtaatctctttaatctgcatcgcagtctggatcataaatataggccatttcaacgatccagtgcatggaggctcttggattcggggagcgatctattactttaagatcgctgtggccctcgctgtggctgcaattcccgaaggactcccagccgtaattaccacttgcctggctctgggcacgcggcgtatggcgaaaaagaacgcgatagttaggtcgctacctagtgtggaaacattaggctgtacctctgtcatatgcagcgacaaaacaggaactctgactactaatcaaatgtcagtatgccggatgtttatcctcgaccgggttgagggcgatacctgttccctgaatgagttcactatcactgggtcaacatacgcgccaatcggggaggtccataaagatgacaaaccagttaattgccaccagtatgacgggctcgtcgagcttgctacaatttgcgctctgtgtaacgactctgccctggactataacgaagccaaaggagtttatgaaaaagtgggcgaagcaacagagaccgccttgacctgtttggtggaaaagatgaatgtgtttgataccgaattaaaggggctgtcaaagatcgagagggctaatgcatgcaatagtgttatcaagcagctaatgaagaaagagtttactctggaatttagtagggaccgaaagtcgatgtcagtgtactgcacacctaacaaaccatctcggacctcaatgtctaaaatgtttgtaaaaggagctccagaaggcgtaatcgataggtgcacccacattagggtaggttccacaaaggtacccatgactagcggagtcaagcagaaaatcatgagcgtgataagagagtggggttccggaagtgatactctgcgctgtctggcccttgccacacacgataaccctttgagaagagaagaaatgcacctcgaggacagcgctaacttcatcaaatatgagaccaatctcacgttcgtcgggtgcgtaggaatgctagatccaccaaggattgaggtagcctcgagcgttaagctgtgccgccaggctggcatccgagttattatgatcaccggcgacaacaaagggaccgcagttgctatctgccgcaggatcggaatatttggccaggacgaggatgtcacaagcaaggcctttacggggagagagtttgacgagcttaatccctctgcacagcgggatgcatgccttaatgcccgctgttttgcccgcgttgagccttcccacaagagcaaaatcgttgagttccttcagtctttcgacgagattacagcaatgaccggggatggagtgaacgatgctccggctctgaagaaagcagaaatcggaattgccatgggctctgggacagccgtcgccaaaactgcctcggaaatggtcctcgccgatgacaacttcagcactatcgttgccgctgttgaggaagggcgggctatttataacaatatgaagcagtttatcagatatctaattagcagtaacgtgggcgaggttgtatgtatcttcctgacggcagcgcttggctttccggaggccttaataccggtacagctgttgtgggtgaaccttgtgacggatggattacccgccaccgctctgggctttaatcccccagacttggacataatgaataaacctccaaggaacccgaaagaacccctgatcagtggctggctgtttttccggtacctggccatcgggtgctacgtgggcgccgccaccgtcggtgcggcagcctggtggttcatcgccgccgatggcggccctcgtgtgtctttctaccagctttcccactttcttcagtgcaaagaggacaatccagactttgaaggggttgactgcgctatctttgaatccccatatcccatgaccatggcactttcagtcttggtgacaatcgagatgtgtaatgcccttaactctctctccgagaatcagtcacttctgcggatgcctccctgggagaacatttggttggtcggctccatctgcctgtctatgagcctgcatttcctgatcctgtatgtagagccattaccgctgatcttccaaataactcccctgaatgtgactcagtggttgatggttctgaagatctcgctcccagttatattgatggacgaaactttgaaatttgttgctcgaaattatcttgagcctggcaaagagtgtgttcaaccagcgaccaagtcctgcagcttttctgcatgcaccgatggaattagttggcctttcgtgttactgattatgccattggttatctgggtctactctacggatacaaacttctccgacatgttttggagctag

SEQ ID NO: 179762 - DNA, 2802 bp, synthetic construct
  misc_feature 1..2802: note = Description of Artificial Sequence: Synthetic coding sequence
  source 1..2802: mol_type = other DNA
tgaaccatcaccgccttcgtggagcccttcgtgatcctgctgatcctggttgccaacgccatcgttggcgtctggcaggagcgaaatgccgagaacgcgattgaagccctgaaggagtatgagcccgagatgggcaaggtctatcgacaggaccgcaaaagtgttcaacgtatcaaggcaaaagatatcgtaccaggcgacatagtcgaaatcgcaggtgagtcggtctcggtgattaagcatacagacccagttcccgatccccgcgcagtgaaccaggacaagaagaacatgctcttttccggaacaaacatagccgccggaaaagcaatgggggtggtcgtcgctaccggggtgaacactgagattggcaaaattcgtgacgagatggttgccactgaacaggagagaacccccctgcagcagaagctggacgaatttggagagcagctgtctaaagttattagtctcatctgcattgcggtttggatcatcaatatcggccacttcaacgaccctgttcatggaggctcttggattcgcggcgccatctattacttcaagatcgccgttgcacttgctgtggctgcaatacccgaaggactccctgccgttattaccacctgcctggcattaggaactcgaagaatggctaaaaagaacgctatcgtgagatcacttccctctgtggaaacactgggctgcaccagcgttatctgctccgacaagacgggaacgttgacaactaaccagatgtcagtgtgcaggatgtttattctggatagagtggagggtgacacgtgttctctcaacgagtttaccattactgggtccacttatgcaccaatcggggaggtgcacaaagatgataaaccagtgaattgccaccaatacgatggcttagtggaattggccacaatatgcgccctctgtaatgacagcgccctggactacaatgaagcaaaaggtgtgtacgaaaaagtaggcgaggctacagagacagctctgacatgtcttgtcgagaaaatgaatgtgtttgataccgaactcaaaggcttgtcaaaaatcgagcgggccaatgcttgcaactccgttattaagcagctgatgaaaaaagagtttacactggagtttagtcgtgatagaaagtcaatgagcgtatactgtacccccaataaaccctccaggactagcatgtcaaagatgtttgtaaagggggcaccggaaggagtaattgaccgctgcacacacattcgcgtaggcagcacaaaagtccccatgactagcggcgtgaagcagaagatcatgtccgtgatccgcgagtggggcagtggctctgacactctccggtgcctggccctggctacacacgacaatcccctgaggcgcgaggaaatgcacctcgaagacagcgctaatttcatcaagtacgaaacaaacttaactttcgtgggctgtgtcggcatgctcgacccaccccgtattgaagtggcatctagtgtcaagctgtgtcggcaggcggggattcgcgtaattatgatcacaggcgacaataagggaactgcggttgcgatttgtcgaagaataggaatcttcggccaggatgaagacgtgacctcgaaagcatttacgggccgggagttcgacgaactcaatccctccgcccagagggacgcctgcttaaatgcgaggtgcttcgcgcgcgtagaaccatcccacaagtctaagattgtcgagtttctgcaatcattcgacgagattacggctatgaccggggacggcgtcaacgacgcgcctgctctgaagaaggcagagattggcatcgcgatgggctccggtactgcagtcgccaaaacagcgtccgaaatggtgttagcagacgacaatttttccactattgtggccgccgtggaggaaggtagagccatctataataatatgaagcaatttataagatacctgatttcctccaacgtcggcgaggtggtctgcatcttcctgaccgccgctctggggtttccagaagctctcattcccgtgcagctgctctgggtgaatcttgtcaccgacggtctgcctgccaccgcattgggtttcaatccacccgatctcgatataatgaacaaaccacccagaaatccaaaagaacctctgatcagtggatggctgttttttaggtacttggctattggatgttacgtcggcgctgctacagttggagccgccgcatggtggtttattgcagccgatggcggcccccgtgttagcttctaccagctctcccactttctccagtgtaaggaagataatccagactttgaaggcgtcgactgtgccatcttcgagtccccttatcccatgactatggcgcttagtgtcttggttactatcgagatgtgcaatgctctcaattctctcagcgaaaaccaaagcctgctcaggatgcccccatgggaaaatatctggctggtgggcagcatttgcctgagcatgtcattgcactttctgatcctctatgtggagcctctgcccttaattttccagattacccccctaaacgtcactcaatggcttatggtcctgaaaatttccttacctgttattctgatggacgagacgcttaagtttgttgcgaggaattacttggaaccagggaaggagtgcgttcagcccgctacaaagtcctgttctttctccgcgtgtaccgatggaatatcttggccattcgtactgctgataatgcctttggtcatatgggtgtactccactgacacaaatttttcagacatgttctggagctag

SEQ ID NO: 179763 - DNA, 3663 bp, synthetic construct
  misc_feature 1..3663: note = Description of Artificial Sequence: Synthetic coding sequence
  source 1..3663: mol_type = other DNA
atgggcgacatggccaacaacagcgtggcctacagcggcgtgaagaactccctcaaagaggccaaccatgacggcgactttggaatcacactggctgagttgcgagcgctgatggagctgcgaagtactgatgcccttcgaaaaatccaagaatcctacggcgatgtctatggaatttgcaccaaactgaagacctcccccaacgagggcctgtctggaaatccagcagatctggaacgcagagaggctgtgtttggaaagaattttatccccccaaaaaaacccaagacctttctgcaactcgtgtgggaagcactgcaggacgtgaccttaatcatcttggaaattgctgccattgtgtccttgggcctttcattttatcagccaccagagggtgataatgccctgtgtggcgaggtgagcgtaggagaggaggagggcgagggggaaaccgggtggatcgagggggctgctatcctgctgtcagtcgtctgtgttgtgcttgtgaccgcctttaacgactggagcaaagaaaaacaatttaggggattgcagtctcgcatcgagcaggagcaaaagtttaccgtgatccgggggggacaagtcattcagatcccagtggccgacatcactgtgggcgatatagcccaggttaagtatggagatctccttcctgccgatggcatactgattcaggggaatgacttgaaaatcgatgaaagtagcctcacaggagagtccgatcacgtcaagaagtcgctggataaagacccactgctcctgtcaggaactcacgttatggaagggagcggtcgaatggtggttactgcagtgggcgtgaacagccagactggcatcatattcactctcctgggcgctggaggggaagaggaggagaagaaggatgaaaagaagaaggaaaaaaagaataagaagcaggatggagcaatcgaaaataggaataaagctaaagcgcaggatggggcagcgatggaaatgcagccgctgaagagtgaagagggcggggatggagacgagaaggataagaagaaggcgaatcttcctaagaaagagaagtctgttctgcaaggcaagctaaccaaactcgccgtccagatcggaaaggccggcctgctaatgtcggccataactgtgatcattttagttctatatttcgttattgacacattctgggttcagaagcgtccatggctcgctgagtgcactcctatttatattcagtactttgttaaattctttattatcggagtgaccgtcctcgtggtggccgtgcccgaaggtttaccactggccgtcaccatatccctggcctacagcgtcaagaaaatgatgaaagacaacaatttagtacggcacctggacgcctgtgaaactatgggaaatgctacagcaatctgttcagataagacgggtacgttgacaatgaatagaatgaccgtggtacaggcttatattaatgagaaacattacaaaaaggtgcctgaacccgaagctatcccccctaacatcctgtcctacctggttactggcattagtgtaaattgcgcgtacacctccaaaatattaccgccagagaaagaaggagggttaccacgccacgttggcaacaagacagagtgcgcccttctggggcttctgttagacctgaagcgagattaccaggacgtgaggaatgaaatccctgaggaggccttgtacaaggtgtatacctttaacagcgtccggaagtctatgtccaccgtactgaagaactcagatggcagttacagaatcttctccaagggagccagcgagataatcttaaagaaatgttttaagatcctgtcagctaacggagaggcaaaggttttccgcccccgggatcgggatgatattgtcaaaacagtgatcgagccaatggcctctgaaggactgcgtactatctgtctggcttttcgtgattttcccgcaggtgagcctgaaccagagtgggacaatgaaaatgacatagttactggtttgacctgcattgctgtggtgggaatagaagatccagtacggcccgaggtgcctgatgccatcaaaaaatgccagagggccggcatcacagtgaggatggtaacaggagataacataaacaccgcccgagccattgcaacaaaatgtggtatactccaccccggagaagattttctttgccttgaagggaaggactttaatagaaggataagaaatgagaagggtgagatcgagcaggagcggatcgataaaatatggccaaaacttagggtcctggccagatcatcccccacagataaacacactctggtgaaaggcattattgatagcaccgtgagcgaccagaggcaggtcgtcgcggtgaccggtgacggaactaacgatggacccgctctgaaaaaggccgatgtgggtttcgccatgggaatcgccggcactgacgtagccaaagaagccagcgacataattctgaccgatgacaactttacatcaatagtcaaagccgttatgtgggggcgaaatgtttacgactcaatatccaagttcctacagtttcagctgacagtgaacgtggtggcagtcattgtggccttcacaggggcgtgtatcacccaggatagccctttaaaagccgtgcagatgttgtgggtcaatctgataatggataccctggccagtctggccctggcaaccgagcctcccaccgagtccctcttgctccgcaaaccatatggaaggaataaaccattgatttcacgcactatgatgaaaaacattctggggcacgcgttctaccagctcgtcgtcgtgttcactttactgttcgcgggggaaaaattttttgacatcgatagtggccgcaatgccccgctgcatgccccgccttcagaacactatactatagtgtttaataccttcgtgttaatgcaactgttcaatgaaattaatgctcgaaaaatccacggggaaaggaacgtgtttgaagggatttttaacaacgccatattctgcactattgtgctggggaccttcgttgtacagattatcatagttcagtttgggggcaagccattctcttgttcagagctgagtatcgaacagtggctttggtccatctttctcgggatgggaactttactatggggacagttgatctcaaccatacccacgagccgccttaagtttttaaaagaggccggccacggaacccagaaggaggagattccagaagaggagctggctgaagacgttgaggaaattgatcatgcagaaagggagctgcgccgagggcagattctatggttcagaggactcaaccgaattcagacccagatcagagttgttaatgcctttagatcgtcactgtacgagggtcttgaaaagcctgagtcccgaagctccatccacaattttatgacacaccctgaattcagaattgaagactccgagcctcatatcccactgatagacgatactgatgcagaagatgacgctccaaccaagagaaactcttcaccccctccatcacccaataaaaacaacaatgccgtcgattctgggattcatctcaccatcgagatgaataaatcggccacgagctccagtcccggctctccactccattccctcgaaacaagtctgtag

SEQ ID NO: 179764 - DNA, 3555 bp, synthetic construct
  misc_feature 1..3555: note = Description of Artificial Sequence: Synthetic coding sequence
  source 1..3555: mol_type = other DNA
atgggcgacatggccaacaacagcgtggcctacagcggcgtgaagaactcactcaaagaagccaatcatgatggtgacttcggcatcacactggcagagctgagggcattgatggaactcagatccaccgatgccttgaggaaaatacaggagtcctacggagatgtatacgggatttgtactaaactcaagacttcacctaacgagggcctctccggcaaccctgctgaccttgagaggcgagaagctgtgttcgggaagaattttattccccctaaaaagccaaaaacttttcttcagctggtttgggaagctctgcaagatgtcacacttatcattctggaaatcgctgccattgtatcactggggctgagtttttaccagccaccggagggcgacaacgcgttatgcggggaagtgtctgtgggcgaggaggaaggagagggtgagaccgggtggatcgaaggcgccgctattctcctatccgtggtgtgtgttgtactcgtcacggcgtttaatgattggagtaaggaaaaacagttcaggggcctgcagagtcgcattgaacaggagcagaagtttactgttattcgcggtggtcaggtaatccagattcctgtggctgatatcaccgtgggcgacatagcccaagtcaaatacggcgatctactgcctgctgacgggattttaatccaaggaaatgacctcaaaattgatgagtcctctctaactggagagagtgaccatgtcaagaagtcccttgacaaagaccctctgctgttaagcggcacccatgtgatggaaggtagtggaagaatggtggtgaccgcggtcggggttaactctcaaaccgggatcatttttaccctgcttggagcagggggtgaagaggaggagaagaaggacgaaaagaagaaagagaagaaaaacaagaagcaggatggcgcgattgaaaataggaataaggccaaggctcaagacggggccgccatggagatgcaaccattaaaaagcgaggaggggggggatggtgacgagaaggacaagaagaaagccaacttgcctaagaaagagaagagcgtgttgcaaggaaagttaacaaaacttgccgtccagatcggaaaggccggcctgttaatgtctgcaatcaccgtgatcatcctggttttgtattttgtcattgataccttttgggtacagaaacgaccttggctcgctgaatgtactcccatttatatacagtacttcgtgaagtttttcatcatcggagtcacagttctggtggtcgctgtgcccgagggtttaccattggccgtaacaataagcctagcgtacagtgtgaagaagatgatgaaggataacaacctcgtccgacacttggacgcttgcgaaactatgggaaacgcgactgccatatgttcagacaaaacagggacactcaccatgaataggatgacagtggttcaggcctacataaatgaaaagcattataagaaggtgcccgagcccgaggccatacctcctaacattctgtcatatttggtcactggtattagcgtaaactgtgcgtacacttctaagatacttccacctgagaaggagggaggccttccacgccacgtcggcaacaagaccgagtgcgcactcttgggcttactcctggacctgaagcgggattaccaggatgttaggaacgagatcccggaagaagcactgtacaaagtgtacacattcaattccgtgcgaaagtctatgtccacagtcttgaagaacagcgacggatcttaccgtatatttagtaagggggctagcgagatcattctgaaaaagtgttttaaaatcttatctgctaacggcgaggccaaagtcttcaggccacgggatagggacgacattgtgaagaccgtgatagaacccatggctagtgaagggcttcggactatctgcctggcatttcgagatttccctgccggagaacccgaaccagaatgggacaatgaaaatgatatcgtcaccggcctcacttgcattgccgtggtgggcatcgaggaccccgtccgccctgaggtcccagatgctatcaagaagtgtcagcgggcggggattaccgtgcggatggtgaccggcgataatataaacaccgctcgggccatcgcgacaaaatgtggtattttgcatccgggcgaggattttctttgtctagagggaaaggatttcaatcggcgcattaggaatgaaaagggcgagattgaacaggagagaattgataagatttggccgaaacttcgcgtgctggccagaagctcacccacagataagcacacccttgttaaaggcattatcgattccaccgtctcggaccaacgccaggtcgttgccgtgactggagacggcaccaacgacggtccggccctaaagaaggcggacgtcggctttgctatgggaatcgcgggtacagatgtggccaaggaagctagcgatattatactgaccgatgacaacttcacgagcatcgtcaaagcagtcatgtggggtcgcaatgtgtacgactcaatctccaagttcctgcaatttcagctgacagtgaatgttgtggcagtgattgtcgcatttacgggcgcctgcattactcaggattcacccctgaaggccgttcagatgctctgggtaaatcttattatggacacactcgcttcccttgccctggcaaccgaacccccaaccgagtctcttttgctgcgtaagccatatggaaggaataaacctctcatttctcgcacaatgatgaagaatatcctgggccacgcattctaccagttagtcgtggtttttacgctcctttttgctggagagaagttctttgacatcgactccgggagaaacgcgcctctgcacgctcccccctctgagcattacacgatcgtcttcaatacttttgtcctgatgcagctcttcaatgaaatcaatgcacgcaaaattcacggtgagcgcaatgtgttcgaagggatcttcaacaatgctattttttgcaccattgtactagggacttttgtggttcagctgatttctaccattccaacttccaggctgaagtttttaaaggaggcaggtcatggaacacaaaaggaagagattcccgaggaagagcttgccgaagatgtcgaagagatcgatcacgccgagagggagcttcgccgtggtcagatcctgtggttcagggggctcaaccggattcaaacacagataagggtagttaatgctttccggtccagcctgtatgagggccttgagaaaccggagtccagatcttcaatacacaacttcatgacacaccctgagttcaggatagaggatagcgagccacacataccactgattgacgacacagacgccgaagacgatgcaccgaccaaacggaactcatcccctccacctagccccaataaaaataataacgccgtagattctggcattcacctgacaatcgagatgaacaaatccgccacaagcagttctcccgggtctccgctgcactcactggaaactagcctgtag

SEQ ID NO: 179765 - DNA, 3531 bp, synthetic construct
  misc_feature 1..3531: note = Description of Artificial Sequence: Synthetic coding sequence
  source 1..3531: mol_type = other DNA
atgggcgacatggccaacaacagcgtggcctacagcggcgtgaagaactcgctcaaggaagcgaatcatgacggcgatttcgggataaccctggctgaactaagggctctgatggagctacgttcaaccgacgcactccgtaaaatacaggagtcatacggagatgtgtacggcatatgcacaaaactgaaaacgagcccaaacgagggtctgtccggaaaccccgccgacctcgaacggagggaggccgtgtttggaaaaaacttcatcccacccaaaaaacctaaaaccttccttcagctggtgtgggaagcactgcaggacgtaactctgatcatccttgaaatagccgctattgtctctctggggctgtccttctatcaaccaccagaaggggataacgccctttgtggcgaagtcagcgttggggaagaggaaggcgaaggagagacagggtggatcgaaggcgcggcaatcttgctgtcggtcgtgtgtgtggtgttggtaaccgcatttaatgactggagtaaggagaagcagttcagggggctccagagccgaattgagcaagaacagaaattcactgtcattaggggcggtcaagtaatccagattccagtggccgatatcactgtgggagacattgctcaagtaaagtatggagacctcctccccgcagacggtatccttatccaggggaatgacctgaagatcgacgagtcatctctcactggcgagtccgatcacgtcaaaaaatcactggacaaagaccctctgctgctcagtggcacacacgtgatggaagggtcagggcggatggtggtgacggccgttggtgtaaactcccaaaccggaatcatctttacactgcttggggctggcggagaggaggaagaaaagaaggacgagaaaaagaaagagaagaagaataagaagcaggacggagctattgagaaccgcaacaaggctaaggcacaggatggcgccgctatggaaatgcaacctctcaagagtgaggaggggggggatggggacgaaaaggacaagaaaaaggctaatctcccaaaaaaggagaagtccgtgcttcaagggaagctgaccaagctggccgtacagataggtaaggccgggctgctgatgtccgctatcactgtcatcattctagttctttactttgtcatcgataccttctgggtgcaaaaaagaccgtggctggcggaatgcacacccatttacattcagtatttcgttaaattctttataataggtgtcacggtgctggtcgtagcagtaccagaaggcctccctcttgcagttactatctcccttgcttacagcgtcaagaaaatgatgaaagataataatctggtgaggcacctggacgcgtgcgaaacaatgggtaacgccactgctatctgtagtgataaaacggggacactgaccatgaacagaatgacagtggtgcaagcttacatcaacgagaaacactataagaaagtgccagagcctgaagcaatcccccctaacattctctcatacctcgtgacgggaatatcagtgaattgcgcctatacttcaaagatcttgcctccggaaaaagagggtggactgcctcgccacgtcggtaataaaaccgaatgcgccttgctcggcctgctgctggacctcaaacgagactatcaagatgtaaggaatgaaatcccagaagaggcactgtacaaagtctacaccttcaacagtgtcagaaagtcaatgtctacagtcctgaaaaacagtgacggttcctataggattttctccaaaggagcctcagagatcattctgaagaagtgcttcaaaatcctctccgcaaacggcgaggctaaggtgtttagacctagggatcgcgacgatattgttaagactgtaattgaacccatggcttcggaaggattgaggactatttgccttgctttccgggatttcccagcgggcgagccagaaccggaatgggataatgagaatgatattgtgacaggcctaacctgtattgctgtggtaggtatcgaggacccagtgcgaccagaggtgccagatgctatcaaaaaatgtcagagggcaggaataaccgtgcgtatggtcacgggcgacaacatcaacacagcacgcgccattgctactaaatgcggcattctgcaccctggggaagatttcctttgcctggaggggaaggatttcaatcgccgaatccgcaacgagaagggtgagattgaacaggagaggattgacaaaatttggccgaaactgcgggtgctggctcgatcctctcctacagacaaacatacgttggtgaagggaatcatcgattctactgtttcggatcagaggcaagtcgtagccgtgactggcgacggcactaacgatggacccgctctaaaaaaggccgatgtagggttcgccatgggcatagcgggaaccgatgtggctaaggaggcttcagatattatcctaacagacgataactttacctccattgttaaagccgtgatgtggggccgcaacgtatacgactcaatctcgaagttccttcagttccaactgactgtgaacgtggtagcagtcatcgtggcctttaccggcgcttgcataacccaggactcccctctcaaggccgtgcaaatgctttgggtcaacttaattatggacaccttggcttccctcgccctcgccacagaacctccgacagagtccttgctgctgcggaagccgtatggcaggaacaaaccactgatcagtagaacaatgatgaaaaacatcctcgggcacgccttttaccagctcgtcgtagtgttcacactactgtttgcaggcgagaagttcttcgacatagactcgggacggaatgcccctctacacgctcctccctctgagcattacacaattgtgttcaatacctttgtgcttatgcaactgtttaatgaaatcaatgcccgcaagatccacggggaaagaaacgtctttgagggtattttcaacaatgccatcttttgcaccatcgtcctcggtaccttcgtagtacagattatcattgtccagttcggggggaaaccattttcttgctcggagctgtccatcgagcagtggctctggtcaatcttcctgggaatgggtactttactctggggacagttgatttcaacaatacctacctcacggttgaaatttctcaaagaagccgggcacgggacacagaaagaagagatccccgaagaggagttagctgaagacgtcgaggagatcgatcacgccgagagagagctcaggaggggacagattctatggtttcgggggctgaataggattcaaactcagatggatgtggtcaatgcgttccaaagcggctcaagcattcagggcgctctgcgtcgccagccaagtattgcctcccaacatcacgatgtgacaaatatcagtactcctactcatgtagtgttttcatcctctacagcatcaaccactgttggctattcttccggtgagtgcatctcctag

SEQ ID NO: 179766 - DNA, 2892 bp, synthetic construct
  misc_feature 1..2892: note = Description of Artificial Sequence: Synthetic coding sequence
  source 1..2892: mol_type = other DNA
atgttcctggtgatcggcacccacgtgatggagggcagcggccggatggtggtaacggcagtgggtgtaaactcccagacagggatcattttcactcttctgggtgctggcggcgaggaggaggagaagaaggacgaaaagaagaaggagaagaaaaacaagaaacaggatggtgccatcgagaataggaacaaggccaaagcccaggatggcgccgctatggagatgcagcctctgaagagcgaagagggaggtgatggagacgagaaggacaaaaagaaggccaatctgccaaagaaggaaaaaagcgtgcttcagggcaagcttacgaaactggccgtccagatcggtaaagcgggtttgctcatgtccgctatcaccgtcataatcctcgttctgtatttcgtcatagatacattttgggtccagaagagaccctggctagctgagtgtacacccatatacatacagtactttgtgaaatttttcatcattggagtgacagtcctcgtggttgccgtgccagaaggccttcctctcgcggttaccatctccctggcctattctgtgaaaaagatgatgaaagacaacaatttagttcggcacctggacgcttgtgagacaatgggaaacgccacagcaatttgtagcgacaagacaggaaccttaacgatgaatcgtatgacagtagtgcaggcctacattaacgaaaaacactacaaaaaggtgcccgaacctgaggccatcccccccaatatactgtcatacctcgtgaccggtatcagtgtgaattgcgcatacacaagcaagatcctaccccccgaaaaggagggcggacttccacgtcatgtcggtaataagaccgagtgcgcattgcttggcctcctccttgatctcaagagggactatcaggacgtacggaatgagattcccgaagaggcgctgtacaaagtctacactttcaactctgttcggaaaagcatgtcaacagtcctgaagaattctgatgggagctacagaatcttttccaaaggagctagcgaaattattcttaaaaaatgtttcaaaattttgagtgctaacggagaggccaaagtgttcaggccacgagatcgagacgatatagtaaaaacggttatagaacctatggctagcgagggccttcgaacgatttgcctagccttccgggacttcccagccggtgagcccgaaccagagtgggataacgaaaacgacattgtgacaggcttaacgtgtatcgccgtagttggaattgaggatcctgtaagacccgaagtgcctgacgcgatcaagaagtgtcagcgggccggcattaccgtgcggatggttaccggcgataatattaacacggctagagcgatagcaactaagtgtggtatcttgcaccctggggaggacttcctttgtttggaggggaaagacttcaacaggcgcatcagaaatgagaagggcgagattgagcaggagcggatcgataagatttggccaaagctgagggtcttagcccgaagttctcctacggataaacacacactggtgaaaggcatcatcgatagcaccgtctctgaccagagacaagtggtcgccgtgacaggcgatggaacgaatgatgggcctgcactcaaaaaggcagacgtaggcttcgcaatggggatagccggcacagatgtcgcaaaagaggcaagcgacattattctgacagacgataacttcacaagcatcgtaaaagctgtcatgtgggggcgaaacgtgtatgatagcatctccaagtttctgcagttccagctgaccgtcaatgtggtggctgtgatcgtggcattcacgggcgcctgtattacccaggatagcccacttaaggcagtgcagatgctctgggttaaccttattatggacaccctggctagcctggccctggccaccgagcccccaaccgaaagtctgctgctgcgcaaaccgtatggacgcaacaagcctttgataagccgaactatgatgaaaaatatcctcggccacgcattctaccagctggtagtggtattcaccctgcttttcgcgggtgaaaagttctttgatatagactcgggacggaatgcacctctgcacgctcctccctctgagcactacaccatagtattcaatacatttgtgctgatgcagctgttcaacgaaatcaacgccaggaaaatccacggagagcgcaacgtcttcgaaggcatattcaataatgcaattttttgtactattgtcctcgggacgttcgtggtgcagattattatcgtacaatttggcggtaagccattttcctgcagcgaactgtctatcgaacagtggctctggagcatctttttgggcatgggtacactgctctgggggcagctgattagcacaatacccacctcccggctgaagttccttaaagaggccgggcatggcacacagaaggaggaaattccagaggaggagctcgccgaggatgtcgaagagattgatcacgctgaacgggagctgcgaagggggcagatcctgtggttccggggattgaatagaattcagacccagatccgagtggtgaatgcctttaggtcttctctttatgaaggactggagaaaccagagtcgaggtcttctattcacaactttatgacccatccggaatttagaatcgaagactctgaaccacatatacccctcattgatgacaccgacgcagaggacgacgccccaacgaaacggaatagctcccctccaccaagcccaaataaaaataataatgctgtggactcaggaatccaccttacaattgagatgaacaagtcggctacctcgtcttcaccgggctcccctctgcattcgctggaaacaagcctctag

SEQ ID NO: 179767 - DNA, 3663 bp, synthetic construct
  misc_feature 1..3663: note = Description of Artificial Sequence: Synthetic coding sequence
  source 1..3663: mol_type = other DNA
atgggcgacatggccaacaacagcgtggcctacagcggcgtgaagaactctctcaaggaggctaatcacgacggtgacttcggcatcactttggccgagttacgcgccttaatggagctgcgctctacagatgcactgcggaaaattcaggagtcctatggagacgtttacgggatttgtacaaagctcaagactagtcctaacgaaggcctgagtgggaatcccgcggacctggaaagacgcgaagcagtttttggcaagaacttcataccacccaagaaaccgaaaacgtttttgcagctggtgtgggaggctttacaggacgtcacattaataatactcgagatagccgcgatcgtttctctgggcctttcattttaccagccacctgagggggataatgctttgtgcggtgaggtgtccgtgggagaggaagagggagagggagagacggggtggatcgagggtgcggccattctcctgtctgtagtatgtgtggtccttgtgactgcttttaacgattggagtaaggaaaaacaattcagagggctccagagccgaattgaacaagagcagaagttcacggtcatacgtggggggcaggtcatccagatacccgtcgctgacatcacagtaggtgacatagcacaggtcaagtacggtgatttgctgccggctgacggcatcctgatccagggcaacgatcttaagatcgatgagagctccctcacaggggaatccgaccacgtcaagaagtcactggacaaggaccccctgttgctcagcgggactcatgttatggaaggtagcggccgcatggtagtgacagcagtaggtgtgaattcacaaacgggtattatttttacattgctgggtgccgggggtgaagaggaggaaaagaaggatgagaaaaaaaaggagaagaagaacaagaaacaggacggagcgatagagaatcgaaacaaagccaaagcccaagacggcgccgctatggagatgcagcctctgaagagcgaggaagggggggacggggatgagaaagataaaaagaaagcaaacttgcccaaaaaagagaaatcggtactgcaggggaaattaactaagctggctgtgcagattggtaaggctggcctcttgatgtcggccatcacggtgatcatcctggtgttatactttgtcatcgacaccttttgggtccaaaagcgcccgtggctggctgaatgcactcccatctatattcagtattttgttaaattctttatcatcggcgtcacagtgctcgttgtggccgtccccgaaggtctgccattggcagtgacaatatccttagcctactcagtcaagaagatgatgaaagacaacaatttggtaagacacctagatgcatgcgagactatgggaaatgctactgcgatttgctcggacaaaaccggtacgttgacgatgaaccggatgaccgtcgtgcaggcgtacataaatgagaaacactacaagaaggttcctgagccagaggctatacccccaaacatcctctcttatttggttaccggcatctccgtcaattgtgcctacaccagtaaaatcctcccacctgagaaagagggcggactcccccggcatgttgggaataagacagaatgcgcactgttaggtctgcttctcgatctcaaaagagactatcaagatgttcgaaatgaaataccagaagaagctctgtacaaagtgtacactttcaattccgtgaggaaatctatgtccaccgtgttgaaaaacagcgatgggagctatcgaatcttttccaaaggagcttcagagataattctgaaaaagtgtttcaagatcctaagtgccaacggcgaagcaaaggtgttccggccccgtgatcgggacgatatagtaaagacggtcatcgaaccaatggcttcagaaggattaagaactatctgcctagccttccgagatttcccagctggagagcctgagccagagtgggataatgaaaacgatatagtcaccggtctgacttgtatagcagttgtgggcatcgaagacccagtgcggcctgaggtgcccgatgccattaaaaagtgtcagcgcgctggaattaccgtcagaatggttaccggggataacattaatacagctagagccatcgcaacaaagtgcggtattctgcatcccggggaagacttcctgtgcttggaaggcaaggattttaacagaaggatccggaatgaaaagggcgagatagagcaagagcgcattgataaaatctggccaaagcttcgtgtcctagcacgaagctcaccaacagataaacataccctcgtgaagggtatcatagattccacagtttccgaccagaggcaagtcgtggccgttacaggggacggaacgaatgacgggccagccctcaagaaggctgacgtcgggtttgctatgggcatcgcaggaaccgatgttgccaaggaggcgtcagacatcatccttactgacgacaacttcacaagcatcgttaaggctgttatgtggggccggaacgtttatgactcaatttccaagtttctgcaatttcagctgaccgtgaatgtcgtggctgtgatcgttgccttcactggagcgtgcataactcaggacagcccccttaaggctgtgcagatgctctgggtgaacctaatcatggataccctggctagtttggccctagccacggaaccccctacagaaagtctcttacttcgaaagccgtacggtcgaaataaacccctcatatctcgcactatgatgaagaatatactgggacatgcgttctaccagcttgtagtggtgttcacactcctgtttgcaggagaaaaatttttcgacatagactcaggcagaaatgccccactccacgcaccccctagcgaacactacaccatcgtgtttaacacttttgtgcttatgcagctctttaacgagattaacgcaagaaaaatccatggggagcggaatgtgtttgaaggcatctttaataacgctatcttctgcacaattgtactgggaaccttcgtggtacaaattatcatagtacagtttggtggaaaacccttcagctgcagtgagctgtccatcgaacaatggctctggtccatttttctggggatggggacgctcctatggggccaactgattagcacaatccctaccagccgcctgaaatttctgaaagaagccggtcacgggacgcagaaggaagagattcctgaggaagaactcgctgaggatgtggaagagatagatcatgccgagcgggaactccgcagggggcagattctctggtttagggggctaaataggatccagactcaaatcagggtggtgaacgcgttccgatcaagcctctatgagggactcgaaaagccagaatcaagaagcagtatacacaacttcatgacccaccccgagtttaggatcgaagacagcgagcctcacataccactaatagatgacacggacgccgaggatgacgcacccaccaagcggaactcctctcccccgccatcaccgaataaaaacaacaatgcagtggacagtgggattcatcttaccatcgagatgaacaaaagcgccactagctcttccccgggcagccccctccatagtctggaaacaagcctgtag

SEQ ID NO: 179768 - DNA, 306 bp, synthetic construct
  misc_feature 1..306: note = Description of Artificial Sequence: Synthetic coding sequence
  source 1..306: mol_type = other DNA
atgggcgacatggccaacaacagcgtggcctacagcggcgtgaagaatagcctcaaagaagctaatcacgacggcgatttcggcatcaccctagcggaactgcgggctttgatggaactgcgcagtaccgatgcactgaggaagatccaagagagctacggggatgtctacggaatatgcacaaagctgaaaacgtctcccaacgaaggcgaattctattatgcgtgcttctggtttttcgtgcagcgggtgctatatatttggttaatcaatgaacacgcgtacataattctggcgatcgtctag

SEQ ID NO: 179769 - DNA, 3600 bp, synthetic construct
  misc_feature 1..3600: note = Description of Artificial Sequence: Synthetic coding sequence
  source 1..3600: mol_type = other DNA
atgggcgacatgaccaacagcgacttctacagcaagaaccagcggaatgaatcatcgcacggcggggagttcgggtgcactatggaagagctcagaagcctgatggaattgcgaggtacagaagccgtcgtgaagatcaaagagacctatggggatactgaagctatttgccggcgtctcaaaacgtcacccgttgaggggctccccggaactgctccagatctggagaaaagaaagcaaatttttggccagaacttcattccccccaagaagcccaagaccttccttcagttggtgtgggaagccttgcaggacgtgactctcatcatactggaaattgctgcgatcatttctcttggtctgtctttctatcatcccccaggcgaaggtaacgagggttgcgcaaccgctcagggaggagccgaggacgaaggcgaggctgaggcaggttggatcgagggcgcggccattctgctctctgtgatatgtgtggtgttagtaacagccttcaatgactggagcaaggagaaacagttcagaggcctacagtctaggatagagcaggagcaaaaattcaccgttgttagggccggccaggtcgtgcagatcccagttgccgagattgtggtgggggatatcgctcaggtgaaatatggtgacctgttacctgccgatgggttgttcattcaaggaaatgatttaaagatcgacgaatcctccctgacaggggaaagcgaccaagtgaggaaaagtgtcgacaaagaccctatgctgctctctggcacacacgtgatggagggctctggacggatgctggtcaccgctgtgggggtcaattctcagaccggaatcatatttacgctcttgggcgccggtggagaggaggaggagaagaaggataagaagggggttaagaaaggagacggactgcagttacccgcggccgacggtgccgccgcgagcaatgctgccgactccgccaatgcgtctctggtgaacggcaagatgcaggacgggaatgttgatgccagccagagcaaggccaaacaacaagatggcgccgccgctatggagatgcagccattgaaaagcgcagaggggggcgatgctgacgatcggaaaaaagccagcatgcacaagaaagagaagagtgttttgcaagggaagctaacaaagcttgctgttcagattggcaaagcggggttggttatgtctgctatcactgtcattatactcgtcctttattttaccgttgacaccttcgtcgtcaacaagaagccctggctgcctgagtgcacacccgtctacgttcagtatttcgtgaaatttttcattatcggagtgaccgtgctcgttgtggctgtgcctgaggggctgcccttggccgtgaccatttccctcgcatacagcgtgaaaaagatgatgaaagacaataacctggtaagacacctcgacgcctgcgagacaatggggaatgcgaccgctatttgctctgacaagacaggcactctgactacgaaccgcatgaccgtggtgcaagcttacgtgggtgatgtccactataaagagattccagacccctctagcatcaataccaagacaatggaactactcattaatgctattgccatcaattccgcttacaccacaaagatcttacctccggaaaaagagggcgcgctccctaggcaagtgggcaacaaaaccgaatgcggtttgttggggtttgtgttggatcttaagcaagattatgaacctgtcagatcccagatgcctgaggagaagctatacaaggtctacacctttaacagtgtcaggaaatcaatgagcactgtcatcaaactgcccgatgagtccttcagaatgtatagtaaaggagcctccgagatagtgctaaagaagtgctgcaaaatcctcaatggtgctggcgagcctcgtgtcttcagaccaagagacagggacgagatggtcaaaaaggtcatagaaccaatggcctgtgatggtttgcgcacgatttgtgtggcctatagagatttccccagcagccctgaacccgactgggacaacgagaacgacatcctgaatgaactgacttgcatctgcgtggtgggaattgaagatcccgtacgtccggaagtgcccgaggcaatccggaaatgtcagagggctggcataactgtccgtatggtaaccggcgacaacattaacacagctagggcgatagccatcaagtgtggtatcattcatccaggggaagatttcctgtgtctggaagggaaggaatttaaccgtaggataaggaacgagaaaggcgaaattgaacaggaacgcattgacaaaatttggccgaagctgagagttctggctcgctccagtcccacagacaagcacacgcttgtcaaaggaatcattgactctacccacactgaacagcggcaggtggtggccgtaacgggcgacggcactaatgacggccctgctctaaagaaggccgacgtagggtttgccatgggcattgctggaactgacgttgctaaggaggcatccgacataattctcaccgacgataattttagttcaattgtgaaggctgtgatgtggggccggaacgtgtatgatagcatatcaaaattccttcagtttcagctgaccgtgaacgtcgtggccgttatcgtggcattcaccggcgcctgcataacacaggattccccattaaaagctgttcagatgctttgggtcaatttgattatggatacatttgcctccctggctctggccacagaaccgcccaccgagaccctgttactgagaaagccctacggacggaataaacccctgattagtaggacaatgatgaagaatatcttgggccacgccgtgtaccagttggcactgattttcacacttctgttcgtgggagaaaagatgtttcagatcgactcaggaaggaacgcaccactacacagtccacctagcgaacactacaccattatctttaacaccttcgtgatgatgcagctgtttaacgaaatcaatgccagaaagatccacggggagcgcaatgtcttcgacgggatttttcgaaatcccatcttttgtacaattgtcctggggacatttgctatccaaatagtcattgtgcagttcgggggaaagcccttttcttgtagcccattgcagctggatcagtggatgtggtgtatctttatagggctcggagagttggtctggggtcaggtaatcgcaacaatcccgactagccggttaaagtttctgaaagaggccgggcgactgacacaaaaagaggagatccctgaggaggaactcaacgaggacgtcgaagagatcgaccatgccgagcgcgaactgaggcggggccagatcctgtggtttcgcgggctgaatcggatccagacccagatagaagtggttaatacttttaaatctggagcctctttccagggagccctacgacggcaatccagcgtgacgtcccagtcacaggacgtggcgaacctcagcagccccagccgagtctctttaagtaacgctctcagctccccgacctccttacccccggctgctgcaggccgcgagtag

SEQ ID NO: 179770 - DNA, 3690 bp, synthetic construct
  misc_feature 1..3690: note = Description of Artificial Sequence: Synthetic coding sequence
  source 1..3690: mol_type = other DNA
atgggcgacatgaccaacagcgacttctacagcaagaaccagcggaatgaaagtagccatggtggtgagttcggctgcactatggaagagctgcgcagcctgatggagttgcgaggaacggaagcggtagtgaagattaaggaaacatacggggacaccgaggccatctgccgcaggctgaagacctcccctgtggaggggctgcccggaacagcccccgacctggagaaaaggaagcagatctttgggcagaatttcataccacccaaaaagccaaagacctttttacagctggtgtgggaagcattacaagacgtgacgctcatcatcctggagatcgcagccatcatctcccttggtttgtctttctatcacccccccggcgaagggaacgagggctgtgctacggcccaaggtggcgcagaagacgagggggaggcagaagcaggatggatcgagggagccgccattctactgtccgtgatctgtgtggtgctggtgaccgcgttcaatgactggtctaaagagaagcaattcaggggtctgcagtccagaattgaacaggagcaaaagtttacggtggttagggctgggcaagtcgtgcagataccagtagcagaaattgtcgttggagacatagctcaagtgaagtacggcgatctcttaccggcagacggactgttcatacagggcaatgatttgaaaattgacgaaagctccctgactggcgaatcagaccaggtgcgaaaatcagtcgacaaggatccaatgttgctttccggcacgcatgttatggaagggtcaggaagaatgcttgtcactgcagtgggtgtgaactcccaaacaggcatcatttttacactgcttggcgcgggtggcgaggaggaggagaaaaaggataaaaagggtgtgaagaaaggcgatggccttcagcttcctgcagctgatggtgcggctgcgagtaacgccgcagactccgcgaacgccagcctcgttaacgcaaaacagcaagatggtgccgccgctatggagatgcaaccattaaaatccgcggaggggggggatgccgatgacaggaagaaagcatccatgcataaaaaggagaagagcgtgttacagggcaagctgaccaagctcgctgtccagatcgggaaggccggccttgtcatgagcgccattacggtcattatcttagtactatacttcaccgtcgacacgtttgtagtcaacaaaaagccatggctcccagagtgcaccccagtatatgtgcagtatttcgtgaaattctttatcattggggtaacggtgctggtggtggctgtgccagaaggcctgccactggcagtcactatctcattggcctactccgttaaaaaaatgatgaaagacaacaatctggtcaggcaccttgatgcatgcgagacaatgggaaatgcaactgccatatgttctgacaagacggggaccttaactactaacagaatgaccgtcgtgcaggcatacgtgggtgatgtgcattacaaggaaatccccgacccttctagcataaacacaaagactatggagctgctcatcaatgccatagccattaactccgcgtacactacaaaaattctgccccctgaaaaggaaggagctttgccacgccaggtgggaaataagaccgaatgtgggttgttgggatttgtcctggatctgaagcaggactatgagcccgtccgaagtcaaatgccagaggagaagctgtataaagtgtatacattcaattccgtcaggaagagtatgagcaccgtgatcaaacttcctgacgaatcgttccgcatgtattctaaaggggcatccgagatcgtgctgaaaaagtgttgtaagatcctgaacggggccggggaacctagggtttttagacccagggacagggacgagatggtcaagaaagtcattgagccaatggcctgcgatgggctgcgcacaatttgtgtggcctacagagattttccttctagccctgaaccggactgggataacgagaatgacattctcaacgagctcacgtgcatctgcgtagtgggaattgaggaccctgttaggccagaagtacccgaagccatacgcaaatgccagagggctgggatcacagtaagaatggtaaccggcgacaatattaataccgcccgggctattgctattaaatgcgggataatccatcccggggaggactttctgtgtctggagggcaaagaattcaacagacgtatccgtaacgagaaaggcgaaatcgagcaggaaaggatcgacaagatttggcctaaactcagagtcctggcaaggtcttctcccacagataaacatacattagtaaagggcataatagattcaactcatacagagcagcgccaggtggtagccgtgaccggcgatggcaccaatgatggtcctgcactcaaaaaggccgacgtaggatttgctatgggcatcgccggaacggacgtggccaaggaagcctctgacattatccttaccgacgacaatttctctagcatcgtcaaggccgtgatgtgggggaggaacgtgtatgattccatctcgaaattcctccagtttcaattaaccgtgaacgttgtggcagtgatcgtggctttcaccggggcatgcataacccaagactctccactcaaagcggtgcaaatgctctgggttaatcttattatggataccttcgcgtctctcgcactcgctactgaaccaccaaccgagacactgctcctgcggaagccttacggtagaaataagccactgatcagtcgtaccatgatgaaaaatatcctgggccatgcagtctaccagctcgctctcatattcacactcctgttcgttggcgaaaaaatgttccagatcgactctggtcggaatgccccccttcactcacctccgtcggaacattacacaataatcttcaacacatttgtcatgatgcaactgtttaacgaaattaatgctcgaaaaatacatggggaacggaatgtgttcgatgggatattccgcaatcctatcttctgtactatagtgttgggtactttcgctattcagatcgtcatagtccagtttgggggtaaacccttttcttgcagtcctttacagctagatcagtggatgtggtgcatcttcatcggcctcggggaacttgtgtgggggcaagtcatcgcaactatccctacgagccggttgaaatttttgaaggaggccggacgcctcactcagaaagaggagataccagaggaagaacttaatgaggatgtggaggaaatcgatcatgcggagagggagctccgcagaggacaaattctctggttccgcggcctcaatcgtattcagacgcagatacgagtggtgaaagcctttagatccagtttgtacgaaggcctagagaagccagagtcccggaccagcattcacaacttcatggcacaccccgaatttcgcatcgaggactcgcagccacacatcccactgatcgacgacacggatctggaggaggacgctgccctgaagcaaaactctagccccccgtcttccttgaacaaaaacaactctgctatagacagcggtatcaatctgaccactgacaccagcaaaagcgctacatcttcctcacccggatctcctatccacagtcttgagacttcactgtag

SEQ ID NO: 179771 - DNA, 3732 bp, synthetic construct
  misc_feature 1..3732: note = Description of Artificial Sequence: Synthetic coding sequence
  source 1..3732: mol_type = other DNA
atgggcgacatgaccaacagcgacttctacagcaagaaccagcggaatgagtccagccacgggggcgagtttggatgcacaatggaggagttgcggagtcttatggagctgcggggtaccgaggccgtcgtgaaaatcaaggaaacctatggcgatacggaggctatatgccggagactgaaaaccagccccgtggaagggctccccggcaccgcacctgacttggaaaagcgaaaacagatcttcgggcagaattttattccacccaaaaaaccaaagactttcctgcagctcgtgtgggaggccctgcaagatgtgacactgatcattttggagattgctgctatcatctcactggggctgtctttttatcacccccctggcgagggaaatgaggggtgcgcaaccgcccaagggggagctgaggatgaaggtgaagcagaggctggatggatcgagggcgctgctatacttctcagtgtgatttgcgtggtgctcgtgacagcatttaacgactggagcaaagagaaacagtttaggggcctgcagagccggatagaacaggagcagaaattcactgttgtgagagctggacaagtggtacagatccctgtggcagagatagttgttggcgacatcgctcaagtgaagtatggggatctgttgccagcagatggcctgttcatccagggtaatgatcttaaaatcgacgaaagctcattgactggcgaatccgatcaggtcagaaagagcgtcgataaggatccgatgctactgtcaggaacacacgtcatggagggatccggccggatgttagtcaccgccgtaggagtgaacagccagaccggcatcatctttactctcctgggtgcgggcggggaggaggaggagaaaaaagacaaaaaaggggtcaagaaaggcgatggcctgcagctgcctgcagcggacggagccgcggcatctaatgcggctgacagcgctaacgcctctctcgtgaacggcaaaatgcaagacggcaatgtggacgcctctcagagcaaagcgaagcagcaagatggagcggccgccatggaaatgcaacctttgaagtctgcagaaggtggtgacgcggatgaccgcaaaaaggcgtcaatgcataagaaagagaaatcagtgctccagggcaagctcaccaaactggccgtccagatcggaaaagccggcttggtaatgtcggccattaccgttatcatcctggtcctgtattttacagtggacacatttgttgtgaacaagaagccgtggctgcccgagtgcacgcctgtttacgttcagtactttgtgaagttttttatcattggtgtaaccgtcctggtagtggccgttccagaaggacttccgctggccgtcacaatcagcctggcctactcagtgaagaagatgatgaaggacaacaatcttgtgcgccacctggatgcttgtgaaaccatgggaaacgccaccgccatctgctcagacaagactgggacgctcaccaccaaccggatgaccgtcgtccaggcatatgtgggggatgttcattacaaagaaattccggacccaagcagcattaataccaaaacaatggaacttcttattaatgcaatagcaatcaattcggcttacacaacaaagattttgccacctgaaaaagagggcgccctgccacgacaggttgggaataaaacggagtgtggcctgctggggtttgtactcgacctcaagcaggattatgagcccgtcagaagccagatgcctgaagaaaagctctataaagtgtacacctttaatagtgtccggaaatcgatgtcaacagtgataaagctgcctgacgagtcctttcgcatgtatagcaagggcgcctctgaaatcgtcctcaaaaagtgttgtaaaatcctgaatggcgcgggcgagccacgggtgttcagaccaagggacagggatgagatggtgaaaaaggtgattgaacccatggcttgtgatggcctgcggaccatatgcgttgcttacagggatttcccatcttcaccagaacctgattgggataacgagaatgacatcctcaatgaattgacctgcatttgtgttgttggaattgaagatcccgtaagacccgaagtgcccgaggccattaggaagtgtcagcgagctggtatcacggttaggatggtgaccggcgacaatatcaatacggcccgcgctatagccataaagtgcggcataattcaccctggcgaggattttctctgtctggaaggaaaagaatttaaccgtaggatcaggaacgaaaagggggaaatcgaacaagagcgtatcgacaaaatctggccaaaactgcgggtcctagcgcgcagttcgcccaccgataaacacaccttagtgaagggcatcattgatagcacccataccgagcagagacaggtcgtcgccgttacgggagatggtacaaatgacgggcctgcgttaaagaaggccgatgtaggttttgcaatggggattgcgggcaccgatgtcgccaaagaggcttccgatatcattctcacagacgacaactttagttcaatagttaaggcagtgatgtggggaaggaatgtttacgacagtatctctaaattcctgcagttccagttgacagttaatgtggtagccgtgatagtggctttcacaggtgcctgtatcacccaggattccccactcaaggcagtgcaaatgctctgggtgaatttgattatggataccttcgcctctctggccctggcaaccgagccacctaccgaaacactgctgttgcgcaagccctacggccgtaataagcccctgatctcacggaccatgatgaaaaacattctgggacacgcagtgtatcagcttgctttgatcttcacgctgttgttcgttggcgaaaaaatgtttcagatcgactctggccggaacgcccccctgcacagcccgccttccgaacactatactataatttttaataccttcgtgatgatgcagctgtttaatgaaatcaacgccaggaaaattcatggcgagcgtaatgttttcgatgggatttttagaaatcccatcttctgcactatagtcctggggacgttcgccattcagatcgtaatcgtgcaattcgggggtaaaccattttcttgttctccattgcagctggaccagtggatgtggtgtatctttatcgggcttggagagttagtgtggggccaagtaattgctaccatccctacttctagactaaagtttctcaaggaagccggcagattaacccagaaggaggagattcccgaggaggagctcaatgaggatgtggaagagatagatcacgcagaacgcgagctacgccgggggcagattctgtggtttcgcggactgaatagaatccaaacccaaatacgggtggtcaaggctttccggtcaagcctatatgaaggactggagaagccggaatcccggacctctatccataactttatggcacatccagagtttagaatagaagatagtcagccacatattccgctcatcgatgacactgacctggaggaggacgccgctttgaagcaaaattctagtccgccaagttccctgaacaagaataacagcgcaatcgactcagggataaatttgacaactgacacttctaagtctgcaacatcgtcctctccaggatccccaatccactctttagaaaccagcttatag

SEQ ID NO: 179772 - DNA, 3732 bp, synthetic construct
  misc_feature 1..3732: note = Description of Artificial Sequence: Synthetic coding sequence
  source 1..3732: mol_type = other DNA
atgggcgacatgaccaacagcgacttctacagcaagaaccagcggaatgagagttcccacggcggcgaatttggctgcactatggaggaactgcggtctctgatggagctgcgagggaccgaggccgtggtgaagattaaagagacttacggcgacactgaagccatatgtaggcgtctgaagacctctccggtggaagggctccccgggaccgcacccgatctggagaagcggaaacagatttttggccagaactttattcctccaaaaaagccaaaaacattcctccagctggtgtgggaagcgctccaggacgtgacactgatcatcctcgagatcgctgccataatctctctggggctgtccttttaccaccccccaggagagggaaacgagggatgcgccaccgcgcaagggggagctgaggacgagggagaggcagaagcggggtggatcgagggagccgcaatcttactatcggtgatctgtgttgtcctggtaacagcatttaacgattggagcaaagagaaacaattccgtggattgcagagccgcatcgaacaagagcagaagttcacagttgtccgggcaggccaggtagttcagattccggttgccgagatagtggtgggagacattgcacaggttaagtacggagacctactgcccgccgacgggctctttattcagggaaatgatctgaaaattgacgagtcctcgctcactggagaaagtgaccaggtcagaaagagcgtcgacaaggacccaatgttactcagcggcacacatgtgatggagggctccggtagaatgctggttacagcagtgggggtgaacagccaaaccggtattatttttactttgctaggggccggaggcgaagaggaggagaagaaggacaaaaagggcgtgaaaaagggtgatggcctgcaattacctgcggccgacggagcagcagctagcaacgcagcagactctgccaacgcttcccttgtgaatggcaagatgcaggacggaaacgttgatgcctcccagagtaaagccaagcagcaggacggcgccgccgccatggaaatgcagccactaaagagtgccgagggcggcgatgctgacgatcggaagaaggccagtatgcacaagaaagaaaagagcgtcttacaaggtaagctcacgaagctagccgtgcagattggcaaagcagggcttgtgatgagtgcgattaccgtgatcatccttgtgttgtattttaccgtcgatacatttgtagtaaataaaaagccttggctgcccgagtgcacccctgtttacgtgcaatattttgtaaagtttttcatcattggagtgaccgtcttggtcgttgccgtgcctgagggtttgccgttggctgttacgatcagccttgcatatagtgtcaagaaaatgatgaaagataacaacctcgtgcggcatctggacgcatgcgagactatgggaaacgctacggcgatctgttcagacaagacagggaccttgactaccaatagaatgacagtcgtacaggcctatgtgggagacgtgcattataaagaaatacccgacccttcctccatcaacaccaagacgatggagttattgattaacgctatagccatcaacagtgcctacaccaccaagatattgcctccggaaaaggaaggcgccctaccccggcaagtgggcaataagacagagtgcggacttctcgggttcgtcctggatcttaagcaggactacgaaccagtgagatctcagatgcccgaggagaaactctataaagtgtacacttttaacagcgtgagaaagagcatgtcaaccgtgatcaaattacccgatgaatcattcagaatgtatagcaagggggcttcagagatcgtcctcaaaaagtgttgtaagatattaaatggagctggagagccgcgggttttccggccacgggacagggacgagatggtgaagaaagtaattgagcctatggcatgtgacggcctgcggaccatttgcgttgcatatcgagacttccccagcagccccgagcctgattgggacaatgaaaacgacatactgaatgagctcacatgtatctgtgtggtggggatagaggaccccgtgaggcccgaagttccagaagccattagaaaatgtcagagagccggtataaccgtgagaatggtgactggagacaacatcaacacagcgcgggcaatcgccataaagtgtggcatcattcatccaggggaagattttctttgcctggaaggaaaggagttcaacaggaggatacgcaacgagaagggggaaatcgaacaggagcgaatcgataaaatctggccaaaactcagagtgctggctaggtcatcccctacagataaacatacactcgtcaagggcataattgatagtacccatacagagcagagacaagtggtggccgtaaccggagatggcacaaatgacgggccggccctcaagaaagcggatgtggggtttgctatgggaatcgcaggaacagatgtcgctaaggaggcctccgatattattctgactgacgacaatttctcatccatcgttaaggccgtgatgtggggacggaatgtctatgattctatctctaaatttttgcagttccagctaacagtaaatgtggtggcagtaattgtggccttcacaggggcatgcatcacacaggactctccactgaaagctgtacagatgttatgggttaatctcatcatggacacttttgcaagcttagccttagctactgaaccacccacagagaccttgctcctgcgcaagccatacggtcgaaacaagcccctgatttcccgcactatgatgaaaaatattcttggtcatgctgtgtaccagttggcgttgatattcaccctattgtttgtgggcgaaaaaatgtttcagatcgatagtgggagaaatgcgccactgcactcgccgcccagcgaacattatactatcattttcaacaccttcgtaatgatgcagctgttcaatgagattaacgcaagaaagattcatggtgagcggaatgtcttcgatggcatctttaggaatccaatcttttgtacaattgtccttgggacatttgctattcagattgttattgtacagtttggcggtaaacccttctcctgttccccactccagcttgatcagtggatgtggtgtatcttcattgggttgggtgaactggtgtgggggcaggttatcgcaactattcccactagtaggcttaagtttctgaaggaagcaggtcgactgacccagaaagaagaaattccagaagaggaactgaacgaagacgtggaggaaatcgaccatgcagaacgggagttgcggcgtggtcaaattctgtggttccggggcctgaacagaattcagacacagatcagggtagtgaaggcattccggtcttcattatatgagggccttgaaaaaccagagtctagaacttctattcacaacttcatggctcatcctgagttcaggattgaagattcccaaccacatatacctctgatcgacgatacggacctggaggaagatgccgccctgaaacagaacagctctccgccatcatccttgaacaaaaataattctgctattgattcggggataaatctgactacagatacatcgaaatccgctacctccagctctcccggtagtcctattcactcgctggagacatctttatag

SEQ ID NO: 179773 - DNA, 3597 bp, synthetic construct
  misc_feature 1..3597: note = Description of Artificial Sequence: Synthetic coding sequence
  source 1..3597: mol_type = other DNA
atgggcgacatgaccaacagcgacttctacagcaagaaccagcggaatgaatctagtcacggcggcgagttcggttgtacgatggaggagcttcggtcacttatggaacttcgcggcaccgaagccgttgtcaagatcaaagagacctacggggacacagaggccatctgtcggcgattgaagaccagccccgtcgagggactgcctggcactgcccctgacctcgaaaagcggaagcagatctttggtcagaacttcatccctccaaaaaaacccaagacatttcttcagttggtctgggaggcactccaggacgtcaccctgataatcctggagattgctgcgattatctctctgggtctaagtttctatcacccacctggggaaggcaacgagggttgtgccaccgctcagggcggcgctgaggacgagggtgaggcggaggccggctggatcgaaggcgccgcaatactgctgagcgtgatttgtgtcgtactagttacagccttcaatgactggtcgaaggagaaacagtttcgggggctacagagtcgcatcgagcaggaacagaagttcacagtcgtgagagccggacaagtagtacagatccctgtcgctgaaatcgtggtgggagatatagcccaagtgaaatatggagatttgttgcctgccgacgggctgttcatccagggcaatgatctgaagatcgatgaatccagcttgacgggagagtcagaccaagtcagaaaatcagttgacaaagatccaatgctcctgtccggcactcacgtgatggaggggtcaggacggatgctcgtcaccgcggtgggtgtgaactcacagactgggattatttttacccttctgggtgcaggaggagaggaagaagaaaagaaggataagaaagcaaagcagcaagacggcgccgcagctatggagatgcagccactaaaatccgccgagggcggagatgccgatgataggaaaaaggccagcatgcataagaaggaaaaatccgtgctacaagggaagctcaccaaactcgctgtccagatcggcaaggctgggctggtcatgtcagccatcacggtcattatattagtgctgtattttacagtggataccttcgtggtaaataaaaagccttggctccccgaatgtactccggtctacgttcagtacttcgtaaagtttttcattatcggagtcacagtgctcgtggtggcggttcctgagggacttccactggcggtgaccatatccctagcatattctgtgaaaaaaatgatgaaggataacaacctcgtgcgccatctcgatgcttgcgagacgatgggcaacgcaacagccatctgctctgacaaaactggaacacttacaacaaatcggatgaccgtcgttcaggcctacgtaggcgatgtccactataaagagattcccgatccttcctctatcaacaccaagaccatggaactcctgattaatgccatagccatcaacagtgcgtacacgacgaaaatcttgccccccgaaaaggagggcgccctgccccgacaggtcgggaacaaaactgaatgtgggctgctaggatttgtcttagacttgaaacaggactacgagcccgttcggagccaaatgcccgaagagaagctgtacaaggtgtataccttcaactcagtacggaaaagcatgtctacggtgatcaagctgcccgatgaatcttttagaatgtactccaaaggcgcatctgagatagtgctgaagaagtgctgtaaaattctcaacggggctggcgagccacgtgtgtttaggccaagggaccgtgatgagatggtgaagaaagtcattgaaccaatggcctgcgacggactgcgcacgatctgcgtagcttaccgtgactttcccagctcccccgagccagattgggacaatgagaatgatattttgaacgagctaacctgtatatgcgtcgtcgggatagaagatccagttcgaccagaggttccggaagccatcagaaaatgccagagggccggcattaccgttcggatggtgaccggggacaacattaatacagcccgagccatcgctattaaatgcggaatcatccaccctggcgaggatttcttgtgcctcgagggaaaagagtttaatagacgcattcgtaacgagaaaggagagatagagcaggaacgtatcgacaagatctggccaaagttacgcgtcctggctcgtagtagccccactgacaaacatacactggtgaaaggaatcatcgatagcacacatacggagcagagacaggtggtggccgtgaccggtgacggtacgaatgatgggcctgcgctcaagaaggctgacgtgggctttgccatgggcattgcaggcaccgatgtagcaaaagaagcatccgacatcattctgacagatgataatttctcatcgattgtaaaggccgtaatgtggggccgaaacgtgtatgactctatttccaagttcctgcagtttcagctgaccgttaatgtcgtggcagtgattgttgctttcaccggggcgtgcatcacccaggatagccccttgaaagcggtgcagatgttatgggtgaatctcatcatggacacgttcgccagcctggccctagcaacggagccacccaccgagacactactgttaagaaagccttatggcagaaacaagcccttgatctccagaacaatgatgaagaatattcttggtcacgcagtttaccaattggctctgatcttcactctactctttgtcggagaaaagatgtttcagattgacagcggtagaaacgctcctctgcattcacccccttctgagcattatactattattttcaacacttttgtgatgatgcagctctttaacgagatcaacgctagaaagattcacggtgagcggaatgtatttgacgggatttttagaaacccaattttctgtactattgttttgggcacatttgcaattcagatcgtgattgtgcaatttggaggtaaacctttttcctgctcacctctccagcttgatcagtggatgtggtgtattttcatcggattgggggaactggtgtggggacaggtgatcgccacgattccaacctcacggctgaagttcctgaaggaggccgggagattaactcagaaggaagagattccagaggaggaactgaacgaagacgtggaggagattgatcatgccgagagagagctccgtcggggccaaatcctgtggttccgaggcctgaaccgtatccagacgcagatccgcgtggtgaaagcgtttaggtctagtctgtatgagggactggagaagcccgaatccagaaccagcatccacaacttcatggctcaccctgagttcaggatcgaagactcacagccccatattccgctgattgatgatactgatctcgaagaggatgccgctctcaagcagaattctagcccccctagttccctgaataaaaacaacagcgccatcgatagtgggatcaatctgacaacagacacgagtaaaagtgcgacatcgtcatcacccggcagccccattcattccttagagacatccctgtag

SEQ ID NO: 179774 - DNA, 3597 bp, synthetic construct
  misc_feature 1..3597: note = Description of Artificial Sequence: Synthetic coding sequence
  source 1..3597: mol_type = other DNA
atgggcgacatgaccaacagcgacttctacagcaagaaccagcggaatgagtcgtcacatggtggggagttcggatgcaccatggaagagctgcggagcctaatggagctgaggggaacagaagccgtcgttaagataaaagagacctacggcgatacagaagccatatgtagaaggcttaaaacttctcccgtggagggcctgcccggaacagcccctgacttagagaagcgcaagcagatattcggtcaaaacttcatcccaccaaagaagcccaagacttttttgcagttagtgtgggaagccctccaggatgtgacattgattattctggagattgcagcgataatttccctgggcctgtctttttaccacccccctggagaaggcaatgaggggtgcgcaactgcccaaggaggggcggaagatgaaggggaagcggaggctgggtggatagagggcgccgccattctgctgagcgtgatctgtgtggtcctggtcacagctttcaatgactggtctaaggaaaagcagtttcggggcttacagtcccgtatcgaacaggagcagaaatttactgtggtgagagctgggcaggtggtgcaaatccccgtggccgaaattgtggtgggcgacatagcacaggtgaagtacggagacctgctgcccgctgacgggctttttatccagggcaatgacctgaagatagatgaatcctccctcacaggcgagagtgaccaggtccgcaaaagcgtggacaaggatccaatgcttctctctggtacacatgtgatggaaggctccggacggatgttagtgaccgcagtaggggtgaatagtcagactggcatcatcttcactctgctgggtgcaggcggcgaggaagaggaaaagaaggacaaaaaggccaaacaacaggatggggctgccgctatggaaatgcagcctctcaagtcggctgagggaggagacgcggatgaccggaaaaaagctagtatgcataagaaagagaaaagtgtgttgcaaggaaagctaaccaagctggccgtgcagatcggcaaagccggacttgtaatgtctgctattactgtgatcatcctcgtcctttactttacagttgacacttttgtcgttaacaagaagccatggctcccggaatgcaccccagtttacgttcagtacttcgtaaagttttttattattggcgtcacagtcctggtggtagcagtgcccgaggggctgccactggctgtgactatatccctcgcctacagcgttaaaaagatgatgaaggacaacaatctggtacgacacctggacgcatgtgaaaccatgggaaatgcaactgccatctgcagcgataagaccggcaccctcaccactaacagaatgaccgtagttcaggcatacgtcggggacgttcattacaaggagatccccgacccctcatcaataaacacaaaaactatggaattgctgattaacgcaatcgcaattaattccgcctacaccactaaaatactgccaccagagaaagagggtgccctgccacggcaggtgggtaataaaaccgagtgcggcctactggggtttgtcttagacctgaaacaggactacgaaccagttaggtcccaaatgcccgaggagaaactctacaaagtatatacttttaatagcgtgcgtaaaagcatgagcacagtgattaagttacctgacgaatcttttagaatgtattctaagggagctagtgagatagtgctgaaaaagtgctgcaaaatccttaacggggcaggggagccacgagtcttccgccctagggaccgcgatgaaatggtcaagaaggtcatagagcccatggcgtgtgacggactccgtacaatctgtgtcgcctatcgagacttccccagctcaccagagccggattgggataacgaaaatgacatcttgaacgagctgacctgtatctgtgtagtgggcatcgaagatccggtgcggccggaggtgcctgaagccataaggaagtgtcaacgggcaggaattaccgtccgcatggtgacaggggacaacatcaacactgctagggcgatcgcaatcaagtgtggcattattcatcccggtgaggattttttgtgtctggagggtaaagaatttaaccgaaggatccggaacgagaagggagagatcgagcaggaacgaatagacaagatttggccaaagctccgggtgttagctaggtcatccccaactgataagcacacactagtcaaggggatcatcgatagcactcataccgaacagcgccaagtagtcgccgtcactggggatggaaccaatgacggacccgcactgaaaaaagccgatgtgggcttcgctatgggcattgccggaaccgatgtggctaaagaggccagtgacataatcttaacggatgacaacttttcctccatcgtgaaggctgtgatgtggggaaggaatgtgtatgattcaatcagtaagtttctacagttccaactgacggtcaatgtagtggcagttatagttgcgtttactggagcttgtattactcaagactccccattaaaagctgtccaaatgctctgggtgaatttaatcatggatacttttgctagcctcgctctcgccacagagccccccacggaaaccctcttgttgcgcaaaccgtacgggaggaacaaacccctgataagcaggactatgatgaagaatatcctgggccacgcagtgtatcagctggctcttatatttactctgctgttcgtcggggagaaaatgttccagattgatagtggtagaaacgcccctcttcactcacctcccagcgaacattatacaattatcttcaacactttcgtcatgatgcagctcttcaacgaaatcaacgcgcggaagatccacggagagcgaaacgtgttcgacggaattttccgcaacccaatattctgcacaattgtgctggggactttcgccatccaaattgtcatcgtccagttcggtggaaagcccttttcctgcagtccgctgcagctggatcagtggatgtggtgtatttttatcggcttgggggagttggtctgggggcaggttattgccaccataccgacgtcacgcctaaaatttctcaaggaggcagggcgattaacacagaaggaggagatacccgaggaagaactgaatgaagacgtcgaagagatcgaccacgcagaaagggagttgcgaagaggacaaatcctgtggttccgaggcctgaatcgtattcagacacagattcgtgttgttaaggcatttcggtcctccctttatgaggggttagaaaaacctgagtctcgaacttccattcacaattttatggcacaccctgagttccgcatcgaggattcccaacctcacatccctctgatagacgacaccgatctggaggaggacgccgctttaaaacagaactcgtcacccccctcatctctgaataaaaacaactcggcgatcgattccggtatcaacttgacgaccgacacttccaaatcagcgacctctagtagtccagggtcccctatccacagcctggagactagtctgtag

SEQ ID NO: 179775 - DNA, 1299 bp, synthetic construct
  misc_feature 1..1299: note = Description of Artificial Sequence: Synthetic coding sequence
  source 1..1299: mol_type = other DNA
atgaccgtggtgcaggcctacgtgggcgacgtgcactacaaggagatacctgatccctcatcaatcaacaccaagaccatggagctcctgatcaacgccatcgcgattaactcagcctacacaacaaaaatcttaccaccggaaaaggagggggccctcccaagacaagtaggtaacgtctacgatagcatttcaaaattcttgcagttccagttaaccgtcaacgtcgtcgccgtcattgtggccttcacaggcgcttgtattacccaggacagcccgctcaaagccgtccagatgctatgggttaacttaatcatggacacatttgcttcactcgccctcgccaccgaaccccctactgaaaccctgttactgagaaagccgtacggcagaaacaaacctctcatctctaggacaatgatgaagaacatcctgggccatgctgtctatcagcttgcgctaattttcacgctcttgtttgttggcgaaaagatgtttcagattgactctggacgcaatgcacctctccactcccccccgtcagaacattacactatcatctttaatacatttgtgatgatgcagttgtttaacgaaattaacgctcgcaagattcacggtgagcgaaatgtgttcgacggcatctttcgaaatccaatcttttgcactattgtactgggcacttttgccatccagatcgtgatcgttcagttcgggggcaagccttttagctgcagtcccctgcagctggaccaatggatgtggtgcatattcatcggtcttggtgaactggtttggggacaggttatcgccacaatccctacctcacggctgaaatttctgaaggaagcggggcggctcacccaaaaggaagagatccctgaggaggagctgaacgaagacgttgaggagatagatcacgccgagcgagagctacgcagagggcaaatcttatggtttcggggactgaatcggatacagacgcaaatccgtgtagtcaaagcctttcgttcgtcactgtacgaaggtctggagaaacctgagtccagaaccagcattcacaatttcatggcccatcccgagttcagaatcgaagattctcagccgcacattcccttgattgatgatacggacctcgaagaggacgcagccttgaagcaaaacagttcacctcctagctctctgaacaaaaacaactcagctatcgatagcggaattaatctcactaccgacacatccaagtcagccacctctagctctccgggctcacctatccacagtctcgagacaagcctctag

SEQ ID NO: 179776 - DNA, 3537 bp, synthetic construct
  misc_feature 1..3537: note = Description of Artificial Sequence: Synthetic coding sequence
  source 1..3537: mol_type = other DNA
atggagctgcggggcaccgaggccgtggtgaagatcaaggagacctacggcgacactgaggccatctgtagacggttaaagacctctcccgtggaagggctcccaggaactgcacctgatctggaaaaacgcaaacagatctttgggcagaatttcattcctcctaaaaaaccaaagactttcctccaactcgtctgggaggctctccaggatgttaccctgatcattctcgagattgctgctataatctcactgggcttgagcttttatcatcccccaggagagggaaacgaagggtgcgccactgcgcaggggggagctgaggacgagggggaggcagaagccggatggattgagggagccgcaatcctgctttcagttatatgtgtggtgttggtgaccgctttcaatgactggagtaaggaaaagcagttcagaggtctccaatcgaggatagagcaagagcagaaatttaccgtcgtacgcgccggtcaggtcgtgcagataccagtggctgagattgtggttggagacatcgctcaagttaagtacggggacctgcttcccgctgatggccttttcatccagggcaatgatctgaaaatcgatgaatcatccctcactggagaatccgatcaggtcagaaaatctgtggataaggaccctatgctcttaagcggaacccatgttatggaaggtagcgggcggatgctggtgacagctgtgggagttaatagccaaaccggtataatttttactctcttgggagccggtggcgaggaagaggaaaagaaagataagaagggcaaaatgcaagacggaaacgtggacgcctctcagtcgaaggctaagcagcaggacggcgcagccgccatggaaatgcagcccctgaagtccgcggaaggcggggatgcagatgatagaaaaaaggcaagcatgcataagaaagagaaatcggttctacagggaaaactgacgaagttggcagtgcaaattggcaaggctggtctcgtgatgagcgcaattacggtcataatcttagtgctgtatttcaccgtcgacacatttgtggtgaataagaagccttggctgccagaatgcacacccgtctatgttcaatactttgttaaattcttcatcattggcgtgaccgttttggttgtcgctgttccagaaggtctgccgttagcagtgactataagccttgcatacagcgttaagaaaatgatgaaggataataacttagtgcgacatctggacgcctgcgagacaatgggaaatgctacagccatttgtagtgacaagacaggtaccctcaccaccaataggatgactgtcgttcaggcctacgtaggcgatgtccattacaaggaaatccccgacccttcatcaatcaatactaaaaccatggagctcttgattaatgccatcgcaataaattcggcttacaccacaaaaatcctccctcccgaaaaggagggcgcacttccccgccaagtgggcaataagaccgagtgtgggcttctcggctttgtcctggatctgaaacaggattacgaacccgtgagatctcagatgcctgaagagaaactgtataaagtgtacacctttaacagcgtccggaaatcaatgtctacagtgataaagctcccagatgagagtttccgaatgtacagcaaaggcgccagcgagatagtgttgaagaaatgctgtaagatactgaatggagctggagagccaagagtgttcaggccccgggacagggatgagatggtgaaaaaggtgatcgaaccaatggcatgtgatgggctgcgcacaatatgcgtggcttatcgtgactttccgtcctcgccggaacccgattgggacaacgaaaatgatattctgaacgaactgacctgcatttgcgttgtggggatcgaggaccccgtccgccctgaagtgcccgaagcaataagaaaatgccagagagcaggaataacggtgcgcatggtgacaggagacaacattaacacagccagagcgatcgccatcaagtgcggcattattcacccaggcgaggacttcttgtgtctcgagggcaaagagttcaataggcgaataaggaacgagaagggagaaattgaacaagagcgaattgataagatttggcctaaactcagggtcttagcccgatcatctcccacagacaagcacaccttagtgaagggcattatcgattccactcacacagaacaacgacaggtggtggccgtgacaggtgacggtaccaatgacgggccagctctcaagaaagccgatgtcgggtttgccatgggaatcgctggtaccgatgtggcgaaggaagcctctgacataatcctgacagacgataatttttcctcgatcgttaaagccgtcatgtgggggcgcaatgtgtatgacagcatatccaagtttctgcagtttcagcttaccgtcaacgtagtggccgtgatcgtcgcctttaccggcgcctgtatcacccaagacagccccctgaaggccgtgcagatgctttgggttaacttgatcatggacacctttgcctctttggcactagctacagagccaccaaccgagaccctgctcctgagaaaaccgtatgggcggaacaagccactgatatccagaactatgatgaaaaacatcctcggacatgctgtgtaccaattagccttaatcttcactctgctttttgtgggcgagaagatgttccagattgactctggaagaaacgccccattgcactcccccccctcagagcactatacaattatctttaatacattcgtaatgatgcagctttttaatgaaatcaacgctcgaaagattcatggcgagagaaacgtttttgatgggattttccgtaatcccatcttctgtacgatagtcctggggacttttgcaatccaaattgtgattgtgcagttcgggggaaaacccttcagttgttcgccgctgcagctggatcagtggatgtggtgtatttttatcggactcggcgaattggtgtgggggcaagtgattgccactattcccacaagcagactgaagttcctaaaagaggccggcaggctgacacagaaggaagagatcccagaggaagaacttaacgaggatgttgaagaaattgatcatgctgagcgagaactgcgtaggggacagatcctttggtttcggggcttgaaccggatccagactcagatccgagtggttaaggcctttcggagttccttatatgaaggcttagaaaagcccgagtctcgcacaagtatccataatttcatggcccatcctgaattccggatagaggattctcaaccacacattccgctgatcgatgataccgacctggaagaggacgccgctctgaaacagaactcctcccctcccagttcgttgaataagaacaatagcgctatcgacagtggcataaatctgaccaccgatacaagtaagtctgccacaagcagctcccccgggagcccgatccatagcttggagacttcactgtag

SEQ ID NO: 179777 - DNA, 3663 bp, synthetic construct
  misc_feature 1..3663: note = Description of Artificial Sequence: Synthetic coding sequence
  source 1..3663: mol_type = other DNA
atgggcgacatggccaacagcagcatcgagttccaccccaagccccagcagcagcgcgacgtgcctcaggcgggaggttttggctgtactctggcagaattacgaaccctcatggagctcaggggtgccgaagccctgcagaagatcgaagaggcctacggcgatgtcagcggattatgccgacgcctgaagacatcgcctaccgaggggctggctgataacacgaacgatttagagaagcgccgacaaatatacggacagaacttcatccccccaaagcagcccaaaacctttctgcaactcgtgtgggaggccttgcaagatgtcacccttatcatattggaggttgccgctatcgtatctttaggtctgagtttttacgcaccccccggagaggaatcggaggcatgtgggaatgtatctggcggcgccgaagatgaaggagaagccgaagcgggctggatagagggggccgccatcctgctgtcagtcatctgcgtcgtgctggtcaccgcctttaatgattggtcgaaagagaaacaattcaggggccttcagtccaggattgaacaggagcaaaaatttactgtgattcgaaacggccaactgctccaagtcccagtagccgcacttgtcgtgggtgacattgcacaggtcaagtatggggacctgcttcccgccgatggggtgttaatccaggcaaatgacttgaaaatcgacgaatcatccttgacaggcgaaagcgaccatgtgaggaagtcagctgataaggatcccatgctactgtccggaacacacgtgatggaaggcagcgggaggatggttgttacagcagttggcgtgaattcacaaaccggtatcattttcacactccttggggctgggggagaggaggaggagaaaaaggataaaaagggaaaacagcaggatggagcaatggaatcttctcagacaaaggcgaaaaaacaggatggggcggtcgccatggagatgcaacctctgaaaagcgcagaaggaggcgaaatggaggagagggaaaagaagaaggcgaacgctccaaaaaaggagaaaagcgttctccagggaaaactgacaaaactggcagttcagatagggaaggccggcctagtcatgtctgccattacagttatcatcttggtgctgtacttcgtgatcgagacattcgtggtcgagggacgtacttggctcgccgaatgtactccagtgtacgtgcagtactttgtcaagttcttcatcataggagtgactgtgctggttgtggccgtgcccgagggcttgccgctcgccgtcactatttctctcgcatattcagttaaaaagatgatgaaagacaacaacttagtgcgccacctcgatgcttgtgaaaccatgggtaatgcaaccgctatctgtagtgataaaactggcacacttaccacgaataggatgactgtcgttcagagttatctcggtgatacgcattataaagaaattcccgccccctctgcactaacccctaaaatactagatctcttagttcacgctatcagcataaatagcgcgtataccacaaaaatcttgccgcctgaaaaggagggagcacttccaagacaggtaggaaacaaaacagaatgcgcgctccttggctttgtgctcgacttaaagcgtgacttccagccggtgagggaacagataccagaagacaagctctataaagtgtatacttttaatagtgttagaaaatccatgtccaccgttattaggatgcctgacggcggcttcaggctgtttagtaagggagcttcggagatactcctaaaaaagtgcaccaacatcctgaattccaacggtgagttgagaggttttaggcctcgggacagggacgatatggttcgaaaaatcattgaaccgatggcttgcgacggactccggacgatctgcatcgcctatagggacttctctgccggccaggagcccgactgggataatgaaaacgaggttgtgggcgacctgacatgtatagcggtggtgggaatcgaggatcctgttaggccagaagtgccagaggccatcaggaagtgccagagggccggaatcactgtgcgcatggtcaccggagacaatatcaatacagcccgcgcaatcgcggcgaagtgtggaatcattcagcccggcgaggatttcttgtgtctggaaggaaaagagttcaacagaagaattcgtaatgagaagggtgaaatcgagcaggagaggttagacaaggtttggccgaaactccgtgtccttgcacggtcctcacctaccgacaaacacaccctggtcaagggtatcatagattctaccacaggggaacagagacaggttgttgccgtaaccggcgacgggacgaatgacggccctgctttgaaaaaagcagatgtcggattcgcaatggggattgctggtactgacgtggccaaggaagcttccgacatcattctgacggacgacaactttacgtcgatcgtgaaagctgtgatgtggggcagaaatgtttatgattcaatttcgaaattcttgcagttccagctgactgtcaacgtagtggcagttattgtcgcgttcactggtgcatgcatcacccaggacagccctctgaaggcagttcagatgttgtgggtcaaccttatcatggacacctttgcatcattagctcttgccaccgaacccccgaccgagagcctgctcttgcgcaagccctacggccgcgacaagcctctcatcagccgcacgatgatgaaaaatatactggggcatgctgtgtaccagctcgcaataatatttacgctacttttcgtgggcgagctgttcttcgacattgacagcggtcgcaatgcacctctgcactcccccccatccgagcattacaccattattttcaatacattcgttatgatgcagctctttaacgagatcaacgcaaggaaaatccacggcgagcgaaacgtgttcgatggtattttttccaaccccattttttgtaccattgttttgggtaccttcggcattcagatcgtcatcgtgcagttcggcggaaagccgttttcgtgcagccctctatccacggaacagtggctgtggtgcctgtttgtgggggtaggcgaactggtttggggccaagtcattgccactatcccgacaagtcagctgaagtgtctgaaggaagctggccacgggcccgggaaggatgaaatgactgatgaggagctggctgagggtgaggaggagattgaccacgcggaaagggagctcaggcggggacagatactctggtttaggggcctcaatagaatccaaacgcagattcgggtggtgaaggcgtttcgatctagtctgtatgaggggctcgagaaacccgagtcgaagactagcatccataatttcatggccactccagagtttctgattaacgattacacacataatatccctctgatcgacgacacagacgttgatgaaaatgaggaacgcctgcgggcacctccgcccccttcgcctaatcagaataacaatgccatcgattctggcatttatctgacgacacatgtcaccaaaagcgcaactagctcagtgttttcgagctctcctgggagtcctcttcacagcgtggagacaagcttgtag

SEQ ID NO: 179778 - DNA, 3663 bp, synthetic construct
  misc_feature 1..3663: note = Description of Artificial Sequence: Synthetic coding sequence
  source 1..3663: mol_type = other DNA
atgggcgacatggccaacagcagcatcgagttccaccccaagccccagcagcagcgagatgtgcctcaagctggtggctttgggtgcacactggctgaactgagaacgctaatggagcttcgaggagccgaagctctgcagaagattgaggaggcctatggcgatgtctctgggctttgccggcgcctgaaaacaagtcccaccgagggccttgcggacaatacaaatgacttggagaaacgaagacagatctatggacaaaacttcatacctcctaaacagccaaagaccttcttgcaactggtgtgggaagctctccaagatgtaaccttaattattctggaggtcgccgcaattgtgtccctgggcctctccttctacgctcctcctggcgaagagagtgaagcctgtggcaacgtgagtggcggggctgaagatgaaggtgaggccgaggcagggtggatcgagggggccgcaattctcctgagtgtgatttgcgttgtgctcgttacagccttcaacgactggtccaaggagaagcagtttaggggactgcaatcaagaattgagcaggagcagaagtttacagttattaggaacggccagttgctgcaggtgcccgtggcagctttggtggtgggagacatcgctcaggtcaaatatggcgacctgctgccagccgacggagtgttgatccaggccaacgatcttaaaattgatgaaagttccctgaccggcgagtctgatcacgtgcgtaaatccgctgacaaggaccctatgctcttaagtggcactcacgtcatggagggctctggaagaatggtggttaccgccgttggagtgaactcccagacgggaattatcttcactcttctgggtgctggaggcgaggaggaagaaaagaaagacaaaaagggtaaacagcaggacggggccatggaatctagccagacgaaagccaaaaaacaggacggggctgtggctatggaaatgcagccgctgaagagcgccgagggaggagagatggaggaaagagaaaagaagaaggcaaacgctcccaagaaggaaaaaagcgtcctacagggaaagcttacaaagctggccgttcaaattggaaaggctgggctggtaatgtcagcaatcactgtcattattttggtcctatacttcgttatcgaaacctttgtagtggagggccgtacatggttggccgagtgtacccccgtgtacgtgcagtattttgtgaagttttttatcatcggcgtcacggtgctggtagtcgccgtgccagagggcctccctcttgccgtaaccatttctcttgcatattcggtgaagaagatgatgaaagacaataatttggtccggcacctggacgcatgcgagaccatgggaaatgccaccgctatttgctccgacaaaaccggaacgctgaccaccaataggatgacagttgtccagagttatctgggagatactcactacaaagagatcccagctcccagtgccctgactcctaagatacttgacctgttggtgcacgcgatctctataaactccgcttataccactaaaattctgcctcctgagaaggagggggccttgccacgccaggttggaaataagaccgagtgcgcactgctgggtttcgtactggatttgaaaagagatttccaacctgtcagagaacagattccggaagacaaattgtataaggtgtatacttttaattccgtccgtaagagcatgtccaccgttattcgcatgcccgacgggggctttcgattattctctaaaggcgcctctgaaatcctgctcaaaaagtgtactaacatcctcaattccaacggagagctgaggggcttccggccgcgcgaccgtgacgatatggttcgaaagatcatcgaaccaatggcttgtgacggcctccgtacgatctgcatcgcctacagagacttttctgctggccaggagccagactgggacaatgagaatgaggttgtgggggacctgacatgcattgccgtcgtcgggatagaagacccggttcgccctgaggtccctgaagccattaggaagtgccagcgggctggaattacagtcagaatggtcaccggggataatatcaacaccgctcgagctattgcggccaagtgcggcatcattcaaccaggggaggactttctgtgcctggaagggaaagaatttaaccgcaggataaggaatgagaagggcgagatcgagcaagaaaggctggacaaggtgtggccaaaactgagggtgctggctaggtcatcgccgaccgataagcacactttagtcaaaggcattatagactcaactactggagaacaacggcaggttgtggctgtgacaggtgatggcacgaacgacggacctgccctgaagaaagccgacgtgggctttgcaatgggaatagccggaacagacgttgctaaagaagcctccgacattatattaaccgacgacaatttcactagcatcgtaaaggccgtgatgtgggggagaaatgtgtatgactcaatctctaaattcctgcagttccagttaactgtgaatgttgtcgccgttatcgtcgccttcaccggcgcctgcataacccaggactcacctctaaaggctgtgcagatgctgtgggtgaacctgatcatggacactttcgcctccctggccctcgcaacggaacctccgaccgagtccctgctgctgcggaaaccttatggaagagacaagcctctgatctccaggacaatgatgaagaatatcctcggtcacgcagtgtatcagctcgctatcatcttcacactgctgttcgtgggagagctcttcttcgatattgactcagggagaaatgcccctctgcacagtcctcctagtgagcactacactattatcttcaataccttcgttatgatgcagctcttcaatgagattaatgcaaggaagattcatggcgagcgcaacgtgtttgacgggatattcagtaaccctatcttttgcacaatagtccttggaacgttcgggatccaaatcgtgattgtccagttcggaggaaagccattctcctgctctcctctctctaccgaacagtggctatggtgtctcttcgttggagtgggggagctcgtgtggggtcaggtgatcgccaccattcctaccagccagctgaagtgtctaaaagaagctgggcacggcccagggaaagacgaaatgaccgacgaggaactcgccgagggggaggaggaaatcgatcacgccgagagggaacttcggaggggccagatcctgtggtttagagggctcaaccgaattcaaacacagatcagagtggtcaaagcctttaggagttccctctatgaaggcctggaaaagcccgaaagcaaaacctccatccacaattttatggcgactccagaattcctcatcaacgattacacacacaatataccactcatagacgacactgatgtggacgaaaacgaagaacggctccgggcccctccaccccccagccccaatcagaacaataacgcaatagacagtgggatctatctgacgacacatgtaactaagtcagctacgtcttctgtgttcagttcatctcccggctctcccttacattccgtcgagacatctctgtag

SEQ ID NO: 179779 - DNA, 3522 bp, synthetic construct
  misc_feature 1..3522: note = Description of Artificial Sequence: Synthetic coding sequence
  source 1..3522: mol_type = other DNA
atgggcgacatggccaacagcagcatcgagttccaccccaagccccagcagcaaagggatgtcccgcaggctggaggctttggctgtaccctcgccgagctccgcacgctcatggaacttaggggcgctgaagctcttcagaagattgaggaggcgtatggtgacgttagtgggttatgccgccggctgaaaacctcaccgactgagggattagccgacaacacaaacgatctagagaagcggagacagatctatggacagaatttcattcctccaaaacagcctaaaacttttttgcagttggtgtgggaagctctgcaggatgtgaccctcatcattctggaggtggcagctatagtgtccctgggcttgagtttttacgcaccccccggtgaggagtccgaggcctgtggtaatgtttcagggggcgccgaggacgaaggcgaagccgaggctggctggatagagggagccgcaatcctcctaagtgtaatttgcgtggttctggtgacagctttcaatgattggtcaaaggaaaaacagttcagagggcttcagagccgaatcgaacaggaacaaaaattcacagtaatacggaacggccagctcctgcaggttcctgtggctgccttggtggtcggggacattgcccaggtaaagtacggagatttgctgccagccgatggggtattgatccaggcaaatgatctcaagatcgatgaatcctccttgaccggtgagagcgatcacgtacgcaagagtgcagacaaggatccaatgcttctgagcggcactcacgtgatggaaggtagcggcagaatggtcgtgactgcagttggcgtaaattcccagacaggcatcatcttcaccttactgggagccggtggagaagaagaggagaaaaaggataaaaagggaaagcagcaggatggcgctatggagtcatctcagactaaggctaagaaacaggatggcgcagttgcaatggagatgcagcctttaaagtctgctgaagggggcgagatggaagaaagagagaagaaaaaagctaacgctccaaagaaggaaaagtctgtgcttcaaggtaaacttacaaagctagcagttcagatcggaaaggccggcttggtgatgtcggccattacggtgattatcttagttctgtacttcgtgattgagactttcgttgtggaagggagaacatggctggcagaatgtacaccggtgtacgtgcagtacttcgtaaagttcttcatcataggcgtgaccgtgttggtggttgctgtgccagaaggcctcccgctggcagtcactatttcattggcttacagcgtcaagaagatgatgaaagataacaatctggtgcggcatcttgacgcttgcgagactatgggaaacgcgaccgccatttgctctgacaagaccgggacactgacaactaatcgcatgaccgtggtccagtcatacttgggggacacacattacaaggagatccctgccccaagtgcccttactcccaagatcctcgatctgttggtgcatgcaattagcataaactctgcatatactacaaaaatcctcccgcccgaaaaagaaggagctttgccaaggcaggttggcaataagacagaatgtgcgctgctggggttcgtgttagacctgaaaagagattttcaacctgtgagggagcagattccagaagataaactttataaagtgtacactttcaatagcgtgaggaaaagcatgtctactgtgatccgtatgcctgacggtggcttccggcttttctctaagggcgcttcagaaattctactgaaaaagtgcacaaacatcttaaactcgaatggcgagctgcgaggatttcgaccacgagatcgtgacgatatggtaaggaaaataattgaaccaatggcctgcgatgggcttaggactatctgcatcgcctacagagatttctctgctgggcaggagcctgactgggataacgagaatgaggtggtgggcgacctgacgtgtatcgcagtcgtcggcatcgaggacccggtgcgccccgaagtccctgaagcgatacgcaagtgccaaagggccggcatcaccgtaagaatggtcacaggggataatatcaataccgccagagctattgccgccaagtgtggcattatccagccaggcgaagatttcctttgccttgaagggaaagagtttaataggaggattcgcaacgagaagggggaaattgaacaggaacgcttggacaaggtgtggccaaaactgcgcgtgctggcccgttctagccctacagacaagcatacattggtgaaaggaataatcgactcaactaccggagagcagcgccaggtggtagcagttacaggggacggcactaacgatggccccgcgcttaaaaaagccgatgtcggatttgcaatgggcattgcaggcacggacgtggccaaggaggcttctgacatcatcttgacagacgataactttacttctatcgttaaagctgtgatgtggggacgaaacgtgtacgacagcatctccaagttcctccagtttcagttaacagttaatgtcgttgcagtgattgttgccttcacaggagcctgtattacccaggattcccctctcaaagccgtccagatgctctgggttaacctgatcatggacacatttgcatccttggccctcgccaccgagccaccaacggaaagcctcctcctcaggaagccgtacgggcgggataaacctctgatcagtaggaccatgatgaaaaatatcctcggacatgcagtgtatcaactcgcgattattttcaccctcctattcgttggtgaattattctttgacatcgactctggaaggaatgctccccttcacagccctccatcagagcattacacaattatcttcaacactttcgtgatgatgcaacttttcaatgaaattaatgccagaaagatccatggtgagcgtaatgtgtttgacggcattttcagcaatcccatattttgtacaattgtgctggggacgtttggaattcagattgttatcgtgcaatttggagggaaacccttcagctgcagtcccctgagcacagaacagtggctatggtgcctcttcgtcggtgtgggcgagttggtttggggccaggtgattgcgactattcccacaagccaactcaagtgcttaaaagaggcaggtcacggccctggcaaggacgagatgacggacgaggagctggctgagggcgaagaagaaatcgaccatgctgaacgagagctgaggaggggacagatcctgtggttccgaggcctcaatcggatccaaacccagatggaagtggtgtccacttttaagaggtctggcagtgttcaaggggctgtcaggagaaggtcttcagtcttgtcccagctgcatgacgtcacgaatctgagtacccccacacatgcaatcctcagcgccgccaaccccacctctgccgcgggaaaccctggcggagagagtgtgccctag

SEQ ID NO: 179780 - DNA, 3480 bp, synthetic construct
  misc_feature 1..3480: note = Description of Artificial Sequence: Synthetic coding sequence
  source 1..3480: mol_type = other DNA
atgggcgacatggccaacagcagcatcgagttccaccccaagccccaacagcaaagggatgtgccacaggcaggagggtttggatgtactctggccgagcttcggacccttatggagctgaggggcgctgaagccctacagaagattgaagaagcctatggagatgttagcggtttatgccgacgtctcaagacttcaccgacggaaggactcgctgataacaccaacgacttagaaaaaagacggcagatctacggacagaacttcatcccaccaaaacaaccaaagacctttttgcagctggtctgggaggcccttcaggacgtgaccctgattatcctagaggtggcggccatcgtgtctctcggcctgtcattctatgcccctccaggagaggaaagtgaagcttgtggcaacgtaagtggaggagccgaggatgagggcgaggctgaggcaggttggatagaaggagccgctatcttactcagcgttatctgcgtggtgctcgtaacagccttcaatgactggagcaaggaaaagcaatttaggggcctgcaaagccggatcgagcaagagcagaaattcacagtaatccgcaatggccaactcctacaggttccggttgccgctctcgtggtaggggatatcgcccaggtgaagtatggcgacttgctgcccgccgatggagtgttgatacaggctaatgatctgaagatcgacgagtcttcactgactggggagtcagaccacgtccggaagtctgcagataaggatcctatgctgttaagtggtactcacgtcatggagggaagtggccgaatggttgtcacagcggtgggcgtgaacagtcagacggggataatcttcacgctccttggggcagggggagaggaagaggagaaaaaggataagaaggccaagaagcaggatggagcagttgctatggaaatgcaaccattaaaaagtgcagagggcggcgaaatggaagaacgagaaaaaaagaaagctaacgcacccaaaaaagagaagtctgtattgcagggaaaactgacaaaactcgctgtacagataggaaaggctggtctggtaatgtcagctattactgtgatcattctggtcctgtacttcgtaatagagactttcgtcgtggaaggccggacctggctggctgagtgcaccccggtgtatgtacaatattttgtaaaattcttcatcatcggcgtcactgtgctcgtggtggccgtccccgagggccttcccttagcagtgacaataagtctcgcctatagtgtcaagaaaatgatgaaggataacaaccttgtgagacatctcgatgcctgcgaaacaatggggaatgcaaccgctatctgttctgacaagacgggcaccctaaccactaatcgaatgaccgtcgtgcaaagctacctgggcgacacacactacaaagaaatcccggcgccttctgcccttacacccaaaatccttgatctgctggtccatgctatctctatcaactccgcctacaccaccaaaattctgccacccgagaaagaaggagcactgcctcgccaggtgggcaataagacagaatgtgcacttctcgggttcgtcctggacctgaagcgggactttcagcctgtgcgagagcagatacccgaggataaactgtataaagtctatacctttaacagcgtgcgcaagtcaatgtcgacggtcatccgtatgcctgacggaggctttcgcctgtttagcaaaggcgccagtgaaatccttctaaagaagtgcacgaatattttgaactccaatggggagctcagaggctttcgtcctagagatcgcgatgacatggtaagaaaaatcattgaaccaatggcctgtgatgggttaaggaccatatgcattgcttatcgggatttttcggctggtcaggaacccgattgggacaatgaaaatgaggtagttggcgacctcacatgtatagcagtggtggggattgaggacccggttcgtcctgaggttccagaggccatccgcaaatgtcagcgggcaggcataaccgtgagaatggtgactggcgacaacattaacacagctcgggcgattgccgccaagtgcggtatcattcaacccggggaggactttttgtgcctcgagggaaaagagttcaatagaagaatcagaaacgaaaagggcgaaatagaacaggagcgcctagataaagtctggccgaaactgcgagttctcgcacgctcgagccctactgataaacacaccctggtgaagggaattatagatagcacaaccggcgaacagcggcaagtcgtcgccgtcaccggggacggaaccaacgatgggcccgccctcaaaaaagccgacgtcggtttcgcaatgggcattgccgggaccgacgtggcaaaggaagcatccgatataatcttgacggatgacaatttcacttccatcgttaaagccgtgatgtggggacgtaacgtgtacgacagcatctctaagttcctgcaattccaactgactgtaaacgtcgttgctgtgattgtggccttcactggggcctgtatcactcaggactctcccctgaaggccgtccagatgctttgggtgaacttgataatggatacttttgctagcctggcactagcaacagagccaccaactgaaagcctgcttctcagaaagccatacggaagggacaaacctttaatcagcagaaccatgatgaagaatatccttggtcacgccgtgtaccagctggctatcatatttacactgctgtttgtgggcgaactcttcttcgacattgacagtggtcggaacgctccactgcacagtccaccatccgaacactatacaattatctttaacactttcgtgatgatgcaactgttcaacgagatcaatgccagaaagatccacggcgagcggaacgtgtttgacggcattttcagcaaccctatcttttgcacaatcgtcctgggcactttcggcatccagatcgtaattgtccagtttggcggcaaacccttctcatgtagtccactgtcaactgaacagtggttatggtgcctttttgtgggagtgggagagctagtatggggccaggtgattgcaactattccgacttctcagctcaaatgccttaaagaagctggacatggacctggaaaggatgaaatgacggacgaggaactggctgagggggaggaggagatagatcatgccgagcgggaactgcggagaggtcagatcctctggtttcgaggccttaatcgaatccagacgcagatggaagttgttagtacctttaagcggagcggcagcgtccagggcgctgtaagacggaggagtagcgtactgtctcagctacatgacgtgaccaacctctccacgcctacacacgccatcctatccgccgctaacccgacctctgctgccgggaaccctggaggcgagtcggtcccgtag

SEQ ID NO: 179781 - DNA, 3480 bp, synthetic construct
  misc_feature 1..3480: note = Description of Artificial Sequence: Synthetic coding sequence
  source 1..3480: mol_type = other DNA
atgggcgacatggccaacagcagcatcgagttccaccccaagccccagcagcaacgggatgtgcctcaagccggcggctttgggtgcacactggctgagctgaggaccctaatggaactgaggggtgcagaagctctgcagaagatcgaggaagcctatggtgacgtgtcaggcctctgcaggcgcctgaagacatcccccactgagggtctggctgataacacaaacgacctggaaaagcggcggcagatctacggacagaacttcatcccccctaaacagccaaagactttcctccaactcgtctgggaagcattgcaggacgtcacactaatcatcctagaggtcgcggctatcgtaagtctcggacttagtttttacgctcctccaggtgaggaatctgaggcgtgcgggaacgtttccggtggcgcggaagatgaaggggaggccgaggctggctggatcgaaggcgcagctatcctgttgtccgttatttgtgtggtcctcgttacagcttttaatgactggtccaaggagaagcagtttcgagggctgcaatcacggattgagcaggagcagaagtttaccgtcattcgaaacggtcagctgttgcaggtccccgtggccgcattggtggtgggggacatcgcccaagtgaagtatggcgatctgctccccgctgacggtgtactaatccaggcaaacgacctgaagatcgacgaaagctccctgacaggcgaatcagatcacgtccgcaagtccgccgataaggatccgatgcttctctccggtacacatgtgatggaaggttctggcagaatggtggttactgctgtaggcgtcaacagtcagactggcattattttcacccttctcggtgctggcggggaggaggaggaaaagaaggacaagaaagctaagaaacaggacggggccgtcgccatggagatgcagcccctaaaaagcgctgagggcggggagatggaagagcgcgagaaaaaaaaagccaacgctcctaagaaggagaagagtgtgctgcaaggcaagctgaccaagctggcagtccaaattggaaaagccggactcgtgatgtccgcaattaccgtgatcattttggttctatatttcgttattgagacattcgtcgtggaggggcgcacatggctcgcagaatgcacacccgtgtacgtgcaatactttgtcaaatttttcatcatcggcgtgacagtccttgtggtggcagttcctgagggcctgccgttggccgtaacgatatccctcgcctactctgtcaaaaagatgatgaaagataataacctggtccggcatctggacgcttgtgagaccatgggtaacgccaccgcgatctgttctgacaagacaggcactctaacaacaaacaggatgacagtcgttcagtcataccttggcgatacccactacaaggaaatccctgcccccagtgcactgactcctaagatcctagacctgctggtccacgcaatctccatcaattcagcatatacaacaaagatcctgcctcccgagaaagaaggtgctctccctcgccaggtagggaacaaaaccgaatgcgccctgttgggctttgtacttgatctgaaacgagactttcagcccgtgcgcgaacagatccccgaagacaagctctacaaggtgtataccttcaactctgtcagaaagagtatgtcaacagtcatcaggatgcctgacggggggttccgactgtttagcaaaggtgcctctgaaatcctcttaaaaaaatgtacaaacatacttaacagtaacggcgagctcagagggtttcggccgagagatagggatgatatggtgcggaaaattatcgagcctatggcttgtgatgggcttagaacaatctgcatagcttatcgtgattttagcgccggccaggaaccagactgggataatgaaaacgaagtagtgggcgacctgacttgtattgccgtggtgggcatcgaggatcctgtccggcccgaggtgcccgaagcaatacgtaaatgccagcgcgcagggatcaccgtccgaatggtgaccggcgataatattaacacggcacgggccatagccgcaaaatgcggtatcattcaacctggcgaggactttttgtgtttagagggcaaagagttcaacagaagaatacgcaatgagaagggagaaatcgagcaggagagactcgacaaagtatggccaaagctgagagtgttggcccgctcctcacccacagacaaacacacactggttaagggtatcatcgactctaccacaggggagcagaggcaggtcgttgcggtcacgggagatggcacgaatgacggtccggcactgaagaaggccgacgttgggttcgctatgggaatcgcaggaactgacgtcgccaaggaggcttccgacattattctgacagacgacaacttcacatccattgtaaaagctgtgatgtggggccgcaacgtttacgattccatctcaaaatttcttcaatttcaactgacggttaatgtggttgcagtaatcgtggctttcactggagcctgtattactcaggattctccactgaaggcggtacagatgctttgggttaatcttatcatggatacgttcgctagtttggcactggcaacagaaccgcctaccgaaagtttattgctcagaaagccctatggtagagataagcctctcatttctagaactatgatgaaaaatattctaggacatgccgtgtaccagttagcgatcatttttacacttttgttcgttggtgagttgttctttgatatcgattccgggcgaaacgctccgctgcattcacctccgtctgagcattatactataattttcaacacctttgtgatgatgcaactcttcaacgaaattaacgccaggaagattcacggagagcgcaacgtttttgacgggattttctccaatcccatattctgcaccatcgtcttggggacatttggcatacagatcgtcatcgtgcagttcggcggcaaacctttctcctgttctcccttatccaccgaacagtggctgtggtgtctgtttgtcggtgtgggcgagcttgtttgggggcaggtgatcgctacaatccctacaagtcagctcaaatgtctgaaagaggccggccatggacctggtaaggacgagatgaccgacgaggagctcgcagaaggagaggaagaaatcgaccacgcagagagagagttacggcggggtcagatcctgtggtttagaggattaaacagaattcagacgcaaatggaggtcgtctctacttttaaacggagtggaagtgtgcaaggagccgtgagacgcagaagcagtgtgttatcccaactgcatgacgtcaccaacctgtccactccaacgcacgctattctttctgctgcaaatccgacttccgccgcaggcaacccagggggcgagtcagtgccgtag

SEQ ID NO: 179782 - DNA, 3465 bp, synthetic construct
  misc_feature 1..3465: note = Description of Artificial Sequence: Synthetic coding sequence
  source 1..3465: mol_type = other DNA
atgggcgacatggccaacagcagcatcgagttccaccccaagccccagcagcagcgggacgtcccacaggccggcggatttggctgtactctggcggaactgcgcaccctcatggagcttcggggcgccgaggcccttcagaagatcgaggaagcctatggcgacgtctccggtctctgtcggaggttaaaaacatcccccacggaggggctggcagataacaccaatgatctcgaaaagcgcagacaaatctacggccaaaactttattccccctaaacagccgaaaacattcctgcagctcgtttgggaggccctgcaagacgtcaccctgatcattcttgaagtggcagcaatcgtttccctgggcctgtccttctatgcccccccaggcgaggagtctgaagcctgcggcaatgtgtctggcggtgcagaggacgagggcgaagccgaggctggttggattgaaggggcggccatcctcctgtcagttatttgcgtggttttggtcaccgccttcaatgattggtctaaggagaagcaatttagaggacttcagtccagaatcgagcaagaacagaaattcaccgtgatccgaaacggccagctgctccaggtgcccgtagccgccctcgtggtgggcgacattgcccaggttaagtacggagatctgttgccagccgatggggtgctgatccaagccaacgatctgaaaatcgatgaatcaagcctgacaggggaaagcgatcacgtgcgcaagagtgccgataaggatcccatgctgctaagcgggacccacgtgatggaggggtcaggaaggatggtggtcacagcggtcggcgtcaattcacagacaggcatcattttcactctgctgggcgccggaggcgaggaggaagagaaaaaagacaaaaaagctaagaagcaggatggcgccgtggccatggagatgcagcctcttaaaagcgccgaaggcggggagatggaagagcgcgagaagaagaaggcaaacgcccctaaaaaagaaaaaagcgtcctacagggaaaacttacaaaactcgctgtacaaattggcaaagctggccttgtgatgagcgctataaccgtaatcatccttgtattgtactttgtgatcgagacatttgtagttgagggccgaacatggctggctgagtgtaccccagtgtatgtgcagtactttgtcaaatttttcatcattggtgtgactgtcctcgtggtcgctgtgcccgaggggctgcctctcgccgtcactataagcttagcatactcagtgaagaaaatgatgaaggataataatttggtaagacacctcgacgcctgtgaaaccatgggcaatgctacggccatctgttcggacaagacaggtacgctgacaaccaaccgtatgacagtcgttcaatcttatctcggagatacccattacaaggagatacctgccccatctgctctgacaccgaagatactggaccttttggtgcatgccattagtatcaactctgcctatacaaccaagatcttacctccagagaaggaaggcgccctcccacgtcaggtaggaaataaaacagagtgtgcgcttctgggtttcgttttggatctgaagagggattttcagcctgtcagggagcagattcctgaggataaactgtacaaggtctacaccttcaactctgtccgaaagtctatgtctacagtcattcgaatgccagacggcggcttcaggttattttccaaaggagcttcagagattcttctcaaaaagtgcactaacatcctgaatagcaacggcgaactgaggggttttcggcctagggatcgtgacgacatggtgcggaaaatcatcgaacccatggcctgtgacggactgcgtacgatttgtatcgcttatcgcgactttagtgctggacaggagcccgactgggataatgagaacgaggtggtgggagacctgacctgcattgccgttgtggggattgaggaccccgtcagacccgaggttcccgaggctattcgcaaatgccaaagggcgggcatcaccgtgcgcatggtgaccggtgataacatcaacacggctcgggctatcgctgctaaatgcggcattatccagcctggtgaggactttctgtgcctcgaagggaaagagttcaacagacgcataaggaatgaaaagggggagatcgaacaggaaaggcttgataaggtgtggccgaagctgcgggttctggcacgatcgagtcccacagataagcacaccctggtaaaggggatcattgacagcaccaccggagagcagcgccaggtagtggcagtgaccggggatggcacaaacgacggccccgccctcaagaaagccgatgtgggctttgcaatggggatagccgggaccgatgtggccaaagaggcctccgacatcatccttacagatgataatttcacgtcgatcgtgaaagctgtcatgtggggccgcaatgtgtacgatagtatcagtaaattcctgcaatttcaactgaccgtgaatgttgtcgcagtaattgtggcgtttactggtgcctgcattacgcaggatagcccgctgaaggccgtgcaaatgctgtgggtcaatctcatcatggacaccttcgctagtctggctttggcaacggagccaccaactgagtccctattgctgcgcaagccatatggacgggataaaccactaataagcaggacgatgatgaagaatatcctcgggcacgccgtgtatcagttggctatcatcttcaccctgctgtttgtgggagagctttttttcgatatagattccggccgaaatgcacccttacatagcccaccatccgagcattacacaattatttttaatacgttcgtcatgatgcagctgttcaacgaaattaatgctcgcaagattcatggtgaacgcaatgtgtttgacggaatcttcagcaatcccattttctgtactattgttctgggtacgtttggcatccagatagtgattgttcaatttggtgggaagcctttttcatgctcacctctgtccactgaacagtggttgtggtgcctctttgtgggtgttggcgagctggtgtgggggcaggtcatagccacaatcccgacgagccagcttaagtgcttgaaggaggcgggccacggcccaggaaaggatgaaatgacggacgaggagctggccgagggcgaggaagagatcgatcatgccgagagggaactgagacggggacagatcctgtggttccggggtctgaatcgtatccagacgcaaatggaggtggtaagtactttcaaacgatccggtagcgtgcagggagctgttcggagacggtcatcagtgttgagccagctccatgatgtaacaaatctgtcgacgcctacccacgccattctctcagccgccaatccaacctccgccgctgggtcagaaagctag

SEQ ID NO: 179783 - DNA, 3513 bp, synthetic construct
  misc_feature 1..3513: note = Description of Artificial Sequence: Synthetic coding sequence
  source 1..3513: mol_type = other DNA
atgaccaaccccagcgaccgggtgctgcccgccaacagcatggccgagagtcgggagggggactttggttgcacggtgatggagctgcggaagctgatggaacttcgtagccgagacgccctgactcagatcaatgtgcactacgggggcgttcagaatctgtgttctagattaaaaacttcgcccgtggaaggccttagcggcaaccccgccgatctggaaaaacgccgacaggtgttcgggcataacgtgattccccctaaaaagcccaagactttcttggaactggtctgggaggccctccaggacgtaacactaatcatattagaaatcgcagctatcatcagtcttgtgctttctttttatagacccgccggtgaggaaaacgagttgtgcggccaagttgccacaacccctgaagatgagaacgaagctcaagctggttggattgaaggggcagccattctgtttagtgtgattatcgtggtgcttgttactgctttcaacgactggtcaaaagagaaacaattcaggggtttgcagtgtagaatcgagcaggaacaaaagttttcaatcatcaggaacggacagcttatacagttaccagttgctgagattgtggttggtgatatcgcccaggtgaagtacggcgatctgctgcccgccgacggaatcctgatccaaggaaacgacctgaagattgatgagagtagtctgaccggtgaatccgaccatgtcaaaaagtccctcgacaaggatcctatgctgttgtcaggaacacacgtgatggagggctcgggtcggatggttgtaactgcggtgggggtgaattctcagactggtatcatcctcacgcttctcggtgtgaacgaggatgatgagggtgaaaagaaaaagaaaggaaaaaaacagggtgtccctgagaatcgcaataaggccaaaacacaagacggagtcgccttggaaatccagccattgaattcgcaagagggaattgataacgaggagaaggataagaaggcagtgaaagttccaaagaaggaaaaatccgtattacagggtaagctaacacgactcgcagtacagataggaaaagctgggctgctgatgagtgctcttaccgtgtttatcctgatcctgtattttgtcatagataatttcgtcatcaacaggaggccctggctaccggagtgcacccccatttatatccagtacttcgtgaagttttttattataggcataactgttcttgtggtcgctgtgcccgagggcctacctctggctgttacaatctctcttgcctactccgtcaaaaaaatgatgaaggataacaacctggtgcgccacctcgatgcctgtgagaccatgggcaacgcaaccgccatctgcagcgacaaaacaggcacgcttactatgaaccggatgacggtggttcaagcttatattggaggaattcactatcgccaaatccctagtccagatgtgtttctgccgaaggtactggatcttattgttaacggtatctcaatcaactcagcttacacttcaaaaatcctgccccctgagaaagaggggggactcccacgtcaggttggtaataagactgaatgtgccctgcttggcttcgtgacggacctgaagcaggactatcaggcggtccgtaacgaggttcctgaggagaaactttataaagtctatacgtttaattcagttcgaaaatccatgagcacagttattagaaaccccaatggcgggttccgaatgtatagtaagggggcttccgagatcattctgagaaagtgtaacaggatactggatcgcaagggtgaagccgttccatttaagaacaaagacagggatgatatggtcagaaccgttatcgagccaatggcatgcgacgggctgcgcaccatctgcatcgcatatcgcgatttcgacgacacagaaccctcgtgggacaatgagaatgagatcctcacagagctcacttgtatagctgtagtcgggatcgaagatcccgtacggccagaggtccctgacgccatcgccaagtgtaagcaagcaggaatcactgtgcgaatggtaaccggggataacatcaacacggcccgcgccatcgccacaaaatgcggcatcctgactcccggcgacgactttttgtgtctggaaggcaaagaattcaatcgacttattagaaacgagaaaggagaagtggagcaggagaagctggacaagatctggcctaaactaagggtccttgcacggtcgagtcccacggataaacacactctcgtaaaagggatcatagatagcacagttggagagcatcgccaggtggttgctgtcaccggagatggcaccaacgacggccccgccttgaagaaagccgatgtgggattcgccatgggaattgcgggtactgatgttgctaaggaggcaagcgacattattctgactgatgacaacttcacctctatcgtcaaggcagtgatgtggggtcggaacgtttacgattcaataagcaagttccttcagttccagctaacagtcaacgtggtcgcagtgatcgtcgccttcacaggggcttgcatcactcaggattccccactgaaggcggtgcaaatgctatgggtcaatcttattatggatacttttgccagcctcgcattggctaccgagcccccgacggagtctctccttaagcgaagaccctatggtagaaacaagcctctgatctctagaactatgatgaaaaacatactcggtcatgccttttaccagctgatcgttatttttatccttgtgtttgcaggagaaaagttcttcgacatcgacagtgggagaaaagcacctctgcacagcccgccctctcagcactatacaatcgtgtttaacactttcgtgctcatgcagttgttcaacgagatcaacagtagaaaaattcatggagagaagaacgtattctccggaatataccggaacatcattttttgttcagtcgtcctgggcaccttcatctgccaaatctttatagttgaatttgggggcaaacccttttcttgtaccagtctctctctgagtcagtggttatggtgtctgttcatcggtataggtgaactactgtggggtcagtttatcagtgctatccctactcgcagcctgaaattcttgaaagaagcagggcatggaaccacgaaggaggagatcaccaaagatgcggagggcttggacgagatagatcatgccgaaatggagctgcgccgaggccagattctgtggttcagaggactgaataggatccagacgcagattgatgtaattaatactttccagaccggtgccagtttcaaaggagtcctgcgcaggcagaacatgggacagcatctggacgtaaaactcgtgccaagctcaagttatgtggcggtggccccagtaaaatcctcacccactacctctgtgcctgcagtgagttctcctcccatgggcaaccagtccgggcagtcagtgccctag

SEQ ID NO: 179784 - DNA, 390 bp, synthetic construct
  misc_feature 1..390: note = Description of Artificial Sequence: Synthetic coding sequence
  source 1..390: mol_type = other DNA
tgaatcggcgagctgctgtggggccagttcatcagcgccatccccactaggtctctcaagttcttgaaagaagccggtcatggaaccaccaaggaggagattacaaaggatgccgagggtctggacgaaatagaccatgccgagatggagctgaggcgaggacagattctgtggttcagaggactgaataggattcagacccagattgacgtcattaacacctttcagacaggtgcatcttttaagggagttttaagacggcagaacatggggcagcacctggatgtgaagctcgtgccgtctagtagttatgtcgcagtggcacctgttaagtcatctcccactacttccgtgccagccgtgtcgtcccccccaatgggaagcgagtag

SEQ ID NO: 179785 - DNA, 3618 bp, synthetic construct
  misc_feature 1..3618: note = Description of Artificial Sequence: Synthetic coding sequence
  source 1..3618: mol_type = other DNA
atgaccaaccccagcgaccgggtgctgcccgccaacagcatggccgaaagcagagagggagatttcgggtgcaccgtgatggagctccgcaagctcatggagctccgtagccgtgacgccttaactcaaatcaatgtgcactatggaggcgttcagaatttgtgttcacgcctgaagacttcccctgtagaagggttgtcagggaaccccgctgacctggagaagagacggcaggtcttcggacacaatgtgataccacccaagaagcctaaaacatttctggagcttgtgtgggaagcacttcaagatgtgacactgatcattctagaaatagcggccatcatctctctggttctatcattctatcgcccagcaggcgaagaaaacgaactttgtgggcaagtggcgaccactcccgaggatgaaaatgaggctcaggcaggctggattgaaggggctgccatcctcttttcagttattatcgtagtgctcgttacggctttcaacgattggagcaaagaaaagcagtttagaggccttcagtgcagaattgagcaggagcaaaagttcagtattatccgaaatgggcagctaatccaactcccggttgctgaaattgttgtcggtgatatcgcccaggtgaagtatggagatttattaccagccgacggtatccttattcaaggcaacgaccttaagatcgacgaaagcagcctaacaggcgaatccgaccacgtgaagaagagtttagataaggatccaatgctcctgagcggcacacacgtgatggagggaagcgggagaatggtagttacggccgtcggtgtgaacagccagaccgggattatcctgaccctgctgggggtgaatgaagacgatgaaggtgagaagaagaagaagggaaaaaagcaaggagtgccagagaaccggaacaaggctaaaacacaggacggcgtcgctttggagatccaacccttgaacagtcaggaagggattgacaacgaggagaaggataagaaggccgttaaggtgcctaagaaggagaagtcagtgttgcaggggaagctgaccagactggccgttcagattggcaaagctgggctgctcatgtcagccttaaccgtttttattctcatactgtacttcgtgattgacaatttcgtcatcaatcgacgcccttggttgccagaatgtaccccaatctacattcagtactttgtcaaattcttcatcatcggaattactgtattggtcgtggccgttcccgagggcctccccttggcggtcacaatctccctggcatactctgtgaaaaagatgatgaaagacaataacctcgtcagacacctggatgcctgcgaaactatgggtaacgccacagcaatttgctctgataaaaccggcaccctcaccatgaataggatgaccgtggtgcaggcatatataggcgggatccattatcggcagatccccagtccagatgtgttcctcccgaaggtgctggacctaatcgtgaacggaatttctattaattctgcgtacacgtcaaagatccttccacctgagaaagagggaggcttgcctcgacaggtcggaaataagacagagtgtgcccttctgggttttgtgacagacctcaagcaggattaccaagcggtgcgcaatgaggtgcccgaggagaagctgtataaagtatacacttttaattctgtgcgcaagtctatgtcaactgtgatcagaaatccgaatggtggattcagaatgtattcaaagggcgcctccgagattattctgaggaagtgtaataggatcctagatcgcaagggagaggctgtgccgtttaaaaataaggatagggacgacatggtgagaaccgtgattgagcccatggcttgcgacggcctgaggaccatctgtattgcctacagggacttcgacgacaccgagccatcttgggacaatgaaaacgagattttgactgagctcacttgtattgcagtggtgggtatcgaggatccggtgagacccgaggtcccggacgcaatcgccaagtgtaagcaggccggcattacggtgcggatggttaccggcgacaatatcaataccgcacgcgcaattgctacgaagtgcgggatcctcacacccggggacgactttctatgcctggaaggtaaagaattcaatagactaatccggaatgaaaagggagaggtggagcaggaaaaactggacaagatttggcctaaactgagggtgctcgcgagaagctcccccaccgacaagcacacactggtaaaggggattatcgacagcacagtgggggaacacagacaagtagtggccgtcaccggtgatggcacaaatgacggacccgccctcaagaaagctgatgttgggttcgcaatgggcatcgcggggacagacgtcgctaaagaggcctccgacataatcctgaccgatgacaatttcaccagcatcgtgaaagctgtgatgtggggacgtaatgtctatgactctatcagcaaatttcttcagtttcaactaacggtcaatgttgtagctgtgattgtggccttcactggtgcctgcataactcaggactccccgctcaaagcagtgcagatgctctgggtgaaccttattatggatacattcgcgagcctggccctcgcaactgaaccacccacagagagcttgttgaaaaggcgaccctacggtcgcaacaagcccttgatttcaagaacaatgatgaagaacatactaggacatgctttctatcagttaattgtcatcttcatcctggtgttcgcgggcgagaagttctttgacatcgacagtgggagaaaggcccctctccactctcctccgagccagcactacacaatcgtgttcaacacattcgttttaatgcaactgtttaatgaaatcaactcccgaaagatacatggcgagaaaaacgtgttcagcgggatttaccggaacattatcttctgttccgtggtgctgggcacatttatttgtcagatcttcatcgtggagtttgggggcaagccattcagctgtacttctctctcccttagccagtggctttggtgccttttcattggcattggggaactcctatggggtcaattcatttctgctatacccactcggtctctcaaatttctgaaagaggccgggcacgggaccaccaaggaggagatcacgaaggatgccgagggacttgatgagatcgaccatgcagagatggagctacggagaggccaaatcctttggtttcggggtctgaatcgcattcagacacagatcaaagtggtaaaagccttccatagctcgcttcatgagagtatccaaaaaccctacaatcaaaaaagcattcattcgtttatgacacatcctgagttcgcgatcgaggaggagcttccgagaacacctcttctggatgaagaggaggaggagaacccagacaaagcaagcaagttcgggactagagtccttctcctcgacggagaagtaacaccctatgccaatacaaacaacaatgccgtagactgcaaccaggtccagctgccccagagcgattcaagcctccagagtctggagaccagcgtgtag

SEQ ID NO: 179786 - DNA, 3513 bp, synthetic construct
  misc_feature 1..3513: note = Description of Artificial Sequence: Synthetic coding sequence
  source 1..3513: mol_type = other DNA
atgaccaaccccagcgaccgggtgctgcccgccaacagcatggccgaaagtcgtgagggggatttcggatgcaccgtcatggaactccgcaaattgatggagcttcggagtcgtgacgcccttacacagattaacgtccattacggaggcgttcagaatctctgtagccgcctgaagacgtctcctgtggagggactaagtgggaaccccgctgatctggaaaagaggagacaggtttttggacacaacgtcatccctccaaagaagccaaagaccttcttagagctggtctgggaggcactccaggatgttacactgattattctggagatcgccgctattatctccttggtgctgagcttctaccggcctgctggagaggaaaacgagctgtgcgggcaggtagctacgactccagaggatgaaaatgaggctcaggctggctggatcgagggagccgctattctctttagcgtgattatcgtcgtgctggtgacagcattcaacgattggtcgaaagaaaaacaattccgcggtctgcagtgccggatcgaacaagagcaaaaattctccattataagaaacggccaactcatccagctaccagtggccgagatagtagtcggcgacatcgcacaggtaaaatacggagacctattacctgcggacggtatattgatacaagggaacgatttgaagatcgacgagtccagtcttactggtgaaagtgatcatgtgaagaaaagtcttgataaggaccctatgcttctctccgggacacacgttatggaaggctccggcagaatggtggtgacagcagtgggagtgaattcacagaccggcattatcctgactctattgggcgtcaacgaagacgatgagggcgagaagaagaagaagggaaagaaacagggggtgccggagaacagaaacaaggctaaaactcaggacggggtggccctggagatccaacctctgaactcacaagagggaattgacaacgaagaaaaggacaagaaggccgtgaaggtgcccaagaaggaaaagtcagtgctccaggggaagttgactaggctagctgttcagatcggaaaagccgggcttttaatgtcggctctgactgtgttcattcttattctctacttcgtgatcgacaatttcgttataaaccggcgcccatggttacccgaatgtactccaatttacattcaatacttcgtcaagtttttcatcatcggaatcacagtgctagtcgtggccgttccggagggcctgcccctggcagtgacaatcagcctggcatacagtgtgaagaaaatgatgaaagataataatctggtgcgccaccttgacgcttgtgaaaccatgggaaacgctactgctatctgttccgataaaacaggcacactcaccatgaaccgcatgacggtggtccaggcctatatcggaggaattcattataggcagattcccagccctgatgtgttccttccaaaggtcttggacctcattgtaaatggaatcagtatcaactccgcatacacatcaaagattctgccacctgagaaggaaggaggcttgccacgacaggttgggaacaaaaccgaatgtgcgctgctgggatttgtcaccgatcttaagcaggactaccaggctgttcgcaatgaagtgccagaggaaaagctgtataaagtgtacacattcaattccgtgcggaagagtatgagtactgtgattcggaacccaaacggaggttttcgaatgtactcaaagggcgcctcggagataatattaaggaagtgcaatcggatcctcgaccgaaagggggaagcagtgccattcaaaaataaagacagagacgatatggttcgcactgtcatcgaaccgatggcgtgtgatggcctgaggactatttgcattgcgtaccgcgactttgacgacacagaaccctcctgggacaacgagaatgaaattttgactgagctcacctgcattgccgtggttggcattgaagaccccgtcaggccggaggtgcctgacgccatcgccaaatgtaaacaagccgggattaccgtgcgtatggtgacaggcgacaatattaatacagctcgggctattgccaccaagtgcggtatcctcacccccggagatgattttctttgcctcgagggcaaagaattcaaccgcctgatcaggaacgagaagggtgaggtggagcaggagaaactcgacaagatttggcccaagctgagggtcctcgccaggagttctccaaccgacaagcataccctcgtgaaagggatcatcgactccacagtcggcgagcataggcaagttgtggccgtgactggcgatgggacaaacgacggccctgcactaaagaaagccgacgtcggattcgcaatgggaatagccggcacggatgtggccaaagaagccagtgatataattctgacggacgataatttcaccagcatcgtgaaggccgtaatgtgggggcggaatgtgtatgactcgatctccaaatttttgcagtttcagctaacagtcaacgtggtcgcagtgatcgtggcctttactggagcttgcataacacaggattcccctctgaaggctgtgcagatgctatgggtgaacctgattatggacacatttgcgagcctagcactcgcaactgagcctcccacagagagccttttaaagcggagaccatacggccggaataaacccctcatatctagaaccatgatgaaaaacatcctaggccacgctttttaccagctgatcgtcattttcatcctagtattcgcgggagaaaaattcttcgacatagacagcgggcgcaaggcgcccctacattcaccaccatctcagcactataccattgtatttaacaccttcgttcttatgcagctgtttaatgagattaactcaaggaaaatccatggtgagaagaacgtgttcagcggaatctacaggaatatcattttttgtagcgtcgtgctggggacgtttatttgtcaaatattcatcgtagagttcggggggaagcctttcagttgcacatccctgagtcttagccagtggctgtggtgcctcttcataggaataggagaactcttgtggggacagttcatcagtgccatacctactcgatcgttaaagtttctcaaagaagctggccacgggaccactaaagaagagatcacgaaggatgctgaaggattggacgaaatcgatcacgcagaaatggagttgcgacgaggtcagatactttggtttcgcggcctgaacaggatccaaactcagattgatgtcatcaacacgttccagaccggcgcctctttcaaaggtgtcctgaggcggcagaatatggggcagcatctggatgtgaagcttgtacccagcagttcgtatgtcgctgttgctccagtgaagtcctcccccaccaccagcgtgcctgcagtgagcagcccccctatggggaaccagtctgggcaatctgtcccatag

SEQ ID NO: 179787 - DNA, 3477 bp, synthetic construct
  misc_feature 1..3477: note = Description of Artificial Sequence: Synthetic coding sequence
  source 1..3477: mol_type = other DNA
atgaccaaccccagcgaccgggtgctgcccgccaacagcatggccgagtcccgagaaggagatttcgggtgtacagtgatggagctgaggaagttaatggagcttcgtagccgagatgccctgacacagattaatgtccactacggtggagttcagaatctgtgctcccgcctgaagactagccctgtagagggcttgagcggcaaccctgctgacttagaaaagcgaaggcaggtgttcggacataatgtgatcccaccgaagaagccaaaaactttcctagagctggtttgggaagccctccaggacgtaacactcattattctggagatcgcagcgatcatatcattagtcctcagtttctatcgccctgccggtgaagagaacgaattatgcggtcaggtggctactaccccagaagacgaaaacgaagcccaggccggctggatcgagggtgctgccatcctgttctctgtgatcatagtagtgctcgtgacagcctttaacgactggtcaaaagaaaaacagtttcgcggcttgcagtgccgtatagaacaggaacagaaattttcaattattcggaacgggcagcttatccagctgcccgtcgcagagattgtcgtaggggatattgcccaggtcaaatacggcgatctcttgcccgccgatggaatattgatccagggcaatgatttgaaaatagacgagagctcattgacaggagagagcgatcacgttaaaaagagcctagataaggacccaatgctcctgtccggcacccatgtcatggagggctctggtaggatggtagtgaccgccgtgggagttaacagtcagacaggaataatcctcacgttgctcggcgtgaacgaagatgacgagggtgaaaaaaagaagaaggctaagacacaggatggtgtggcgctcgagattcagcctctcaactctcaggagggcattgacaacgaagaaaaggataagaaggcggtgaaagttcccaaaaaggaaaagagcgttttgcaaggaaaattgacccgcctggctgtgcaaatcggcaaagctggactcctaatgtcagccctcactgtgtttatcttgatcctgtactttgttatcgataatttcgttattaataggagaccttggctccctgaatgtacccccatctacatccagtacttcgtgaagtttttcattatcgggattaccgtgctggtggtcgcagttcccgagggtctcccactcgcagttaccatcagccttgcgtactctgtgaaaaagatgatgaaggacaacaacttagtccgccatctggacgcctgcgaaactatggggaacgccacagccatctgctccgacaagacaggcaccctgacgatgaacaggatgaccgtggtacaggcttatatcggtggaatccattaccggcagattccaagccctgatgtgtttctccccaaggtcctcgatctcattgtcaacggaatatccattaacagcgcatatacgagcaagattcttcctcctgagaaagaggggggcctgcccaggcaggtcggaaataaaactgagtgcgcactccttggattcgtgactgatctcaagcaggactatcaggctgttaggaacgaggtacctgaagagaagctgtataaggtgtatacattcaatagcgtgcggaaaagcatgtccacagtgatccgcaacccaaatggcggctttcggatgtactcaaagggggcctctgagatcatcctcaggaaatgcaatcgcatactggaccggaagggcgaggcggtgccttttaaaaataaggaccgcgacgacatggtgcgcaccgtgattgagccaatggcttgcgacggcttacgcaccatatgtatagcctacagagactttgatgacaccgaaccaagctgggacaatgaaaacgagattctaaccgaactgacatgcatagccgtggtaggcatcgaggaccccgtcaggcctgaggtgcctgacgctattgccaaatgtaagcaggctggaataaccgtgagaatggtcaccggtgataatatcaacacggcccgcgcaatcgcaacaaaatgtggaatcttaactcctggagatgactttctatgtctggagggcaaagaattcaaccggttgataagaaacgaaaaaggcgaagtggagcaagagaaactggataagatctggcccaagctccgggtgttggctagatctagccctaccgataagcacaccctggtgaaagggatcatcgactccacagtgggcgagcacaggcaagtggtcgccgtcaccggcgatggaactaacgatggcccagctctgaagaaggcagatgtgggattcgcaatgggaattgcaggaacagatgtagccaaggaagcctcagatatcattctgactgatgataacttcacctcgatcgtgaaggccgttatgtggggcaggaatgtctacgactcaataagcaaattcctgcaatttcagttaacagttaacgtggtcgcagtcatagtcgcctttaccggagcctgtattacccaggacagcccgcttaaagccgttcagatgttgtgggtgaacctcatcatggataccttcgcctctctcgctctagccaccgagcctccaacagagagcctccttaagcgcagaccatacggccggaataagcccctaatctcacgaactatgatgaagaatatccttggccatgccttctatcagctgattgttatcttcatccttgtgttcgcaggcgaaaagtttttcgacatagattccgggcggaaagccccactgcacagccccccgagccagcactataccattgtgtttaatacatttgtactcatgcaactctttaacgagataaactcacggaagattcacggggagaaaaatgtgttcagtggcatctatcgcaatatcattttttgtagcgtggtgctgggcaccttcatctgccagatattcatagtggagtttggtggcaaacctttttcatgtacttctctcagcttaagtcagtggctgtggtgtttatttatcgggattggagaactcctatggggacaattcattagcgccatacctaccaggtccctgaagttccttaaggaggccggccatggaaccacaaaggaagagataacaaaagacgccgaaggactggacgaaatagatcacgcagagatggagcttagacggggccagatcctgtggttccgggggctgaaccgcatccagactcaaatcgacgtgattaacactttccagactggcgcgagttttaagggggtcctgcgccgacagaacatgggccaacacctggatgtaaagcttgtgccaagttcttcctatgtggcagtcgcacccgtgaaaagcagtcctactactagtgtgcccgcagtgagcagcccacccatgggaaatcagagcggccagagtgttccgtag

SEQ ID NO: 179788 - DNA, 3405 bp, synthetic construct
  misc_feature 1..3405: note = Description of Artificial Sequence: Synthetic coding sequence
  source 1..3405: mol_type = other DNA
atgaccaaccccagcgaccgggtgctgcccgccaacagcatggccgagagccgtgagggtgattttggatgcacagtgatggagctgagaaaattgatggaactgcggtctagggacgctctaacccaaatcaatgtgcactacggcggcgttcagaatctttgttctcgcttgaagacaagcccagttgagggtctgagtgggaaccccgcagacctcgagaaacgccggcaagtcttcggccataatgtgatacctcctaaaaaaccgaaaacctttcttgagctcgtttgggaggccctccaggacgtcaccctgattattcttgagatcgcagctattatttctctggtgctgtctttctatagaccagctggtgaggagaacgaactttgcggccaggtggccactactccagaggacgagaacgaggcccaggcaggatggattgagggagccgccatcctgttcagcgtcattatagttgtcctcgtgaccgcatttaacgattggtctaaggaaaagcagttcagaggcctgcaatgccgcatcgagcaggagcagaaattcagcataattcgtaatgggcaactcatacagcttcccgtggcagagatcgtagtgggagacatcgctcaagtgaaatatggggacttgttacctgccgacggaattttaatccagggaaacgatctcaagattgatgaatcctcgctcactggcgagagcgatcacgtgaaaaagtctctggacaaggaccctatgctgttatcgggaactcatgtgatggagggctcaggtaggatggtggttactgccgtaggagttaacagtcaaaccggtatcatcctcacccttcttggcgtgaacgaggatgatgaaggcgaaaaaaaaaaaaaagggaagaagcagggcgtgccagagaaccgcaacaaggctaagacccaagacggggtggccctagaaatccaacctcttaattcgcaggaaggaatcgataacgaagaaaaagataagaaagccgtaaaggtaccaaagaaggaaaaaagtgtactccagggcaagctcactaggcttgccgttcagattggcaaagcaggtttactcatgtctgctctcaccgtgtttatcctgatcttatactttgtgatagacaattttgttatcaaccggcggccttggctccccgaatgtaccccaatttacatacagtacttcgtgaagttctttatcattggcataaccgtcctggtggtggctgtacccgagggcttgcccctggctgtgacaatctccctggcttattcagtcaagaagatgatgaaggataacaacctggtgcggcacctggatgcctgcgagaccatgggtaatgccacggctatatgcagtgacaaaaccgggacacttacgatgaataggatgaccgttgtgcaggcctacataggtggcatccactacaggcagatcccttctcccgatgtctttctgcctaaagtcctcgatctgattgttaatggcatctcaatcaacagcgcttatacttccaagattctcccacctgagaaagagggaggtttgccacggcaggtaggcaataaaactgaatgcgccctgcttgggttcgtgacagacttaaaacaggattaccaggctgtccgcaatgaagtgcctgaggaaaagctctataaagtatacacattcaacagcgttcgcaaatcaatgagtaccgttatacgtaaccccaatggcgggttccggatgtatagcaaaggtgccagcgagattatcctacgcaaatgtaaccgtattcttgataggaaaggcgaggccgtgccatttaagaataaggatcgagatgacatggtacgtactgtgatcgagccgatggcttgtgacggcctccgtacaatctgtattgcctaccgagacttcgacgataccgagccatcttgggataatgagaatgagatcctgactgagctcacttgtattgcagtggtggggatcgaggatccagtccgccctgaagtaccggatgccattgccaaatgcaagcaggccggcattacagttaggatggtgacaggtgacaacatcaatactgcccgggccattgctacaaaatgtgggattcttacaccaggtgatgattttctttgcctggaaggcaaggaatttaaccggttgatcagaaacgaaaaaggggaagtcgaacaagagaaactcgacaaaatttggcctaaactgcgggtgcttgcccgctcctcaccaactgataaacatactctggtgaaagggatcatcgattccacagtgggagaacacaggcaggtggtcgctgttaccggcgacggaactaacgacgggcccgccctgaagaaagctgacgtgggatttgccatggggatcgccgggactgacgttgcgaaagaggcttccgacataatcctgaccgacgacaattttaccagcatcgtgaaggcagtcatgtgggggcgaaatgtctatgacagtatttcaaagttcctgcaatttcagctgactgtgaacgtcgtggccgtgatcgtggcctttactggggcttgtatcacacaagattctccactgaaagctgtccaaatgttgtgggttaacctcattatggatacttttgcctcccttgcgctcgctactgagccacccactgagtccctattaaaaagaaggccatacggaaggaacaaaccattaatcagtagaaccatgatgaagaatatcctgggccacgccttttaccagctcattgtgattttcatcctggtgttcgccggcgaaaagttctttgatatagatagcggtcggaaggcccccctccatagcccgccatcacagcattacaccatcgtctttaacacctttgtgctcatgcaattattcaatgagatcaacagcaggaagatccacggcgagaaaaatgttttttcagggatttacaggaacataatcttttgctctgtggtcctcgggacatttatttgtcagtttatctccgccatcccaacccgatctctgaagtttttgaaagaagctggtcacggaacaaccaaagaagaaataactaaggatgcagagggtttagacgagatcgatcacgcggaaatggagttaaggcgtggtcagatcctttggttcaggggcctgaatcgaattcaaacacagatcgacgtgatcaacacttttcagactggagcctccttcaagggcgtgctgcgtaggcaaaatatggggcaacacctagacgtcaagctcgtcccatccagtagttatgtggccgtagctccagtgaaaagctctccaactaccagcgtcccggcagtctcctcgcctcccatgggaaatcagtccggacaatccgtcccatag

SEQ ID NO: 179789 - DNA, 354 bp, synthetic construct
  misc_feature 1..354: note = Description of Artificial Sequence: Synthetic coding sequence
  source 1..354: mol_type = other DNA
tgaggcggcaagcccttcagctgcaccagcctgagcctgagccagtggctatggtgcctgttcattggcataggcgaattgctgtggggccagtttatctcagcgatccccactaggagcctcaaatttttaaaggaagccggtcatggcaccacaaaggaggaaattacaaaggacgcagagggcctcgacgagattgaccacgctgaaatggagctgaggcggggacaaatcctgtggtttagaggcctaaaccgcattcagacacagcacttgctacaggacagcgacctgctcccagataaggaagaggccattatctcctcaagtctcttcccttcctgcaacttctag

SEQ ID NO: 179790 - DNA, 2667 bp, synthetic construct
  misc_feature 1..2667: note = Description of Artificial Sequence: Synthetic coding sequence
  source 1..2667: mol_type = other DNA
atgaaggtggcccggttccagaagatccccaacggcgagaacgagacaatgattccggtattgacgtccaaaaaggccagcgagctgccagtgtccgaggttgcaagcatcttgcaagctgatctccagaacgggctgaacaagtgtgaggtgtctcatcgccgcgctttccacggatggaatgagtttgatatctccgaggacgaaccgctgtggaagaaatatattagccagttcaagaaccctcttatcatgctcttgttggctagtgccgttatcagcgtgctgatgcatcagtttgacgacgccgtgagtattaccgtggctatcctgatcgtggtcaccgtggcctttgttcaagaatacaggagtgagaaatctttagaggagttgagtaagttggtccccccagagtgccactgcgtccgagaaggcaagctagaacatacgttagcaagggatttggttcccggggataccgtctgtctctcggtgggggatagagtccctgctgatctacgactatttgaggccgtcgacctgagcattgatgagtcttctctcaccggagaaaccaccccttgctcaaaggttaccgctcctcaacccgcggcaaccaatggggatttagccagccgctcaaatatagccttcatgggcacactcgttcgatgcgggaaggccaaaggggtggtgatcggtacaggcgaaaacagtgagtttggggaagtgttcaagatgatgcaggccgaagaggccccgaaaactccactacagaagtccatggacctgctaggaaaacagcttagcttttatagcttcggcattattggcataataatgctagtggggtggctgttagggaaagacatactggaaatgttcacaatttccgtttccctcgcagttgctgctatccccgaaggattgcccatcgtggttacggttactcttgcccttggcgtgatgcgcatggtcaagaaaagggccattgtgaagaagctgcctattgtcgagacacttggctgttgcaacgtgatttgcagcgataagaccgggacactgaccaagaacgaaatgactgttactcacatattcacgtcagatggtctgcacgcagaagtaactggtgtggggtataaccagttcggtgaggtcatagtggatggcgacgtggttcatggattctataatccagccgtatcccggatagtagaagcaggatgcgtatgcaacgacgccgtgatccggaataacacacttatgggaaaacccactgagggggcactaatagctctcgcaatgaagatggggctggacgggctccagcaagattatatcagaaaggcagagtaccccttttcctcagaacagaagtggatggcagtcaagtgtgtgcacaggacccaacaagatcgccctgagatctgttttatgaagggcgcctatgagcaggttatcaagtattgcactacttaccagtcaaaggggcagactcttacattgacccagcagcagagagacgtgtaccagcaggagaaagctcggatgggcagcgcggggctgcgggtcttagccctcgcaagcgggcccgagctcggacagctgacttttcttggtttggtgggaattatagacccacccagaacaggagtcaaggaagctgtgaccaccctcatcgctagcggggtctccataaagatgataactggcgattctcaagaaaccgctgtcgccatcgcctctaggttggggctatatagcaaaacttctcagtcagtgagtggcgaggaaattgacgcaatggatgttcagcagttaagtcagattgtgcccaaagtcgccgtgttctaccgggcttccccccgacacaagatgaagataatcaaatctctacaaaaaaacggctctgtcgtcgccatgactggagacggcgttaatgatgctgtcgccctcaaggccgctgatattggcgttgccatggggcagacaggcacagatgtgtgtaaggaagccgccgatatgattctggtagatgatgattttcagaccatcatgagcgcaattgaagagggaaaagggatatacaacaatattaagaattttgtgcgtttccagctgtccacttccattgcagctttgacactcatcagcctggcaactttaatgaacttccccaaccccctaaacgccatgcagatcctgtggataaatattatcatggatggcccgcctgcccagtccctgggcgtcgagccagttgataaggatgttatccgcaaaccacccaggaattggaaggacagtattcttaccaaaaacttgattctgaagatcctggtgtcctccattattatcgtttgtggtacgttgttcgtgttctggcgggagttgagagacaatgtaattaccccccgtgacacaacgatgacttttacatgtttcgtcttttttgacatgtttaacgccctgagttcccggtcgcagacaaaatctgtatttgaaattggattgtgctcaaatagaatgttctgttacgccgttcttggctccataatgggccagcttctcgtgatttactttcctccgctccagaaagtatttcagacagagtcactgagtatcctcggtttggccctgggcgaggaatggaccgctgcaggatag

SEQ ID NO: 179791 - DNA, 2877 bp, synthetic construct
  misc_feature 1..2877: note = Description of Artificial Sequence: Synthetic coding sequence
  source 1..2877: mol_type = other DNA
aaggtggcccggttccagaagatccccaacggcgagaacgagaccatgatacccgtgctgacctccaaaaaggccagcgaactgccagtgagtgaggtggccagcatcttgcaggcggatttacagaatggactcaacaagtgcgaagttagtcacaggagagcatttcacggttggaatgagtttgatatctccgaggacgagcccttgtggaagaagtacatctcccagtttaagaatccgctcattatgctgctgctcgcatctgctgtaatcagtgtgttgatgcaccagttcgatgacgcagtatccattacagtagctattctcatcgtggtcacagtggcttttgtccaggagtatcgttccgaaaagagcctcgaagaactgtcaaaactcgtgccacctgaatgccattgcgtcagggaaggaaaactggagcataccctggctagagacctcgtacccggagacaccgtttgcctctccgtgggggaccgggtgccagcggatttgcgcctcttcgaagctgttgaccttagtatagatgagtcctctctgaccggagagacaacaccatgctccaaggtcaccgctccacagcccgcagcgaccaacggggacctcgcatccagaagtaacatagcatttatgggtacattagtaagatgcggaaaggcaaagggcgtggtgattgggacgggcgagaattccgagttcggggaagttttcaaaatgatgcaggcagaggaggcacccaagacacccctccagaagtcgatggacctgcttggcaaacagttatccttctactcatttggaataatcggcataataatgctggttggatggcttctgggcaaggatatactcgagatgtttacaattagcgtttcactggctgtcgcggctatccccgaagggctgcctatagtggtgacggtcactttggcgctcggcgtgatgcgcatggtcaagaaacgagcgatcgtgaaaaagcttccgatagtcgagactctggggtgttgtaacgtaatatgttccgataaaacaggaaccctcactaagaacgagatgactgtaacgcacatcttcacgtccgatggtctgcatgccgaagtgactggggtgggatacaatcagttcggagaggtgatagttgacggggacgtagtgcatggattttacaaccctgccgtctctcgaattgtggaggccggctgcgtgtgtaatgacgccgtgattagaaataacactctcatggggaagcctacagaaggcgccttgatagctcttgctatgaagatgggacttgacggtctacagcaagattacattcgcaaggccgagtaccctttctcctcagagcagaaatggatggccgttaagtgcgtgcaccgcactcagcaggaccgccctgaaatctgtttcatgaagggggcctatgaacaagtaatcaaatattgtacgacttaccagtccaaaggccaaactttaactttgacccagcagcagcgcgacgtgtatcaacaggaaaaagctaggatgggttccgcgggactacgggtgcttgccctcgcatcaggacctgaattaggacagttgacattcctgggtctcgtgggaattatagacccgccccgcaccggcgtgaaggaggctgttacgactctcatcgcatccggtgtgtcgattaagatgattaccggggactctcaggaaaccgcagttgcgatcgcgtccagactgggactctactccaagactagccagagcgtctctggggaggaaatcgatgctatggacgtccagcagctatcccagatcgtccctaaagtcgccgtattctaccgggcttcacccagacataagatgaaaattataaagagtctccagaaaaatggcagtgtggtcgcaatgacaggcgatggcgtgaacgacgctgtggccctcaaagccgcagacatcggagttgccatggggcagaccggaaccgacgtatgcaaagaagcagctgatatgatattagtagatgacgactttcaaaccattatgtcagccattgaagagggtaagggaatttataacaacataaaaaacttcgttaggtttcagctgtcaacaagtatagccgccttgaccttgatctccctggcgacgttgatgaatttccctaatcccctcaatgctatgcagatcctttggataaacatcatcatggatggaccacccgctcagagcctgggggtagagcccgtggataaagatgtgataagaaagccccctagaaattggaaggatagcatcctaacgaaaaaccttatcctgaaaatcctagtgtccagtataattatcgtgtgcggcacactatttgtcttttggcgcgaactgcgcgacaacgtgattacaccccgtgatacgacaatgaccttcacctgttttgtattctttgacatgttcaacgctctgtcctctaggtcccaaacaaaaagcgtgttcgagattgggctgtgcagtaataggatgttctgctatgcagtcctgggctccatcatgggccagctgttggtcatctacttcccacccctgcagaaggtgtttcagaccgaaagtctgagcatcctggacttgctgtttcttttggggctgacctcctccgtctgcatcgtggccgaaattattaagaaggtggagcgaagtagagagaagatccaaaaacacgtgtcctcgaccagttcttcatttctggaagtgtccagttcatcgggcaacttcgtggccgtgtggctttgggagcgaagcggacagcagctcgtcgagattcatccccacctggagacaggcctgccgctcacagaagatgtcagctgtgtgtag

SEQ ID NO: 179792 - DNA, 2850 bp, synthetic construct
  misc_feature 1..2850: note = Description of Artificial Sequence: Synthetic coding sequence
  source 1..2850: mol_type = other DNA
atgaaggtggcccggttccagaagatccccaacggcgagaacgagaccatgattccagtcctgaccagcaagaaagcatctgagcttccagtgagcgaggtggcaagcatcttgcaagcagaccttcagaatggactcaataaatgcgaagtgagccatcgcagagcgtttcacggatggaacgagtttgacatctctgaagatgaaccgctctggaaaaagtacatctcgcagttcaagaatcccctgattatgctcttactggcaagtgcggtcatctctgttctgatgcatcaattcgacgatgctgtgtctattaccgtggcaattttgatagttgtgacggtcgcctttgttcaagagtatagatctgaaaagagtttagaggagctttctaaactagtgccccctgagtgccattgtgtgcgagagggtaaactggaacacaccttagcacgggatttagttcccggcgatacagtgtgtttaagcgtgggcgaccgcgtgccagctgacctcagactcttcgaagccgttgacctttccattgacgaaagctccctaacaggtgagacgaccccttgtagtaaagtgaccgcaccccaacccgccgctactaacggcgacctagcttctaggtctaacatagccttcatgggaactctggtaagatgtggaaaggcaaaaggagtggtcattggaactggcgagaactccgagttcggggaagtcttcaagatgatgcaggccgaggaggcacccaagacgccattacaaaaaagcatggacctcctgggaaaacagctgtccttctattccttcggtattatcggcattatcatgctggtgggctggctgctcgggaaagatattctcgaaatgtttactatctctgtcagtttggccgttgcagcgatacccgaaggcctgccaatcgtggtgactgtgactctagcactaggcgttatgaggatggtcaagaagagagctattgtaaaaaaattgcctatcgttgagaccctcggatgctgtaacgtcatatgctcggataagaccggtactctgaccaagaacgagatgacagtcacgcacatctttaccagtgatgggctgcacgctgaagttactggggtaggctacaaccagttcggcgaggtgatcgtcgacggagatgtggttcatggcttttacaacccagccgtatctaggattgtggaggccggctgcgtatgcaatgatgctgttattcgtaataataccttgatggggaagcctacggagggggccctcatcgctctcgccatgaagatgggcctggacggccttcaacaagactatatccggaaggcagaataccccttttctagtgagcagaagtggatggcggttaagtgcgtgcataggacccaacaggatcggcccgagatctgtttcatgaagggcgcctacgagcaggtgattaaatactgtactacatatcaatccaagggacagacattaacgttgacgcagcagcagcgtgatgtctaccagcaggagaaggcacgtatggggtcggccggcctgcgagtgttggcccttgcttccggtcccgaacttggacagctaacattcctgggcctcgtgggaatcatcgacccgccgcgcaccggcgtaaaagaagcggtaaccaccctgatcgcctctggcgtgagtatcaagatgatcactggggactcacaggaaacggctgtagcaattgcatcacggctaggactgtactctaagactagtcaaagtgtttcaggcgaggaaatcgacgccatggatgtccaacagctgagtcaaattgtaccgaaagtggcagtgttctaccgcgcttcgccccgtcacaagatgaaaatcattaagtcgcttcaaaagaacgggagtgtcgtggccatgacaggagatggcgtgaacgatgcagttgcactcaaagccgccgacattggcgtcgccatgggccagaccgggactgacgtttgtaaggaggcagctgatatgatcctggttgacgacgactttcagacaattatgtctgcgatcgaggaaggcaagggtatatataataacattaagaattttgtcaggtttcagctgtcaacctccattgccgccctcaccctgatctcccttgcaaccctaatgaatttcccgaaccccctgaacgccatgcagatcctgtggatcaatattataatggacggacctcccgcccagagtctcggggtggagccagtagataaggatgtgattcgcaagcccccacggaactggaaggacagcattctgaccaaaaatctgatcctgaaaattctcgtgtcatccatcatcattgtgtgtggaactctgttcgtgttctggcgagaattacgcgataatgtcataactccaagagataccactatgacctttacatgctttgttttcttcgacatgttcaatgcactgtccagtaggtcacagaccaaaagcgtgttcgagatcggcctgtgtagtaatcgaatgttctgctacgctgtgctgggctctattatgggtcagctgctagtgatttattttcccccattgcaaaaggtctttcagaccgaatcgctgtctatattggatctgttattcctcctgggtctcacaagtagtgtgtgtatcgtcgccgagatcataaaaaaggtagagagatcccgcgagaagatccaaaaacacgtcagcagtacctccagttcctttttagaggtttggctgtgggagcgaagcggccagcaactcgtggagatccacccacatctcgagaccggactccctttgacggaggatgtgtcctgcgtgtag

SEQ ID NO: 179793 - DNA, 2922 bp, synthetic construct
  misc_feature 1..2922: note = Description of Artificial Sequence: Synthetic coding sequence
  source 1..2922: mol_type = other DNA
atggacagcctgctgccccccagccggttcagctacttcaagaagtatcctctccatgctattcggcgctacctcagtacactgagaaaccaacgagccgaggagcaagtagctcggttccaaaagatcccaaacggggaaaacgagaccatgatccccgtactgacttcgaagaaagcgtcggaactgccagtttctgaggtcgccagtatacttcaagcggacctgcagaatgggcttaataaatgtgaagtgagccaccgccgggcattccacggatggaacgaattcgatatctccgaagatgagccattgtggaaaaagtacatttcacagttcaaaaatcccctcatcatgcttctcctcgcctctgccgtgattagcgtgctgatgcaccagtttgatgacgctgtgagcatcacggtggctatcctcatcgttgtcactgtggctttcgtgcaagaataccggtcagaaaagtctctcgaggagttgagtaaactggtgcctccggagtgtcactgtgtccgcgaaggaaagttggagcacaccttggcacgtgatcttgtgccaggagataccgtgtgcctgtcggtgggggacagagtgccagccgacctcaggctgttcgaggcggtcgatctgtccatcgacgagtcttccctgacaggcgagaccaccccttgttcaaaagtgaccgccccacagccggctgccaccaatggagacctggcttctaggtcgaatatcgccttcatgggcaccttagttaggtgcggtaaagctaaaggcgtcgtcatcggaaccggagagaactcagagtttggagaagtctttaagatgatgcaggccgaagaggcccccaaaactcctttacaaaagtcgatggatctgctgggcaagcaactgagcttttatagtttcggtattattggaatcattatgctggtgggttggctattggggaaagatatactggaaatgttcactataagcgtaagcctggccgtcgccgccattcccgaaggtttgcctatcgtagtcaccgtgaccctggcattgggcgtaatgaggatggtgaagaagagagccatcgttaagaaattgccaattgttgaaacattgggctgctgtaacgtgatttgttctgacaagacaggtactttgaccaagaacgaaatgaccgttacacacattttcacttcagacggtctgcacgccgaggttactggcgtcggctacaaccagttcggcgaggtcatcgtagatggggatgtggtgcacggattctataaccccgccgtttctcgcattgtcgaagctgggtgcgtgtgcaatgacgctgtgatcagaaataatacactgatggggaagccgactgaaggagccctgatcgctctggccatgaaaatggggctggatggcctgcagcaggactacatcaggaaagcagagtaccctttctcctccgaacagaagtggatggcggtaaagtgcgtgcatagaactcagcaggaccgtcccgagatctgttttatgaaaggcgcttacgagcaggtgatcaagtactgtactacgtaccagagtaaaggccagaccctgacattgacacaacagcagagggatgtgtaccagcaagagaaggcaagaatgggatctgccgggctccgagtgctggcacttgcctctgggcctgaactcggtcagcttaccttcttaggtctggtgggaattatagacccaccaaggaccggcgtgaaggaagctgttacaactctaattgcaagcggcgtttctataaagatgattacaggcgattcccaggaaactgctgtcgctatagcctctagactgggactgtactcaaaaacatctcagtccgtctccggggaagagatagacgcgatggacgtgcaacagttgagtcagatcgtccctaaagtggcggttttctatcgcgcaagtcctcggcataaaatgaagataattaagtcactgcagaagaacggatcggtggtggctatgactggcgatggtgtgaatgatgccgtcgctctgaaggcagccgatatcggtgtggccatgggacagaccggtaccgacgtgtgtaaggaggcagctgatatgatactcgttgatgacgacttccaaaccataatgagcgccatagaagagggaaagggtatatataacaacattaagaacttcgtcagattccagctgagtacaagtattgcagccctgaccctgatcagcctagccactttaatgaacttcccgaaccccctgaacgctatgcaaatactatggatcaacatcatcatggacggcccaccagcgcagtccctcggggtggaacctgtagacaaggatgtcatcaggaagccaccacgcaattggaaagactccattctgactaaaaacctgatactcaagatattggtgagctcaatcattatagtctgcggcaccctcttcgttttctggcgcgagctaagagacaatgtcattacccctcgggatacaacaatgactttcacatgttttgtgttctttgacatgtttaatgccctcagcagtaggagtcagactaaatctgtgtttgagattggtttgtgctctaatagaatgttttgttatgccgtgctgggcagcataatgggacagctcctggtgatctatttccctcccttgcagaaggtctttcagactgagtctctgtccatccttgatctcctgtttctcctgggcctcacatcatccgtgtgtattgtcgcggagataatcaaaaaagtcgaaaggagccgggagaaaattcagaaacatgtgtggttgtgggagcgctcaggtcaacagctggtggaaattcacccccacctggagacagggctacccctgacggaggacgtgtcatgcgtatag

SEQ ID NO: 179794 - DNA, 2820 bp, synthetic construct
  misc_feature 1..2820: note = Description of Artificial Sequence: Synthetic coding sequence
  source 1..2820: mol_type = other DNA
atgaaggtggcccggttccagaagatccccaacggcgagaacgagaccatgatacccgtgctgacgtccaaaaaagctagcgagctccccgttagtgaagtcgccagcatcctgcaggccgacctgcagaacggacttaataagtgcgaagtgagtcacaggcgtgctttccatggctggaatgagtttgacatctctgaggatgaaccactgtggaaaaagtacatcagtcaattcaaaaatccgctgatcatgctgctactagcttccgcggtaattagcgtgctgatgcaccagttcgatgacgcagtatcgatcaccgtagccatattgatcgtggtgaccgtggccttcgtgcaagaatatcgcagcgagaaatccctggaagagcttagcaaactcgtccctcctgaatgccactgcgtacgggagggtaagctggagcatactctcgccagagacctggttcctggcgacacagtctgtctctcagtgggggacagagttcccgccgacctccggctgtttgaggcggttgatctcagtatcgatgagagttcactaacaggagaaactactccgtgctcaaaagtgactgcaccacagccagcggctactaacggagacttggcctcacgttcaaacattgcttttatggggaccctggtaaggtgtgggaaagcaaaaggcgtggtcataggtactggagagaacagcgagtttggagaagtcttcaagatgatgcaggcagaggaggcacctaagactcccttgcagaaatctatggacctgctggggaagcagctcagcttttattcattcggaattatcgggatcatcatgctggtgggttggctgctgggtaaggatatacttgaaatgtttaccatcagcgtgagcctcgccgtagcagccattcctgaagggctgcccattgtggtgactgtcaccctggcactgggtgtgatgcgcatggtgaagaaaagggccatagtgaagaaactacctatcgtggaaacattgggatgctgtaatgtgatttgtagcgacaaaaccggaacgctgactaagaatgaaatgacagtaacccacatattcaccagcgatggtctgcacgcagaggtcaccggggtggggtacaatcaattcggcgaagtgatcgtggatggtgatgtggtgcatggcttttacaaccccgctgtctctcgaattgttgaagccggctgcgtttgcaacgacgcggtgatccgcaataacactcttatggggaaacccacggagggtgctctcatcgcactggcgatgaaaatgggcctggacgggttgcaacaagattacattcggaaagctgagtaccctttttccagtgagcagaagtggatggccgttaaatgcgtgcatagaacccagcaggacagaccggagatctgcttcatgaagggggcctacgagcaggttatcaaatactgtacgacataccagtctaaggggcagacgctgaccctgacccagcagcagcgcgacgtttatcagcaggaaaaggcccgtatggggagtgcgggcctgagggtgctggccctggctagtggtcctgagctgggtcagctaacatttctcggcctcgtgggcattatcgatccacccaggactggcgtcaaggaagccgtaacaactctcattgcctctggagtgagtatcaagatgataacgggagattcacaagagaccgcagtggctatcgccagccggctgggcctctatagtaagacaagccaatcagtaagcggcgaggagattgatgcaatggatgtccagcagttatcccagattgtaccgaaagtcgcggtgttctaccgagcgtcaccaaggcataaaatgaagatcattaaatccctccagaagaatggtagtgtagtagctatgaccggcgacggtgtgaacgatgccgtggccctgaaggctgcagatatcggggtggctatggggcaaacgggaacagatgtgtgtaaagaggccgctgatatgattctagttgacgacgattttcagaccataatgagtgctatcgaggagggaaaaggcatttacaacaacattaagaactttgtgagatttcagctcagcaccagcattgccgccctcaccctcatcagcctggcaacgctaatgaactttcccaatcccctgaacgctatgcagattctgtggatcaacatcataatggacggccctccagcacagagccttggcgtggagccggttgataaggatgtgatccggaagcccccaaggaattggaaagactctatcctcacgaagaatcttattcttaagattcttgtgagctcaatcatcatcgtttgcggtaccctgtttgtgttctggcgtgagcttcgtgataacgtcatcacgccccgagacacgacaatgacatttacctgtttcgtcttttttgacatgtttaatgcattgagctcacgcagccaaaccaagtctgtgtttgagattgggctgtgcagcaaccgcatgttttgttatgccgtcctcggcagcattatggggcagcttcttgtgatttatttcccacctttacagaaggttttccagacggagagcttgtccatcctcgacctcctctttcttttgggtttgacgtccagcgtgtgtatcgtggcagagattatcaagaaggtagagaggtcacgtgagaagatccagaaacacgtgtggctgtgggaacgctcaggccagcagcttgtagaaatccacccccacctcgagactggccttcccctcacggaagacgttagctgcgtgtag

SEQ ID NO: 179795 - DNA, 2760 bp, synthetic construct
  misc_feature 1..2760: note = Description of Artificial Sequence: Synthetic coding sequence
  source 1..2760: mol_type = other DNA
atgaaggtggcccggttccagaagatccccaacggcgagaacgagaccatgattcccgtgctgacgtctaaaaaggcatcagaactgccagtctctgaagtagcgtcaatcttacaggccgacctacagaacggcctcaacaagtgtgaagtgtctcacaggcgggcattccacggttggaacgagttcgacatttcagaggatgagcccctttggaaaaagtatatctcacagtttaagaatccgctcatcatgctgctgctggcctccgcggtaatcagcgtcctgatgcaccagttcgatgacgccgtatctattactgtggccatcctaattgtcgtcacagtcgcgttcgtccaggagtaccgatccgaaaaaagcctagaagagctgagcaaattggtaccacccgaatgtcattgcgtgcgggagggcaaactggagcatacactggcacgtgacctagtacccggcgacacagtctgcctgagtgtcggggatcgggtacccgctgatctgcgactttttgaagccgtggacttgagcattgatgagtccagcctcactggcgagaccaccccatgtagtaaggtaacggccccccagccggctgcgactaacggggatctggcaagccggtccaacattgcctttatgggcaccttggttagatgcgggaaagcaaagggcgtggtgattggtaccggcgaaaattcagagttcggcgaggtttttaagatgatgcaggccgaggaagcccctaaaactccgctgcagaaaagtatggacctgcttgggaagcagctgagcttttacagtttcggcatcatcgggatcattatgctggtggggtggctacttggcaaagacattttagagatgtttacgatcagcgttagtctggcagtcgcagccattcccgaagggctgcctattgttgtcactgtcacacttgctcttggggtcatgaggatggttaagaagagggctattgtcaagaaacttccgattgttgaaaccctcggctgttgcaatgtaatctgctcggataagaccggcactttaacgaaaaacgaaatgacagttacccacattttcactagtgatggcctccacgcggaagttacgggcgtaggatataatcaatttggggaggtgattgtcgatggcgacgtcgtgcacggtttctacaatcccgctgtatctagaattgtggaagcaggctgtgtctgcaatgacgcagtcatccggaataacaccctcatgggaaagccgaccgagggcgccctgatcgcattggccatgaagatgggcctagacggtttacagcaagactacattaggaaggccgagtacccatttagctctgagcagaagtggatggccgtgaaatgcgtacaccgaacacagcaagaccggcccgaaatctgtttcatgaagggtgcatatgaacaggtgatcaaatattgtaccacctatcagtcaaaggggcaaacattgaccctgacccagcaacagagggacgtctatcagcaggagaaagcacggatgggatcagcgggattgagagttcttgccctcgcttcagggcctgaactgggacagttgacttttcttggattggtcggcatcatagatcctcctcgcacgggggtgaaggaggcggttacaactctgatcgcctcgggtgtgtctattaaaatgataaccggcgatagtcaggagacggctgttgccatcgcatcccggctgggcctgtactccaagacctctcagagcgtgagcggagaggaaatcgatgccatggacgttcaacagcttagtcaaatcgtaccaaaagtcgccgtgttctaccgagcctccccaaggcacaagatgaagatcatcaagagtctacaaaaaaacgggtccgtcgtggccatgacaggcgatggcgtcaacgatgccgttgccctgaaggccgctgatataggcgtggccatgggccagaccggaactgacgtctgtaaggaagccgctgatatgattttggtagacgacgacttccagaccatcatgagcgccatagaagaggggaaaggtatttataataacattaagaactttgtccgctttcagcttagcaccagcatcgccgccctgaccctgatttccctggccacactgatgaattttcctaaccccctcaacgcaatgcaaatcctttggataaacatcatcatggacggacctccagcccagtccctcggcgtcgaacccgttgataaggacgtgatcaggaagccaccaagaaactggaaagattctattcttacaaaaaacttaattctcaagattttggtgtcaagtataataatcgtctgcgggacactctttgtcttttggagagagctcagagacaacgtcattacgccaagggacactactatgacctttacttgttttgtgttttttgatatgttcaacgcattatcttcacgatctcagacgaagtcagtctttgagataggtctttgtagtaatagaatgttctgttacgcggtcctgggctcaatcatggggcagctgctcgtgatatactttccccccttacagaaagtgtttcagacagaaagtctgtccattcttgatctgctgtttctcctgggtttaacttcaagcgtttgcatcgttgccgaaatcattaagaaggtcgaacgatctcgcgagaagattcaaaagcatgtgagctccacatcgagctcttttttggaggtttag

SEQ ID NO: 179796 - DNA, 2712 bp, synthetic construct
  misc_feature 1..2712: note = Description of Artificial Sequence: Synthetic coding sequence
  source 1..2712: mol_type = other DNA
atgatccccgtgctgaccagcaagaaggccagcgagctgcccgtgtccgaagtcgcaagtatcctccaggccgacttgcaaaatggtctgaacaaatgtgaagtgagtcaccgaagagctttccacggctggaacgagtttgacatttcagaggacgagcctttgtggaaaaagtatatcagccagtttaagaatcccctgatcatgctcctcctggcctcagcagtaatcagtgtgctgatgcaccagttcgatgacgcagtgtcaatcacagtggcaatcctaatagtggtgaccgtagcctttgttcaggaatatcggtctgaaaaatctttggaagagttatcaaaactcgtaccacctgagtgccattgtgtgcgagaaggaaaactagagcataccctcgctagggacctagtgccaggtgataccgtgtgtctgtctgtgggtgatagggtcccagccgacctcaggttgtttgaggctgtggaccttagcatcgacgagagttcgctcaccggagagaccactccctgttccaaagtcactgccccacagcctgcggccacaaatggcgatctggccagcagaagtaatattgctttcatggggacgctggttaggtgcggaaaggctaaaggcgtagttatcggtacgggtgaaaacagcgagttcggagaagttttcaagatgatgcaagccgaggaagcccccaaaaccccactacagaagtcaatggacctattaggtaagcagctgtccttctatagcttcggaataattgggattatcatgctggtgggttggctgctcggaaaggacattctagagatgttcaccatcagcgtatcccttgccgttgcagcgattcccgagggtctaccgattgttgttaccgtgaccctggcgctcggagtaatgcggatggtaaaaaagagggcgatcgtgaagaagctgcccatcgtggagaccctgggctgttgcaatgttatttgcagcgataagaccgggacactgacgaaaaacgaaatgaccgtcactcatatctttacaagtgatggcctgcacgcagaggttaccggggtcgggtacaaccagttcggtgaggtgatcgtcgatggtgacgtcgtccatggtttctataatcctgctgtcagtaggatagtcgaagcaggctgcgtctgtaacgacgctgtgattcgcaataatacgctgatgggcaagcctacagaaggagcgcttatagctctggccatgaagatggggcttgatggattacagcaggactacattaggaaggcagagtatccattctcatcagaacagaaatggatggcggtgaaatgcgtccacagaacacagcaggacaggcctgagatttgtttcatgaaaggggcttatgagcaggtgattaagtactgtacgacatatcaatcaaaaggtcagactttaactctcacacagcagcagagggacgtttaccaacaggagaaagccagaatgggatccgctggactgcgagtgctcgccttggctagcggtcccgaactaggtcagctcacattcctcggcttagtgggcatcattgatcccccacggactggcgttaaagaggctgtgactaccctaattgcctcgggggtgtccatcaagatgattactggagactctcaagagactgcagtggccattgcatcaaggctgggcctttatagcaagacaagtcagagtgtatccggcgaggagatcgatgcaatggacgtgcagcagctgagccagattgttccaaaagtggccgtgttctacagagccagcccgcggcacaaaatgaaaatcattaagtccttacaaaagaacggtagtgtggtggccatgactggcgatggagtcaatgacgctgtagctttgaaagctgccgatataggggtggccatgggtcagaccggtactgacgtgtgtaaagaagccgccgacatgatcctagtggacgatgacttccagaccataatgtctgcgattgaggaaggcaagggtatctataataacatcaagaatttcgtcagatttcaattgtcaacatcaattgccgccctgacccttatctcactggccactctgatgaattttcccaaccccctgaatgccatgcagatactatggattaatatcatcatggatggaccgcctgctcagtcccttggtgttgagccagtggacaaagacgtgatccgcaagcccccaaggaattggaaagatagtatcctgaccaagaatcttatactgaaaattctggtgagttccataattatcgtctgtggcaccctttttgtgttctggagagagttgagagacaatgtaataactccacgagatacaacaatgaccttcacatgtttcgtttttttcgacatgtttaacgccctctcatctcgctcccagactaaatctgtttttgagatcggcctatgctctaatcggatgttttgctatgcagttctgggatctattatgggccagctgctcgtgatctactttccgcccctgcagaaagtctttcagacagagtcgctcagcatcctggacctgctctttttattaggcttgacgtcatccgtgtgtatcgtggcagaaatcatcaagaaagtggagcgcagccgtgaaaaaattcagaaacatgtgtcaagtacgagcagctccttcttggaggtctag

SEQ ID NO: 179797 - DNA, 363 bp, synthetic construct
  misc_feature 1..363: note = Description of Artificial Sequence: Synthetic coding sequence
  source 1..363: mol_type = other DNA
atgaaggtggcccggttccagaagatccccaacggcgagaacgagacgatgattccagtactgacctctaaaaaggcctccgagctgcctgtttctgaggtcgctagtatcctccaggctgacctgcagaatggcttgaacaaatgtgaggtgagccacagaagagcctttcatggctggaacgagtttgatataagtgaagacgaacctctgtggaagaagtatatcagtcaattcaagaacccccttatcatgctcctgctcgcctctgccgttattagcgtgctgatgcaccagtttgacgatgcggtcagtattactgtggcaatcctgatcgttgtgaccgtcgcatttgttcagtag

SEQ ID NO: 179798 - DNA, 2712 bp, synthetic construct
  misc_feature 1..2712: note = Description of Artificial Sequence: Synthetic coding sequence
  source 1..2712: mol_type = other DNA
atgatccccgtgctgaccagcaagaaggccagcgagctgcccgtgtctgaggttgccagcattctccaggccgatctgcagaatgggctgaataagtgcgaggttagccataggcgagcattccacggttggaacgagtttgatatctctgaggatgagccattgtggaaaaagtacatcagtcagttcaaaaaccctctgattatgttgctgctggcgtcagccgtcatcagcgtgctgatgcaccaatttgacgacgccgtgtcaatcactgtggcaattttaatcgtcgtgactgttgcctttgttcaagagtaccggtcagagaaatccctagaagaactgtcaaagttggttcctcccgagtgtcattgcgtaagagaaggcaaactggagcacacactggctcgcgacttggtccctggcgacaccgtgtgtctctctgttggggatcgggtacctgctgacctacgactttttgaagcagttgatttaagtattgacgaaagctcactcacaggcgagactaccccttgtagcaaggttacggccccgcagcccgccgcaacgaatggtgatcttgcaagtagatcaaatatagcctttatgggtaccctcgtgcgctgcggtaaggctaaaggcgtggtgattgggacaggtgaaaacagcgagtttggggaagtatttaaaatgatgcaggctgaggaagcccccaagacacccctccaaaaaagcatggaccttctgggcaagcaactgtccttttactcattcggaatcataggcatcattatgttagtgggatggctgctgggaaaagacatcctcgagatgtttacaattagtgttagtttagcagtggccgccatccctgagggactgcctatcgtggtcaccgttactctggccttgggtgtgatgcggatggtgaaaaagagagctattgtgaagaagctaccaattgtggaaacactgggctgctgtaacgttatttgctcagacaagaccgggactttaacaaaaaatgaaatgacagtgactcacattttcacaagtgacggcttacacgccgaggtcactggtgtgggctataatcaatttggtgaggtgattgtcgacggggatgtagtgcacggtttctacaaccctgcagtgagtaggatagttgaagctggctgcgtctgcaacgacgcagttattcgcaataatacactgatgggtaagccaactgagggtgccctgatcgctttggcgatgaagatgggcctggacggactgcagcaggattatatcaggaaagctgaatacccatttagcagtgagcaaaagtggatggctgtgaaatgcgtgcatagaactcaacaggacagacccgagatctgcttcatgaagggcgcgtacgagcaagtgattaaatactgtaccacctaccagtccaagggacagactctaacactcactcagcaacagagagacgtataccagcaagagaaggcccgcatgggcagcgctggcttgagagtactcgccctggcctcagggccagaactcgggcagcttacctttctggggctggtgggcattatagaccctcctcggactggtgtcaaggaagccgtcaccacacttatcgcttccggcgtctctattaaaatgattacaggggactctcaggagaccgccgtggcaattgcgagcaggctcgggctctactcaaagacatctcaaagcgtgtctggtgaagagattgatgctatggacgtgcagcagctatcacagatcgtgcccaaggtggccgtgttttaccgtgcctctccaagacataagatgaaaatcattaagtccctccagaagaacggctccgtcgtcgccatgaccggggacggcgtgaatgacgctgtggctcttaaggcagcagacatcggcgtcgccatggggcagacagggacagatgtgtgcaaggaggctgctgatatgattctagttgatgacgacttccagacgatcatgagtgcaattgaagagggaaaagggatttacaacaatatcaagaactttgtgcgctttcagctgagtacaagcattgctgccctgactcttatttcccttgctacgttgatgaactttccaaaccccctgaacgccatgcaaattctgtggatcaatatcataatggacggcccccctgcccaatcgctgggcgtggaaccagtcgataaagacgtcatccgaaaacccccccgcaattggaaggattctattcttactaagaatctgatcctgaaaatcctcgtgtcaagtataatcatcgtatgcggcaccctgttcgtcttctggcgggaactgcgcgacaatgtaattacacccagggacaccactatgactttcacctgtttcgttttttttgatatgtttaacgcactttccagtcggtcccagacaaagtcagtgttcgaaatcggcctgtgctctaaccgaatgttctgttatgccgtcctggggtccataatgggccagcttctcgttatttatttcccgcctttgcagaaagtatttcaaactgagagcctgagcattttagatctcctctttcttctgggtctgacctcgtccgtgtgtatagtggccgaaatcataaaaaaggtcgaacgatctcgtgagaagatccagaaacatgtttcctctacatcttcgtcctttctggaggtctag

SEQ ID NO: 179799 - DNA, 2772 bp, synthetic construct
  misc_feature 1..2772: note = Description of Artificial Sequence: Synthetic coding sequence
  source 1..2772: mol_type = other DNA
atgatccccgtgctgaccagcaagaaggccagcgagctgcccgtgagcgaggtggcttccatccttcaagccgacctgcagaacggtctgaacaagtgcgaggtatcccaccggagggcattccacggctggaatgagtttgatatcagtgaggacgaacccctgtggaaaaagtatatctcccagttcaagaaccctctgattatgctgctcctcgccagcgccgtgatctcagtgttgatgcatcagtttgacgacgctgtaagtattaccgttgccatccttattgtcgtgaccgtggcgttcgttcaagagtatcgcagcgagaaatccttggaagaactcagtaagttggtgcctcccgaatgccactgcgtcagagagggtaagctggagcatacgctggcgagggacctggtacctggcgatacagtctgcctcagtgtaggcgaccgagttcctgctgacttaaggcttttcgaagctgtggacctgagcatcgacgaaagtagtcttacaggcgagacaacaccttgttcgaaagtgactgctccccaaccagccgccactaatggtgatttggcgtcccggagtaatattgctttcatgggcacactggtgcggtgtgggaaggccaagggcgtggtcataggcaccggcgagaactcggagttcggggaggttttcaaaatgatgcaagcagaggaggctcccaaaactcccttgcagaagtcaatggaccttcttgggaagcagctcagcttttacagctttggcataatcggtattattatgctggtgggctggctactggggaaagacatccttgagatgttcacaatttcagtcagccttgcagttgccgccattccagagggcctgccaattgtggtgacggtgacactcgccctgggtgtgatgagaatggtaaaaaagcgcgcaatcgtgaaaaagttaccaattgttgagacattggggtgctgcaacgtgatctgctccgacaagacaggtaccctgacgaagaacgagatgacagtcacccatatttttacctctgacggactacatgccgaggtgaccggagtgggctacaatcaatttggtgaggtgattgtggacggagatgttgtgcacggattttacaatccggccgtctccagaatcgtcgaagcaggatgcgtgtgtaatgacgccgtgattcgtaacaacaccctaatgggaaaaccaaccgagggcgccttgattgctttagcgatgaaaatgggattggatggacttcaacaagactatatcagaaaggcggagtacccattctccagcgagcagaagtggatggcagtcaaatgtgtgcatagaacacagcaggacagacccgagatctgctttatgaaaggcgcatacgagcaagttatcaagtattgtaccacgtatcaaagcaaaggacagactctgaccctgacccagcagcagagggacgtctaccagcaggagaaggcccgaatgggatctgccggcctcagggtacttgccctggccagtggtcccgagctggggcagctcaccttcctcggactagttgggatcatcgatccacctcggactggggttaaggaggctgtgacaacattaatagcttccggagtctccatcaaaatgatcacaggtgactctcaggaaaccgccgtggcgatcgctagtagattgggtctctactccaaaacatcccaatctgtgtccggcgaagagatcgacgccatggacgtgcaacagctttcgcaaatcgtgccaaaagttgctgtgttttaccgggcctcccccaggcacaaaatgaagattattaaatccctccagaagaatgggagcgtggtcgccatgaccggggacggcgtgaatgatgcagtggcactcaaggcggccgatatcggtgtggctatggggcaaaccggaaccgacgtgtgcaaggaggccgcagatatgatactggtggatgatgacttccagaccatcatgagcgccatcgaggaggggaaggggatttacaataacatcaagaactttgttagattccagctgtccacttcgattgctgctctcacccttatcagcctggccacattaatgaacttcccgaatccactgaatgccatgcagattctgtggattaacatcatcatggatggacccccagctcagtccctcggcgttgaaccagtggacaaggatgtcattaggaaaccacctcgaaactggaaggactcaatactaacaaaaaatttgatcctgaaaattctggtctcttccatcatcattgtgtgtggtaccttatttgtcttttggagagagctacgcgataacgtgatcactcctcgggatacaacaatgaccttcacctgttttgtgtttttcgacatgtttaatgccctttcgagcagatctcaaaccaagagcgtgttcgagatcggtctttgttccaatcgcatgttttgttatgccgtgctcggatctatcatggggcagctgctcgtcatctactttccccctttgcagaaagtgttccaaacagaatccttgtcaatcctcgatttgctttttctcctcggccttaccagtagtgtgtgcatcgtcgcagagattataaagaaagtggagaggagccgcgaaaaaatacagaaacatgtatggctgtgggaaaggagcgggcagcagctggtagagatccacccccacctggagaccgggttgcctctgacagaagatgtttcatgcgtgtag

SEQ ID NO: 179800 - DNA, 249 bp, synthetic construct
  misc_feature 1..249: note = Description of Artificial Sequence: Synthetic coding sequence
  source 1..249: mol_type = other DNA
atgatccccgtgctgaccagcaagaaggccagcgagctgcccgtgtccgaggtcgcgtctatacttcaggctgatttacagaatgggttgaataaatgtgaggtctctcaccgaagggcattccatggttggaatgaatttgatataagcgaggatgagccgctctggaaaaaatatatctcccagttcaagaacccactgattatgctcctactggcctcagcagtaataagtgtgctgatgcattag

SEQ ID NO: 179801 - DNA, 2760 bp, synthetic construct
  misc_feature 1..2760: note = Description of Artificial Sequence: Synthetic coding sequence
  source 1..2760: mol_type = other DNA
atgaaggtggcccggttccagaagatccccaacggcgagaacgagaccatgatcccggtgttgacttctaagaaagctagcgaactgccagtttcagaagtggcgtctattctgcaagcagacctacagaatggattgaacaaatgcgaggtcagccacagacgggctttccatgggtggaacgagttcgacataagcgaagatgagcctctgtggaagaaatacataagccagttcaagaaccccctaataatgttgttgctggccagtgcggtcatttcagttctgatgcaccagttcgacgacgcggtgtcgatcacagtcgcgatcctcattgtagtgactgtcgcattcgtccaggaataccgcagcgaaaagagcctggaggagctctctaagctggtacctccagagtgtcactgcgttcgcgaaggcaagctagagcacaccctcgctcgcgacctagtaccaggcgacaccgtctgcctgagtgtgggcgatcgggtgccagctgaccttaggttgttcgaggctgtcgacctatctattgacgaaagttcactcaccggtgagacaaccccctgtagtaaagtgactgcgccccagccagcagcaacgaatggcgatctggcatctcggtccaacattgcttttatgggaacactcgtgcgatgcggtaaggcaaaaggagtggttattggcacaggtgaaaacagcgagttcggcgaggtgtttaaaatgatgcaagccgaggaagcaccaaagactccccttcagaaaagcatggatctcctcggcaaacagttatcgttctatagttttggtatcattggtattatcatgctcgtgggttggctcctcggaaaggacattctggaaatgtttactatctctgtgtccctggccgtagcggctatccctgaagggttgcctattgtggtgacggttaccctggcgcttggggtgatgaggatggtcaagaagcgagccatcgtgaagaaactgcccatcgtagaaacacttggttgctgcaatgttatctgcagtgacaaaaccggaacactgactaaaaatgaaatgaccgtgactcatattttcacatccgatggcctgcacgctgaggtaacaggcgtgggctataaccagttcggtgaggtcattgtcgacggagacgtcgtgcacggcttttataaccccgccgtaagccgtattgttgaagccggctgtgtctgcaatgatgcagtgattcggaacaatacactcatgggtaagcctacggaaggagcgctgatcgcattagccatgaaaatgggcctggacggcctacaacaggattacattcgcaaggccgaataccctttcagctctgaacagaagtggatggccgtgaagtgcgtccacaggacacagcaggataggccagaaatttgtttcatgaaaggcgcatatgagcaagtcattaaatactgcaccacgtaccagagcaaagggcagacgctgactctgacacagcagcagcgagatgtctatcagcaggaaaaggcaaggatgggatcagccggcttgagggtgctggcgctggcttcaggaccagagttaggacagcttactttcctcggcctagtggggattatagacccaccccgcaccggtgtgaaggaggctgtaaccaccctcatcgcatccggagtgtctattaaaatgattacaggggattcgcaggaaaccgctgttgccatcgcatcccgtctcggcctgtattcaaagacaagtcagtctgtatccggcgaggagattgatgccatggatgtccagcaactatctcagatcgtgccaaaggtggctgtgttttatcgggcttcacctcggcataagatgaagatcattaaaagcctccagaaaaatgggagtgtggtggccatgacaggggacggggtcaacgatgctgtggccttaaaggccgccgacattggcgtagccatgggacaaaccggcactgacgtctgtaaggaggccgctgatatgatactggtcgacgacgattttcagaccataatgtctgccatcgaggagggtaagggcatttacaacaatatcaagaactttgtgcggttccagttgtcaacttctatcgccgctctgacgctcattagcctggccactctgatgaatttcccaaatccactgaatgcaatgcagatcctttggatcaacatcattatggacggaccccctgcccagtcccttggggtggaacctgttgataaggacgtcattaggaagccaccacgcaactggaaagacagcatcttaactaagaatctcatcctgaaaatcttggtgagctcaataatcatagtatgcggcacactcttcgtcttttggagggagctgcgagacaatgttataacccctcgcgatacaacaatgacattcacatgcttcgtgttcttcgatatgttcaatgctctctcctctagatcacaaaccaagtctgtgttcgagattggcctctgttcaaataggatgttctgctacgccgtcttgggttctatcatgggccaattactcgttatatacttccccccgctgcaaaaggtttttcagacggaaagcctgtccattctcgatctgttgttcttattgggcctaaccagctctgtgtgtatagtcgcagagattattaagaaggtcgagcgctcacgagagaaaatccagaaacatgtctcttctacatcctcatccttcctggaagtctag

SEQ ID NO: 179802 - DNA, 309 bp, synthetic construct
  misc_feature 1..309: note = Description of Artificial Sequence: Synthetic coding sequence
  source 1..309: mol_type = other DNA
atgaaggtggcccggttccagaagatccccaacggcgagaacgagacaatgattcctgtcttgaccagcaagaaagcatctgaacttcctgtgtccgaggtggcctccatcctacaagctgacctacagaatggcttaaacaagtgcgaagtgagtcaccggcgggcttttcatggatggaatgaatttgacatcagcgaagatgagccgctatggaagaagtacatctcccagtttaagaacccgttaatcatgctcctcctcgcgtccgccgtgatttccgtactgatgcatcagtttgacgactag

SEQ ID NO: 179803 - DNA, 2760 bp, synthetic construct
  misc_feature 1..2760: note = Description of Artificial Sequence: Synthetic coding sequence
  source 1..2760: mol_type = other DNA
atgaaggtggcccggttccagaagatccccaacggcgagaacgagaccatgattcccgtcctgacatcaaagaaagcatctgagctgcctgttagcgaagtggcgtccattctacaagcggatctgcagaatggtttgaacaaatgtgaggtttcgcaccgccgcgcatttcacgggtggaacgagttcgacatttccgaggatgaacctttgtggaaaaagtatatctcacagttcaaaaatccactcatcatgctactcctggctagcgccgtgatctctgttctgatgcatcagttcgacgatgcggtgtccattactgtggctatactcattgtggtgacggtcgcctttgtacaggagtatcgctctgagaagtcgctggaagagttaagcaagctcgtaccccccgaatgtcattgcgtccgggagggtaagctagagcacactttggccagagacctcgttcctggcgacaccgtatgcttgtccgtcggtgatcgggtgccggctgatctacgacttttcgaggctgtcgacctcagcatcgatgaatcatctttaactggcgaaacgacaccatgttccaaggtaactgcaccacagccggccgcaactaacggcgacctcgcgagtagaagcaatatcgcgtttatgggcacactggttcggtgcggcaaggcgaagggggtcgtcataggaactggcgagaactcagaatttggggaggtttttaagatgatgcaggccgaggaggcccctaagacccctttgcaaaaaagcatggatcttctaggtaaacagctgtctttttattccttcggcatcattgggatcattatgttggttggctggctgctggggaaggacatcctagagatgttcacaatcagcgtttctctagctgtggcggccatccctgaaggcttgccaatagttgttactgtcactttagctctgggtgttatgaggatggttaaaaagcgcgctatcgtgaagaagctcccgatagtagaaacactcggttgctgtaatgtgatctgtagcgataagactggtacattaaccaaaaatgagatgacggtcacacatatatttacttcggatggccttcatgcagaggtgaccggggtcggctacaatcagttcggtgaggtcatcgttgacggcgatgtcgtccatgggttctacaatccagccgtgtctcgtattgtggaagctggctgtgtgtgcaacgacgcagttatacgtaataacacactgatgggcaagccaaccgagggcgccctcatcgcattagctatgaagatgggtctggacggtctccaacaggactatattcggaaggcggaataccccttcagctccgaacagaagtggatggccgttaaatgcgtgcaccgaacacaacaggacaggccagaaatttgctttatgaagggcgcctatgagcaggtaatcaagtattgcacaacctatcagtccaaagggcagacgctgacactaactcagcaacagcgggatgtttatcaacaggaaaaagctcggatgggttccgccggccttcgggtattagccctcgcctcagggcccgagctcggccagctgactttcctgggcctggtcggaattatcgatccgcccagaaccggagtgaaggaggccgtgaccacccttatcgccagcggagtgtctatcaaaatgattaccggtgacagccaggagaccgcggtcgcgatcgctagccgtctcggtctttactccaagacaagtcaatcggtgagcggagaggaaatagatgcgatggacgtacagcagttgtctcaaatcgtgccgaaagtcgcagttttttaccgcgctagccctaggcacaagatgaagatcattaagagccttcaaaagaatggcagtgtggtcgccatgacaggcgacggcgtaaacgatgccgtggcgctaaaggccgcagatatcggtgtggctatggggcagaccggaaccgatgtgtgcaaagaggcggcagatatgatactggtggacgatgacttccagacaattatgtctgccatcgaggaaggaaaaggaatctacaacaacataaagaatttcgtgcggttccagttaagtacaagcatcgctgctctaacactgatctcgttggcaactctgatgaattttcccaatcctttgaacgccatgcagatactgtggatcaacattatcatggatgggcccccagcgcagagcttgggggtcgaacctgtagacaaggatgtcatccgtaaacctcccaggaattggaaagattcaatcctgaccaagaacctgatcctcaagatcttggtgagctctataatcatagtctgtggtaccctattcgtcttctggagagaactccgggataatgtaatcacccctcgagacaccactatgactttcacttgtttcgttttctttgacatgtttaatgcgctttcaagccgctcccagacgaagtctgtgttcgagatcgggttgtgctcaaatcggatgttttgctatgccgtgctcgggtccattatgggtcagctcctggtgatttattttcctcctctgcaaaaagtgttccagaccgaaagcctttcgatcctcgatctgttattccttttgggtctcacctcctccgtgtgcatcgtggccgaaattatcaaaaaggtggagcgatctcgggaaaaaattcagaagcacgtttcttctaccagcagcagctttctggaagtttag

SEQ ID NO: 179804 - DNA, 2772 bp, synthetic construct
  misc_feature 1..2772: note = Description of Artificial Sequence: Synthetic coding sequence
  source 1..2772: mol_type = other DNA
atgatccccgtgctgaccagcaagaaggccagcgagctgcccgtgagcgaggtggcttcgatcctccaggcagatctgcagaacggccttaataaatgtgaagtatcacatcgccgggcatttcacggatggaacgagttcgatatttcagaggacgaacccctgtggaaaaagtacatttcccagttcaaaaatcctcttattatgttgttattggcctctgcagtcatttcagtattgatgcaccagttcgatgacgccgtgtcgattactgtggccatccttatagtggtaacggtggccttcgtccaggagtacagaagtgagaagagtctggaggagttatccaagctcgtccctcctgaatgccactgcgtgcgggagggtaagctggagcatactctggctcgtgacttggtgccaggggatacagtttgtttaagcgtcggtgatcgggtgcccgccgatctaagattattcgaggctgtggatctgtcaatcgacgaatccagcctgacgggtgagactaccccttgttccaaggttacagcaccccagccggctgctactaatggagacctggcgtcacgaagcaatatcgcatttatgggaacccttgtgaggtgcggaaaggctaagggtgtagtgataggtacaggggaaaatagcgagtttggggaggtctttaagatgatgcaagccgaggaggctcctaagacacctttgcagaaatccatggaccttcttggcaaacagctctctttttacagttttggaatcatcggaattattatgctggtcggctggcttctggggaaagacatcctggagatgttcactattagcgtgagtttagctgtagcagccattcctgaggggctgccaatcgtggtgactgttacattagctctcggagttatgcggatggtcaagaaacgtgccattgtaaaaaagctcccaattgttgaaaccctgggatgctgtaacgtgatctgcagtgacaagactggaacccttaccaagaacgaaatgacagtcacccatattttcaccagcgatggactacatgcggaggtcacaggagtcgggtacaaccaattcggagaggtcatcgttgatggcgatgtcgtgcacgggttttacaacccagccgtgagcagaatcgttgaggccggctgcgtgtgtaatgatgctgtgatcagaaacaataccctgatgggtaagcctaccgagggcgcactaattgccctggctatgaagatgggactggacggcctgcagcaggactatattaggaaagcagagtatcctttctccagtgaacagaaatggatggcagtcaaatgcgtccacaggacacagcaggatagaccggagatctgcttcatgaaaggcgcttatgagcaggttattaagtattgtaccacatatcaatccaaggggcagacacttacactcactcagcagcagcgggacgtgtaccagcaagaaaaggcacgtatgggctccgccggcttgcgagtgcttgctctagcctcgggtccggagcttggacaattaacttttctcgggctggtggggatcattgaccctccccggactggcgtaaaggaggccgttactactctgatcgcaagcggcgttagcatcaaaatgattaccggcgatagtcaggagaccgccgtggccatagctagtcgcttgggactgtattccaaaaccagccagagtgtgtccggagaagagatcgatgcaatggatgtgcagcagttgtcccagatagtgcccaaggtagctgtgttttatcgcgcttccccacggcacaaaatgaagataatcaagagtctgcagaaaaatggaagtgtcgttgcaatgaccggggacggggttaatgacgccgtggcactcaaggccgccgatataggagtggccatgggccaaactggcactgatgtgtgtaaggaggccgctgacatgatactggtcgatgacgactttcagaccatcatgagcgcaatcgaagaggggaaagggatttataataatatcaagaatttcgtcagatttcagctcagcacatcaattgctgctctgaccctgatcagccttgccaccctgatgaacttccccaatccactcaatgctatgcaaatcttgtggatcaacatcatcatggacggaccccctgctcagagtctgggggtggagcccgtcgacaaggacgtaattagaaaaccacctagaaactggaaggattctatattaactaagaacctgatacttaagatactggtctcttctattatcatcgtgtgcggaaccttgtttgtgttttggcgggagctccgagacaacgttatcactccacgggacacgacaatgacctttacatgcttcgtgtttttcgatatgttcaatgctcttagtagccgcagccagaccaagtccgtcttcgaaattgggctgtgctccaacagaatgttctgctatgccgtgctcggttcaataatgggacagttgcttgtgatctacttccctccactccaaaaggtcttccagactgaatccttgagcatactggacctgcttttccttcttggcttgacttcctccgtgtgcatcgtggcagaaattatcaagaaagttgagcgtagtagagagaaaatccagaaacatgtttggttatgggaaaggtcaggccagcagttggttgaaatacaccctcacctggagacggggctgccattaacggaggacgtgtcatgtgtctag

SEQ ID NO: 179805 - DNA, 2835 bp, synthetic construct
  misc_feature 1..2835: note = Description of Artificial Sequence: Synthetic coding sequence
  source 1..2835: mol_type = other DNA
atggacagcctgctgccccccagccggttcagctacttcaagaagtaccccctgcacgcaattcgcagatatcttagcacattaagaaaccagagagcggaagagcaggtggctaggttccaaaagatccctaatggtgagaatgagaccatgatcccggtgttgacatctaagaaagcatccgagctaccagtttcagaagtggctagcattctccagtttaagaatccactaatcatgctactgcttgccagtgccgttatctccgtcttaatgcatcagttcgatgatgctgtgtccatcacagtcgccatcctgatcgtcgtaacagtcgcctttgtgcaggaataccggtctgagaagtccctcgaagaactgtcaaaattagtccccccagagtgtcattgtgtgcgagagggaaagttagagcatacgctggcaagggacttggtgcctggtgacacagtttgtctctccgtaggggaccgggttcccgcggatctgcgcttgttcgaggccgtagacctttccattgatgagagcagcctcactggcgagacaaccccatgctctaaagtcaccgcaccgcagccagccgccaccaatggcgatctggcatctaggtctaacattgcttttatggggacattggtgcgctgcggcaaagccaagggagttgttataggcactggcgaaaattcggaattcggggaagtgttcaaaatgatgcaggcagaggaagcaccgaaaacaccactacaaaagagcatggatctacttggaaaacagttgagtttttatagcttcggaatcatcgggataataatgcttgtgggctggctgctcgggaaagatattctcgagatgtttaccatttccgtgtctctggctgtcgcagctatccccgagggccttcccatcgtagtgaccgtgacgctagctctgggggtgatgagaatggtgaagaagagagccattgtgaaaaagcttcctattgtagaaaccctgggatgctgtaacgtcatctgctccgacaagaccgggactttaactaaaaatgagatgactgtgactcatatatttacatccgatgggctccatgctgaagttacaggtgtcggatacaaccagttcggggaagtcattgtggatggtgacgttgttcatggcttctataacccggccgttagtcgcatagtggaggcagggtgtgtgtgcaacgatgctgtgattagaaacaacacacttatgggcaagcctaccgagggagcgctgattgccctggccatgaaaatggggctggatggcctgcagcaagactacattcgcaaggcagaatatccattctcgagcgaacagaagtggatggccgtcaaatgtgttcacagaacccaacaagatcgaccagagatctgttttatgaagggggcctatgaacaggtaatcaagtactgtaccacgtaccagtccaaaggtcaaaccctgacgctgacccaacagcagcgcgacgtgtaccagcaggagaaagcaagaatgggatccgcaggccttcgggtgctggctcttgcctccggccccgagctcggccaactcacttttctcggcctggtcggcatcattgacccacctaggaccggggtgaaagaagcagtgactactctcatcgccagtggcgtgagcatcaagatgatcacaggggacagccaggaaaccgccgtcgctatcgcctctcgactgggactctactctaaaactagtcagtccgtgtcaggagaagagattgacgccatggatgtgcaacagttgtcacagatcgtacccaaggtggccgtgttctacagggcctcccctcggcacaagatgaaaattattaagtctcttcagaagaacggaagtgtggtggctatgaccggcgatggggtgaatgacgcggtggcacttaaggccgccgatattggagtcgctatgggacagactggaaccgatgtatgtaaggaggccgccgatatgatcctggtggatgacgactttcaaacaattatgtccgctatcgaagagggaaagggtatatacaacaacatcaaaaatttcgtgaggttccagctgagtacctccatcgcagctctgacccttatctccctcgctaccctgatgaacttcccaaatccgctaaacgcgatgcagattttgtggattaatatcatcatggatggcccccccgcccagtcactcggggtcgaacccgtggataaggatgtgataaggaagccaccccggaactggaaggatagcattttgaccaaaaacctcatcctcaagatcctggtgagttcaatcattatcgtgtgcgggaccttatttgtgttttggagagagctgcgtgataacgtcatcaccccccgggataccacaatgacattcacatgcttcgtctttttcgacatgttcaatgcccttagttctcgctcccaaactaaaagcgtttttgagattggactctgtagcaatcgcatgttttgctatgccgtgttgggttccatcatgggtcagctgttggtcatctattttccccccctgcaaaaagtatttcagacggagagcttgtcgatactcgacttgctcttcttactgggcttgacctctagcgtctgcattgtggctgagattattaagaaagtagagcgcagtagggaaaagattcaaaagcatgtgagctctacatccagtagcttcctcgaggtgtggctgtgggaaagatcaggacagcaactggtcgagatacatccgcacttggagaccgggctgccattgacagaggacgtctcctgtgtctag

SEQ ID NO: 179806 - DNA, 2841 bp, synthetic construct
  misc_feature 1..2841: note = Description of Artificial Sequence: Synthetic coding sequence
  source 1..2841: mol_type = other DNA
atggtggagggccgggtgagcgagttcctgaagaagctgggcttctccgggggtggccgccagtatcaggctctcgaaaaagatgaggaggaggcgctcatcgacgagcagagtgagctcaaagccattgaaaaagagaagaaggtaacagccctccctccgaaggaggcctgtaaatgtcaaaaagaagacctggcgcgggcattctgtgtagatctgcatactggattatccgagttttctgttactcagcggaggctcgcccacggctggaatgaatttgtcgccgacaattccgagcctgtttggaagaagtaccttgaccagttcaaaaatccgttaattttgctgctcctgggaagtgccctagtctcagtgctcactaaagagtacgaggatgccgtgagtatcgccaccgctgtgctggtggtggttacggtggcttttattcaggaatacaggtccgaaaagtcactggaggaattaaccaaaatggtgcctcccgagtgcaactgcctgagagagggaaaactgcagcatctcctagctcgtgagcttgtacctggtgacgtagtatctctcagtattggcgacagaattcccgcagatatccggctgacagaggtcaccgatctcctggtggatgaatcctctttcactggtgaagctgaaccctgcagcaagacagactcaccccttacaggggggggagaccttactacattgtcaaacatagtgttcatgggaacactggtgcagtacgggagggggcagggcgtcgtgattggaacaggggaaagcagtcagttcggagaagtgtttaagatgatgcaggccgaggaaactcctaaaacccctcttcagaagagcatggatcggcttggtaagcagctgacactgttctcttttggcatcattggcctcattatgctgataggatggagccagggtaagcagctgctgtctatgttcacgatcggggtgtccctagcagtggccgctatccctgaagggttgcctatcgttgtgatggtgacactagtgctgggagtgctgcgtatggcaaagaaacgcgtgatcgtcaagaaactgcccatagtagaaacactggggtgctgttccgtcctgtgcagcgacaaaaccggcactctgactgctaatgagatgaccgttacccaactagtgacttccgacggcctgcgggcagaggtgtccggcgtgggctacgacggccaggggacggtctgtcttttgccatccaaagaggtaatcaaagagtttagtaacgtgtcagtgggaaaattggtagaagctggctgtgtggccaataacgccgttatacggaaaaatgcagttatggggcagcccactgagggtgctctgatggcactcgcaatgaagatggatttatccgacataaagaatagctatatcagaaaaaaagagataccatttagttccgaacagaagtggatggcagtgaagtgctcgttgaagaccgaagaccaggaggatatctactttatgaaaggagctctcgaagaggttatcaggtactgtactatgtataataatggaggaatccccttgcccctcacaccccagcagcgtagcttctgcttgcaagaggagaaaaggatgggctccctaggactgcgcgttcttgccctggcttccggtcccgagctggggaggcttactttcctggggcttgtggggataatagacccccccagggtgggagtcaaagaagccgtgcaggtgctgtccgaaagtggcgtctcggtgaaaatgatcacaggggatgccctggagactgccctcgctataggtcgcaatatcgggctgtgtaacgggaaactgcaagccatgagtggggaagaagtggatagtgtggaaaaaggtgagctggctgatcgggtggggaaggtgtccgtctttttccgcaccagcccaaaacacaagttaaagattattaaggcactgcaggagagcggcgcgatcgtagccatgaccggggacggcgtcaacgatgctgttgccctgaagtctgctgatattggcattgcaatgggacaaacaggaacagatgtgagcaaggaagccgcaaacatgatcctcgtggacgacgacttcagcgcaatcatgaacgcagttgaggaaggaaaaggaatcttttataatatcaaaaacttcgttaggttccagctctctacttctattagtgccctctcactgataaccttgtcaactgtcttcaatctgccttctcccctgaatgccatgcagatcctgtggattaacatcatcatggatgggccacccgcacaaagtctgggggtagagccagtggataaagacgcattccgacaaccaccgagatcagttcgggacaccatcctatccagggccctcatcctgaaaatattgatgagcgccgcgattattatttctgggacattgtttatattctggaaagaaatgcctgaggatagggctagcaccccgcggactaccacaatgacctttacttgtttcgtcttttttgacctctttaatgccctcacgtgtaggagtcagacaaaactcatctttgaaattggattcttgagaaaccatatgtttctgtacagcgtgctcggcagtattctcggtcagctggcagttatttatattcctcccctgcaacgggtcttccagacagaaaatttgggcgctttggaccttctgttccttacagggttggcttcaagcgtctttatcttatccgaattattgaagctctgtgagaagtattgttgttcccctaagcgcgtccaaatgcatcccgaagacgtgtag

SEQ ID NO: 179807 - DNA, 2928 bp, synthetic construct
  misc_feature 1..2928: note = Description of Artificial Sequence: Synthetic coding sequence
  source 1..2928: mol_type = other DNA
atggtggagggccgggtgagcgagttcctgaagaagctgggcttcagcggagggggacggcagtatcaggccctcgaaaaggatgaggaagaggcactcatagacgaacagtccgagctaaaggcaatagaaaaagagaagaaggtgactgcactcccacccaaggaagcgtgtaaatgccagaaggaggacctcgctcgtgctttctgcgtggacctccataccggcctgagtgagttctccgttacacagcggaggttggcccacggctggaacgagtttgtcgcagacaatagcgagccggtgtggaagaaatatcttgatcagtttaagaaccctctcattctgctgctcctgggcagcgccctggtgtctgtcctcaccaaggagtatgaagatgcagtctccattgctacagccgtgctcgtggtggtgaccgtagcctttatacaagaatatcgttcagaaaagtcactggaggaattgaccaagatggtcccccccgaatgcaactgtctgcgggagggaaagttgcaacacctactggcacgcgaactcgtccctggtgacgtagtttctctctccattggcgatcgcatccctgctgacattcgcctcacagaagttaccgatctccttgtggatgagtcatcttttactggcgaggcagaaccttgctcgaaaacagattcccctcttacaggaggaggcgacctaacgaccctgagcaatattgtctttatgggcacactcgtgcaatacgggagaggccagggtgtggtgatcgggactggtgagagttctcagttcggcgaggtattcaaaatgatgcaagccgaagagacccccaaaaccccacttcagaagtctatggacagactggggaagcagctgacccttttttcatttgggatcattggcctcataatgctgatagggtggtcacagggaaaacagttattatcaatgttcacgattggggtgtccctcgccgtcgccgccatacccgaagggctccccattgttgtcatggtcacacttgtgcttggtgtgctccgcatggcaaagaagcgcgtgatagtgaagaaattgcctatcgtggaaactttgggctgctgttcagtgctgtgctccgataaaaccggcaccctgacagccaatgagatgactgtgacgcaactggttactagcgatggcttgcgcgctgaggtgtccggggtcggctacgatgggcagggaaccgtctgtctgctgcccagtaaggaagtaatcaaggagttctcgaacgtgtccgttggtaaactcgtggaggcgggctgtgtggcaaataatgccgttattcggaagaatgctgtcatggggcagccgactgagggggctctcatggccttggcaatgaagatggacctgagcgatatcaagaatagctacatccgaaaaaaggagatccctttctcaagcgagcaaaaatggatggctgtgaagtgttcactcaaaactgaggaccaagaggacatatattttatgaagggggccttggaagaggttattaggtactgcacaatgtataataacggtggtataccccttcctcttacccctcaacagaggtctttctgccttcaggaggagaagcgcatgggttcactcggccttcgagttctggccctagcaagcggaccggagctcggtcgactgaccttcttgggtctggtaggcatcatcgatccgcctagagtgggagtgaaagaggcagttcaagtcttgtcagagagtggcgtatccgttaaaatgattactggcgacgcactggagaccgcactcgctatcggccggaatatcggactttgcaatggcaaactgcaagcaatgtccggggaagaagtagatagtgtggagaagggagagctcgcagacagggtgggaaaggtgtcggtgttttttcgaacaagccccaagcataagctcaagatcattaaggcactgcaagaaagcggcgctatcgtggctatgaccggggacggtgtgaatgatgccgtagccctgaaatcagcagatatcgggatcgctatgggccagacgggaacagacgtgtctaaggaagccgccaacatgatactggtggacgatgatttttcagccatcatgaatgcagttgaagaaggaaaaggtatattctataacattaagaacttcgtccggttccagctgtccaccagcattagtgctttgtcattgataaccctgtcaactgtgttcaacttgcccagcccattgaatgccatgcaaatcttgtggattaacattatcatggacggacctccagcgcagcgtagctcgcaaaagacagaggtatgttgcaccgctgttcggctgggggtcgaggggcgtggggaatctacatgggcgggtcgcgccgggctgggggtggaacccgtcgacaaggatgcctttcggcagccacccagaagtgtgcgtgacacaattttaagccgggctctaatcctcaagatccttatgtctgccgctattattatcagcggaacactgttcatattctggaaggagatgccagaggaccgcgcctccaccccgcggacaacgaccatgactttcacatgctttgtgttttttgacttgtttaacgcactcacttgtcggtctcagacaaaactgatcttcgaaattggcttcttgcggaaccatatgttcctatacagcgtgttaggcagcattttgggacaactggcagttatttacatccctccactgcagcgggtgttccagactgagaatttgggtgctcttgacctgctgtttctgaccggattggccagctccgtattcatattatcggagcttctcaaactctgcgaaaaatactgttgtagccccaagagagttcaaatgcatccggaggacgtgtag

SEQ ID NO: 179808 - DNA, 2388 bp, synthetic construct
  misc_feature 1..2388: note = Description of Artificial Sequence: Synthetic coding sequence
  source 1..2388: mol_type = other DNA
atgcggacccccagcgccagcccccggcagtgcctgagctggagcctgagtccctcctcttccttgcgcgagggcaaactgcagcacctgctggctcgggagctggtgccgggagacgtagttagcctctctattggcgacaggataccagccgacatcagactgacagaggtgaccgacctgctcgttgatgaatccagcttcaccggtgaagctgagccttgtagcaagaccgattcacccctgacgggtgggggcgacctgactactctgagtaacatcgtgttcatgggcacccttgttcaatacggtcgaggacaaggcgtcgtgatcggaaccggtgagagtagccagtttggagaagtgtttaagatgatgcaggccgaagagacaccgaagacaccccttcagaagtcgatggatcggctcggtaaacagttgactctatttagctttgggattattggcctgatcatgctaataggttggtcccaagggaagcagctgctgagtatgttcacgatcggcgtttcactagccgttgccgccatcccagaggggttgccaattgttgtgatggttactctcgtcctgggcgttttgaggatggccaagaagcgcgttatcgtgaagaagctgccaattgtggagacactgggttgctgtagcgttttatgttcggacaagactggcactttaactgcaaacgaaatgacggtgacacagctcgtgacctccgacggtctgagagctgaggtatccggcgtgggttacgatggccagggcactgtctgtctgcttccctccaaggaagtgatcaaagaattcagtaatgtaagtgtcggaaagcttgtggaagctggctgcgtagccaacaatgctgtgatcaggaagaacgccgttatgggccagccaaccgagggggccttgatggcattggccatgaaaatggacctatccgacattaagaattcttacatccgaaagaaggagataccttttagcagcgagcagaagtggatggcagtcaagtgtagcctcaagaccgaagaccaggaagacatttatttcatgaaaggtgcactcgaggaagtgattagatactgtactatgtacaacaatggcggaattcccctgcctctgacaccccagcagaggtcattttgtctccaggaggagaaacgtatgggcagtctgggcctgcgcgtgctggctctggcttccggccctgaactgggaagactaacgtttttgggcctggtaggaataatcgatcccccaagagttggtgtgaaagaggctgttcaagttctctctgagtccggcgtgtcggtaaaaatgatcacaggagacgcgctggaaaccgcactggcaattggtagaaacataggcctgtgtaatgggaagctccaggccatgtctggtgaggaggtagatagcgtggaaaagggggagctcgctgacagggtagggaaggttagcgtttttttccgaacatctccgaagcataagctcaagatcatcaaagccctccaagaatctggtgcgatagtggccatgaccggtgatggcgtgaatgacgcggtggcactgaagtcagctgatatagggatcgccatgggccagaccggcactgacgtatcgaaagaagcggccaacatgatcttagttgacgatgacttcagcgcgattatgaacgcagtggaggaagggaaggggattttttacaacattaagaatttcgtccgcttccagctgtctactagcattagcgcactgtcactgatcacgctaagcaccgtgtttaatctgccttcaccccttaatgccatgcagatattgtggatcaacattatcatggatggtcccccagcacagtccttaggcgtggaacccgtcgacaaagacgcttttcgtcaacccccacgctcagtgagagatactattttaagtagagccctaatattgaagattctgatgtccgctgcgatcatcatctcaggcacacttttcattttctggaaagaaatgccagaagacagggcctccacgccaagaacaacgaccatgacattcacttgctttgttttctttgacctgtttaacgcgttgacatgtcggagccagacgaaactgatctttgagatcgggttccttaggaatcatatgtttctctacagcgtgctaggatccattttaggccaactcgcagtgatctatatccctccgctccagcgagtgtttcagaccgagaatttgggcgcacttgacttactcttcctcactggcctcgctagcagcgtgtttatcttatcagaactgctaaagctttgtgaaaagtactgttgctcaccaaagcgcgtccagatgcacccggaagacgtgtag

SEQ ID NO: 179809 - DNA, 3090 bp, synthetic construct
  misc_feature 1..3090: note = Description of Artificial Sequence: Synthetic coding sequence
  source 1..3090: mol_type = other DNA
atggaggccgcccacctgctgcccgccgccgacgtgctgcggcacttctcagtgaccgctgagggtggtctaagtccagcccaagtcactggagcgagggagaggtacggcccaaatgagctgccttccgaagaggggaaaagtctgtgggagctggtactcgaacaattcgaggatcttcttgtgagaattctgctcttggcagccctagtctccttcgtgctggcctggtttgaggaaggcgaggagactacgacagcttttgttgagcccctcgttataatgcttatattagtagccaacgcgatcgtgggcgtgtggcaggaacggaatgcagaatccgctattgaagcgcttaaagaatatgaacccgagatgggcaaggtgattaggtctgatcggaagggcgtgcagagaatcagggccagagatattgtgcccggagacattgttgaggtggctgttggggacaaagtgcctgccgatttaagacttattgagatcaagtccaccaccctacgggtggatcagagtatcctgactggcgagtccgtctcagtgactaaacatacagaagcaatcccggacccccgcgcagttaaccaggacaagaagaacatgctttttagcggcaccaacatcacatcagggaaggcggtcggggtagccgtggctactgggctccacacggagctgggtaagattagaagccagatggctgcagtggagccagaacgtactcctctacagcgcaagctcgacgagtttggacggcagctgagccacgctatatccgttatctgtgtggctgtgtgggtcatcaacataggccatttcgcagaccccgcccacggggggagttggctaagaggcgctgtttattactttaagattgcggtcgcactggctgtggccgcaataccagaggggctgcccgcggtgataactacctgccttgccctcgggacgcgtaggatggctcggaagaatgccatcgtcaggtctctgcccagcgtggagacactgggctgcacctcggtgatctgttccgacaaaaccgggacgctcactaccaatcagatgtccgtctgtcgcatgttcgtggttgccgaagctgacgcagggtcgtgtcttctgcacgagtttacaatttctggcacaacctatacccccgagggggaggtgcgccaaggggatcagccagtgaggtgcggacagtttgacggcctggtcgagctggcaaccatctgcgctctgtgcaacgactctgcacttgattataacgaggcaaaaggggtgtacgagaaggtgggcgaagccaccgagactgcattaacctgcctggtagagaaaatgaacgtttttgatacagacctgcaagctctgagtagagtggagcgggctggcgcctgcaataccgtcatcaagcaactgatgcgcaaggagttcaccctggagttttctcgcgacaggaagagcatgtcagtttactgtactccgacacgtccacaccccacaggtcaagggagtaaaatgttcgtcaagggggcgcccgagtccgttatcgagcggtgcagtagtgtgcgtgtgggtagccggaccgctccacttacaccaacttccagagaacagatactcgccaaaatccgcgactggggatctgggtccgatacactccgatgcctcgcactggcaactcgggacgccccacccagaaaagaggatatggagctggatgattgttccaaatttgtccaatatgagacagatctgaccttcgtcggttgtgtagggatgctagatccacctagacccgaagttgcggcctgtatcacccggtgctatcaagccggtattcgggtggtcatgataacgggcgataacaaaggcactgccgtagcaatatgccgccggctgggcatattcggagacacagaggacgtcgctggcaaagcgtatacgggtcgcgagttcgacgacctgagccccgaacaacagagacaggcctgcaggaccgcccgatgcttcgcaagagtcgaacctgcccataaaagtcggatcgtggaaaatctgcagtctttcaacgaaattaccgccatgactggagacggggtaaatgacgccccggccctgaagaaagctgaaattggcatagccatgggttctgggactgccgtcgctaagtccgccgccgagatggtactcagcgatgacaattttgcaagcatcgtcgcagccgtggaagaaggccgggccatttacagcaacatgaagcagtttataagatacctgatttcctctaatgttggggaagtagtttgtatctttcttactgcaattttaggcctgccagaggccctgattcctgttcagctgttatgggttaatctagtgacagacggtctgccagctacagctctcggcttcaacccccccgacttggatatcatggagaaacttccacgcagcccgagggaagccctcattagcgggtggctgttctttcgatacttggccatcggagtctatgtcggtctggctaccgtcgccgccgctacttggtggtttgtgtacgacgctgagggccctcacataaacttctaccagctcaggaatttccttaaatgtagcgaggacaaccctctgtttgcagggatagattgcgaagtttttgagtctagatttccgaccaccatggccctgagtgtgcttgtgaccattgagatgtgcaatgctctgaacagtgttagtgagaatcaaagccttttgcgtatgccaccctggatgaacccttggctactggtggccgtggcaatgagcatggctctgcactttctgattctactagtcccgcctctacctctaatcttccaagtaactccccttagcggccgtcaatgggttgttgttctgcaaataagtctcccggtgattctactggacgaggccctgaaatacctctcaagaaatcatatgcatgcttgcctctaccccggactgctccggaccgtgtctcaagcctggtctcggcagcctctgactacttcctggacccctgatcacaccggattggcttcgctgaagaagtag

SEQ ID NO: 179810 - DNA, 3132 bp, synthetic construct
  misc_feature 1..3132: note = Description of Artificial Sequence: Synthetic coding sequence
  source 1..3132: mol_type = other DNA
atggaggccgcccacctgctgcccgccgccgacgtgctgcggcacttctcagtgaccgcggaaggaggtcttagccctgcgcaggtgaccggggcacgagaaagatatgggcctaacgaactgccatcagaggaaggaaaaagcctgtgggagctggttctggagcaatttgaggacctgctggtgagaatcctgctgttggccgctcttgtgagctttgtgctcgcttggtttgaagagggcgaggaaacaacaacggccttcgtcgagcctctcgtcataatgttaattctggttgcaaatgcaattgttggcgtatggcaagagagaaatgccgaaagcgccatcgaagctctcaaagaatacgagccagagatgggtaaagtgattagaagtgacagaaagggtgttcagcgaattcgcgcgcgggacattgtgccgggagacatcgttgaggtcgccgttggagacaaagttcctgccgacctgcgcttaatcgaaataaagtcgactaccctgagggtggatcaaagcattctcaccggcgagtctgtgagcgtgactaaacatactgaggcaattcccgacccgcgggccgtgaatcaggacaagaagaatatgctcttcagtggcacgaacattacttccggcaaggccgtgggagtagccgttgcgaccggactgcatacggaactggggaaaatcaggagccagatggcagccgtggaaccagagcgcacccccctccagaggaagctggacgaattcggccggcagctctctcacgcaatttcggtcatttgcgtggcagtttgggttattaatatcggccactttgctgaccccgctcacgggggatcctggctgcggggggccgtgtactatttcaaaatcgccgtggcccttgctgtcgccgcgattcccgagggtctccctgcagtgattactacatgcctggccctgggcacgcgccgcatggccagaaagaacgccatcgtcagatctcttccgtccgtagagacactgggatgtacctcagttatttgttctgacaaaaccggtacactgacaacaaaccagatgtcagtgtgccgaatgttcgtggtggctgaggcagatgccggttcctgcctgcttcacgagtttactatcagcggtaccacatacacacccgagggggaggtgcgacaaggagatcagcccgtacggtgcggtcagtttgacggcctcgtggaactggctaccatttgcgctctgtgcaacgacagtgcccttgattacaatgaggcaaaaggagtttacgagaaagtgggtgaagctaccgagactgcactgacatgcctagtggagaaaatgaacgtgttcgatactgacttacaggccctgtcacgggtggagcgtgccggggcctgtaacaccgtaattaaacagctgatgaggaaggaattcacgcttgaattctctagagaccggaagtctatgtcagtatattgcactcccacgcgacctcaccccactggtcagggctcgaagatgtttgtaaagggggctcccgaaagcgtcatcgaacggtgcagttccgtgcgcgttggcagtagaaccgcccctctgactcccacgtcccgcgaacagatactggccaaaattcgggattggggatctggctccgacactcttcgatgtctggcgttggccacacgtgatgcccctccaagaaaggaagacatggagttggatgattgttccaaattcgttcaatacgagacagatctgaccttcgtgggctgcgtgggaatgctggacccccctagacccgaggtagccgcctgcattacacgctgttaccaagccgggatcagggtggtgatgatcacgggggataacaagggaactgctgttgcgatttgtcggaggctgggaattttcggggatactgaggatgtggccggtaaagcatataccgggcgggagtttgacgatctgtctccagagcagcaacgacaggcttgccgaactgcccggtgtttcgcacgagtggaaccagctcacaagagcagaatcgtagaaaatctgcagagctttaacgagattaccgcaatgactggcgatggtgtcaatgatgcacctgcgctgaagaaggcggaaatcggcatcgcaatgggcagcggaacagccgttgctaaaagcgctgcagaaatggtcctgtctgacgataacttcgcttccatcgtggccgcggtggaggagggcagagccatctacagcaatatgaaacagtttattaggtatctaatttcatctaatgttggggaggttgtatgcattttccttacggccatccttggcctgccagaggctctgattccagtacaactcctgtgggtgaacctggtgacagacggcctgcctgcaactgccttggggtttaatccgcccgacctggatattatggagaaactgccccgttcaccccgcgaagcattgatttccggatggctgttctttcgctatctcgccatcggcgtctatgtcgggctcgctacagtggcagctgcgacttggtggttcgtctacgatgctgagggacctcacataaatttttaccagttgcggaatttcttaaaatgtagtgaggataatccattgtttgccggtattgactgcgaggtgttcgagagcagattcccaaccactatggcactcagcgtcctcgtcacgattgaaatgtgcaatgctctgaactccgtgtccgaaaaccagagccttcttcgcatgcccccttggatgaacccctggttgctggtcgccgtggctatgagcatggctctgcactttctaatccttttagtaccacctctccctcttatctttcaggttacgcccttgtctggtcggcaatgggttgtggtgctgcagatttctctgcccgtaatcttactcgacgaggccctgaaatacctctctagaaaccacatgcatgcttgtttgtatccggggctgctaagaacagtatctcaggcttggagccgtcaacctctgaccacaagctggactccggaccacacagggcgcaacgagcccgaagtgtctgctggaaatcgcgtagagtcaccagtatgtacatcggactag

SEQ ID NO: 179811 - DNA, 3159 bp, synthetic construct
  misc_feature 1..3159: note = Description of Artificial Sequence: Synthetic coding sequence
  source 1..3159: mol_type = other DNA
atggaggccgcccacctgctgcccgccgccgacgtgctgcggcactttagcgtgacggcagaaggcgggctcagtcccgcccaggtaacgggcgcccgggagcgttatgggcctaacgaactgccttcggaggagggaaaaagcctgtgggagctggttctcgagcagtttgaggacttactggtgaggatattactcctcgccgcgcttgtgtcctttgtcttagcttggttcgaagagggcgaggagacaacgacggcattcgtcgaacccctggttatcatgctcatccttgtagccaacgccattgtcggtgtttggcaggagagaaacgccgagagtgccattgaggctctgaaggagtacgagcctgagatgggcaaggtcataaggtcggatcgtaaaggagttcaacgtatccgggcacgcgacatagtcccaggcgatatcgtggaagtggccgtgggcgataaagtgcctgccgacttgagactgatcgagataaagagcacaacacttcgtgtagatcaatctatactgacaggcgaaagcgtatcagtgacgaaacacacagaggcaattccagaccccagagctgttaatcaggataagaagaacatgctattctccggcaccaatatcacgagcggcaaggcagtcggcgtggcggtggcaaccggcctgcacactgaactcggaaaaatcagatctcagatggccgctgtcgagcccgagcgaacgcccctgcagagaaaactggacgaatttggtcggcaactatctcacgccatcagtgtgatatgtgtcgcggtttgggtgataaacatcggacactttgctgatcccgcccacggtgggtcctggctgcggggagctgtctactatttcaagatcgcggtggccctggcagtagccgcaatccccgaaggattgcccgccgtgataactacttgcctggccctaggaactcggcgcatggctagaaagaatgcaatagtcagaagtctcccatccgtggagaccctgggctgcacctccgtcatatgctctgataagaccggaacattgaccaccaaccagatgtcagtgtgtaggatgtttgtcgtggccgaggctgatgccggaagctgtttgctgcacgaatttactatttccgggactacttacacccctgagggggaagtcaggcagggggaccagccagtgcggtgcggacagtttgacggattggtggagctggctactatctgtgcgttatgtaatgactcagccctggactataatgaagctaaaggggtttacgaaaaggttggtgaagccacggagacagcgttaacttgcctggtcgagaagatgaatgtattcgataccgatctgcaggctttatctagggtggaacgagctggcgcctgcaatacagttatcaagcagctgatgaggaaggagtttacccttgagttttctcgggatcgcaagtcaatgtccgtgtactgcacaccaacaaggcctcatcctaccggtcagggtagcaagatgttcgttaagggcgcccccgagtcagtcattgagcgctgttcgtcagtgcgggtgggatcgaggactgcccccctcacccccacaagtagggagcagatactcgctaaaatcagagattgggggtcgggatctgataccctacgatgtttggctctggcaacccgggatgccccacctcggaaggaagatatggagttagatgattgttctaagttcgtgcagtacgagacagacctcaccttcgtcgggtgtgtaggaatgctcgatccacccagaccagaagtggcagcctgcatcacacgctgctatcaggccggaattcgcgtcgtcatgattaccggggacaataaggggacagcagtggccatctgcaggcgcctcggcattttcggggacaccgaggacgtcgcaggcaaagcctacacaggacgggagttcgatgatctgagcccagagcagcaaagacaggcctgccggacagcaagatgcttcgccagagttgaaccagcccacaaatcgcgcatagtggagaaccttcaaagcttcaatgagataacagcaatgacaggtgatggtgtgaacgacgccccggcactgaagaaagccgagattggtattgccatgggcagcgggacagccgtggccaagtcagcagcagagatggtgctttctgatgataacttcgccagcatagtcgctgcagttgaagagggacgggccatatattctaatatgaaacagtttattcgttacctgatctcctctaatgtgggggaagtcgtgtgcattttcctcacagccatacttggtctcccggaagctctgattccagtgcaactcctgtgggtgaacctcgtgactgacggtctgcctgcaactgctctcggcttcaaccctccagatttagacatcatggagaagctgccccggtcccctcgggaggctctcattagcggatggttattttttcgatatcttgccattggagtctatgtcggtttggccacagtcgccgccgccacctggtggtttgtgtatgacgcggagggtccccacataaacttctatcagctgagaaactttctgaaatgctccgaggataaccccttgtttgcaggcatagactgcgaggtattcgagagcagattccccactactatggccttgtcagtgctcgttacgatcgagatgtgtaacgcgctgaactccgtgtccgaaaatcagagtctgctgcggatgccgccctggatgaatccatggctgctcgtggctgttgccatgagtatggcccttcactttctgatactcctggtcccccccctgcctctgatattccaggtgactcccctttctggtaggcagtgggtggtggtgctgcaaatttcattaccagtgatcctgcttgatgaagcacttaagtacctgagccggaatcatatgcacgcctgtctgtatcccgggctcctgcgcaccgttagtcaggcttggtctcggcaacccctgaccacttcatggactccagatcacacagggctggcctccctcgggcaaggccattctatcgtctccttgagtgaattactccgcgaagggggctcgcgcgaggagatgtctcaaaagtag

SEQ ID NO: 179812 - DNA, 3090 bp, synthetic construct
  misc_feature 1..3090: note = Description of Artificial Sequence: Synthetic coding sequence
  source 1..3090: mol_type = other DNA
atggaggccgcccacctgctgcccgccgccgacgtgctgcggcacttctccgtgacagcagagggcggcctctcaccagctcaagtaactggcgcccgggaacgctacgggccaaatgagctacccagtgaggaaggaaagagtttgtgggaactcgtcctggagcagtttgaagatcttctcgtccgcatcctcctgctggcagccctggtatcatttgtcctcgcatggtttgaggagggcgaagagacaacaacagctttcgtggagccccttgttatcatgctgatcctggtagctaatgcaatagtcggagtgtggcaggagaggaatgccgagtcagctattgaggccttgaaagagtatgagccagaaatgggtaaggtaatccgatccgacaggaagggtgttcagaggattcgggcccgtgacattgtaccgggggatatcgttgaggtcgccgtaggagacaaggtgccagccgatctccgcttaatcgagataaaatccaccaccctgcgagtggatcagtctatcttaactggtgagtccgtcagtgtcacgaagcatactgaggctattcctgaccctcgtgctgtgaatcaagacaagaaaaatatgctgttttccggaactaatatcaccagtggtaaagcagtgggcgtcgctgtggctacgggccttcacacggaactggggaagatccggagccagatggccgccgtggagcccgagcgtacccccctgcagagaaaacttgatgaattcggtagacagctttcgcacgctatcagcgtcatttgcgttgctgtgtgggtaatcaacattggtcatttcgccgaccctgcccacggcggctcctggctgcggggggccgtgtattactttaagatcgcagtggcgctagccgtcgcggcaatcccagagggactgcctgcagtcatcaccacctgtctggccctgggcacacgacgcatggctcggaagaatgccatcgtacgttctcttccttcagtggaaacactcgggtgcaccagcgtgatttgctcggataaaaccggaacactcacgaccaatcaaatgagcgtatgcaggatgtttgttgtggccgaagctgacgccggatcctgtctcctccacgagtttaccatatctggaaccacttatacacctgagggcgaggttagacaaggagatcaacctgttcgctgcggccaattcgatggactggtcgagctggcaacaatatgcgctctgtgtaatgactcggccctggactataacgaagcaaaaggagtgtacgaaaaggtgggggaagcgacagagaccgctttgacatgtctcgtggaaaaaatgaatgtttttgatacagacctccaggccctgtcacgggtggagcgagcgggcgcctgtaatacggtgattaagcagcttatgcggaaggaatttaccctagaattcagcagggatcgcaagtctatgtccgtgtactgtactcccacaagaccccacccaaccggacagggctccaagatgttcgtgaaaggcgctccggagtccgtgatcgagagatgttcctccgtgagggtgggcagtagaactgcaccactgactccaacatcaagggagcagattttagctaagatacgggattggggaagtggttccgatactctgcgctgtctcgccttagccacacgtgatgccccccctagaaaggaagatatggaattggacgattgctcaaagttcgtgcagtatgagactgacttgaccttcgtgggttgtgtcgggatgttagatccccctaggcccgaagttgccgcgtgtataacccggtgctatcaggcaggcatacgagtcgtcatgatcaccggtgacaacaaaggcaccgccgtcgccatctgccggcgtctggggatctttggcgacaccgaagatgtggccggtaaagcatatacagggagggaattcgatgacctgtctcccgagcagcagagacaggcgtgccgtacagccaggtgtttcgcccgtgtagagcccgctcataagagcaggattgtcgagaatctccagtctttcaacgagattacagctatgaccggagacggagttaacgatgcccccgctctgaagaaagcggagatcggcatagccatgggctcgggaactgctgttgcaaagagcgccgccgagatggtgctgtcagacgacaattttgccagtatcgtcgcggccgtagaggaaggccgcgctatttatagcaatatgaagcagttcattcgctacctgatcagctcgaatgtcggggaggtggtgtgtatttttcttaccgcaatcttggggctgccagaagccctgatccccgtgcagctgctgtgggtcaatttggtgacagatggcctcccagccacagctctcggcttcaacccacctgatctggacatcatggagaaacttcctcgctcacctcgggaagccttgatcagcggatggctctttttcaggtacttggctatcggcgtgtacgtggggctggccactgtggcagccgctacctggtggttcgtctatgatgccgagggaccacacataaacttctatcagttaaggaattttctcaaatgtagcgaagacaaccccctgttcgccggcatagactgcgaagtatttgaatcccgcttccctactactatggcactgagcgtgctcgttactatagagatgtgcaatgcgctcaattctgtgtcagaaaatcagagtctcctgaggatgcccccctggatgaacccgtggctgctggtggcagtcgccatgagcatggcattgcattttctgatccttctggtgccacctctacccctgatctttcaagtcactccgctgtccgggcgccagtgggtggtagttctgcagatcagcttgccagtcatacttctggacgaagccctgaagtatctgagcagaaaccacatgcacgcctgcttataccccggccttctcaggaccgtttcacaggcctggagccggcagccactgacaacctcttggacgccggatcacactggattagcctctcttaagaaatag

SEQ ID NO: 179813 - DNA, 651 bp, synthetic construct
  misc_feature 1..651: note = Description of Artificial Sequence: Synthetic coding sequence
  source 1..651: mol_type = other DNA
atggagaagctgccccggagcccccgggaggccctgatcagcggctggcttttctttcgatacttggccatcggtgtctatgtgggactggctaccgtagccgccgctacctggtggtttgtctatgatgccgagggccctcatattaacttctaccagttacgaaatttcctcaaatgctctgaagacaatcccttatttgccggaatcgattgcgaggtcttcgagtcacggttccccaccacaatggccctctccgttctggtgactattgaaatgtgtaacgcactgaactctgtctccgagaatcaatctttgttgagaatgcctccctggatgaatccgtggctgctggtggctgtagcgatgagcatggcattgcattttctgatactgctggtgcccccccttcccttaatctttcaggtgacccctctgtcgggtaggcagtgggtagtggtgctgcagatcagtttgccggtgattttgctggacgaggcgcttaaatatctctctcggaaccacatgcatggaccaggaacacagcatcggctcgcggtcagagctgctcaacggggtcgcaagcaggggcgaaatgagcccgaggtatcggcagggaatcgagtcgaatctcccggccccggcgggtag

SEQ ID NO: 179814 - DNA, 3000 bp, synthetic construct
  misc_feature 1..3000: note = Description of Artificial Sequence: Synthetic coding sequence
  source 1..3000: mol_type = other DNA
atggaggccgcccacctgctgcccgccgccgacgtgctgcggcacttttccgtcaccgcggaggggggcttgagccctgcccaggtcactggtgcgcgggaaaggtacgggcccaatgagttaccctctgaagaagggaagagcttgtgggagctagtacttgaacagtttgaagatctgttggtgcggatcttgctcctagctgcgcttgttagctttgtgctcgcctggttcgaggaaggcgaggagacaaccacagcttttgttgaaccactagtgataatgctgattctggtggccaatgctattgttggtgtctggcaggaacgcaacgctgaatcagcaattgaagctctgaaagagtacgagcctgaaatggggaaggtcatccgctcagacaggaagggcgtacaacgcattagagcccgagatatagttcccggagatatcgtcgaggtcgctgtaggcgacaaggtacccgccgatctgagactgattgagattaagagcacaactctccgcgtcgatcagtcaatcttaacaggggagtccgtcagcgtgactaagcacacggaggcaatccccgatcctagggctgtgaatcaggataagaagaatatgctgtttagcggcacaaacattacgtctggcaaggctgtcggagtcgccgtagctacaggcttacacacggagttggggaaaattcggagtcagatggctgccgttgaacctgaacgcacccccctgcagcggaaattggacgagttcggccggcagctttcccacgccatcagtgtcatatgtgtggccgtttgggtcatcaatattgggcatttcgccgacccagcccatggaggaagctggctgaggggcgcagtgtactattttaaaattgctgtggctctggctgttgcagctatccccgagggcctgcctgcagtgatcaccacgtgtctcgctctgggtacacggcgcatggcaaggaaaaatgccatcgttaggtcactccctagtgtcgagaccctcggatgtacctctgttatttgcagcgacaaaaccggcactttaaccaccaatcaaatgagcgtctgtcgcatgtttgtggtcgccgaggccgacgctgggagctgcctgttgcacgaatttactatatccggtacaacgtacacgcctgaaggagaggttcgccagggcgaccagccggtcaggtgcggacagttcgatgggttagttgagctggccaccatctgtgctctttgcaatgatagtgccttagactataacgaggctaagggcgtgtacgagaaggtgggagaggctacggaaacggcactgacttgtctggtggagaagatgaatgtctttgacacagacctccaagcactttcgagggtggaacgggcaggggcctgtaatacagtgatcaaacagctgatgcgcaaggaatttacacttgagttcagccgagataggaagtctatgtccgtttattgcacccctactaggccacacccgactggccagggaagcaagatgtttgtgaagggcgcgcccgaatctgtgattgagcggtgctctagcgttagagtaggcagtcgtaccgctccgctgaccccgacttctagggaacagatccttgcaaagattagagactgggggagtgggagcgatacgctccgatgcctggcgttagctacccgggatgcacctcctcgaaaggaagacatggagctagatgactgctccaaattcgtccaatacgaaaccgaccttacttttgtcgggtgtgttgggatgctcgacccacccaggcccgaagttgctgcctgtataacccgctgctaccaggcaggcattcgggtagtgatgatcactggagataataaaggcacagcggtggccatctgccgcagactgggaatttttggcgacactgaagatgtggccgggaaagcttacaccgggcgagaatttgatgacctaagccctgaacaacagcggcaggcttgtaggactgccagatgttttgcgcgcgtggagccggctcataagtcgcgcattgtagaaaatctgcagtcttttaatgaaataaccgctatgacaggcgacggcgtgaacgatgcacctgctctcaagaaagcagaaatcggtatcgccatgggctccggcactgccgttgctaaaagcgccgcggagatggtccttagcgatgacaactttgcctccatcgttgcagctgtcgaggagggacgggctatctacagcaacatgaagcaattcattcgctacctcattagtagcaacgtcggagaagtcgtatgcatcttcctaacagcaattctggggctccccgaagcgttaatccccgtgcaactactttgggtgaatctggttaccgacggattaccagctactgccctggggttcaacccacctgatctggacattatggaaaaactgccaaggtcaccacgggaggccctcatcagcggatggctgtttttccgctacttggctataggggtgtatgtgggccttgccacagtcgctgccgccacgtggtggtttgtctatgatgcagagggccctcacattaacttctatcaactgaggaattttctgaagtgcagcgaggacaacccactgttcgcaggtatcgattgcgaagtgttcgagtcacgttttcctaccacaatggccctgtcagtcctcgtgaccatcgagatgtgcaacgctctgaacagtgtctctgaaaaccagtctctgcttagaatgcccccctggatgaacccatggctgttggtggctgtggctatgtccatggccctgcacttcctcatccttctcgttccaccgctgcccctgatattccaagtgacaccactcagcggtcggcaatgggtggtggtcctgcagattagcctaccagtcatcctgctcgatgaggctctcaagtatctgtcgcgcaaccatatgcatgaggaaatgtcacaaaaatag

SEQ ID NO: 179815 - DNA, 2997 bp, synthetic construct
  misc_feature 1..2997: note = Description of Artificial Sequence: Synthetic coding sequence
  source 1..2997: mol_type = other DNA
atggaggccgcccacctgctgcccgccgccgacgtgctgcggcactttagtgtgactgccgaaggggggctgtctcccgcccaggtgacgggagcaagagaacgatatggaccgaatgagttgccatcagaagaggggaaaagcctgtgggaactcgttttggaacagtttgaagatcttctcgttcggattttgctccttgccgccctggtaagctttgtgctggcatggttcgaagagggcgaggaaacaacaaccgctttcgtggaacctttggtcatcatgctcatcctggtggccaatgcaattgtaggagtctggcaggagcgtaacgcagagagcgctattgaagctctgaaagagtatgaacccgaaatgggcaaggtcatcaggagcgaccgaaagggagttcaacgaattcgcgcaagagatatcgttcctggagacattgtggaggtcgccgtcggtgataaggtacccgcggacctccggctgatcgagatcaaatcgaccaccctgcgggtggatcaatctatcctgactggggagagcgtgtctgttactaagcatacagaggctattcccgacccaagggccgtgaaccaagataagaaaaatatgctattctcgggtaccaatataacctctggcaaggcagtcggcgtggctgtagccactggtttgcataccgagctgggtaaaatccgcagccagatggccgctgtagaaccagagcggacacccctacagagaaagttggatgaattcggcagacagctgtctcatgccatttcggtcatctgcgtagcagtctgggtcatcaacatcggtcattttgctgatcctgcccacggaggaagctggcttagaggggcagtgtactattttaaaatcgccgtcgccctggccgtcgccgcaattccagaaggcctccctgcagtgataactacatgcctagccttaggcacaaggagaatggcacggaaaaatgccatcgtccggagcctccccagcgtcgagacccttggttgcaccagcgtgatctgttctgacaaaaccggcaccctcaccaccaatcagatgtcagtctgccgaatgttcgtggtcgccgaagcagacgccggctcatgtttgctccacgaatttaccattagtggtactacatatacccccgagggggaggtcagacagggcgatcaaccagttagatgtggacagttcgacggacttgtcgagcttgccaccatctgtgctctgtgtaatgattctgcactggactacaacgaggctaaaggagtttacgagaaggtaggcgaagcgacagaaaccgccttaacctgcctagtggagaagatgaatgtgttcgacaccgatctgcaggcgctgagtcgcgtcgaaagggccggagcctgtaatactgttattaaacagctgatgcgaaaggagtttaccttggagttttcaagagatagaaagtcgatgagtgtgtattgtacaccaactcggccccacccaacaggccagggaagtaagatgtttgtcaaaggcgcccctgaatcagtgatcgaacgctgtagcagcgtgcgggtcggtagcagaactgcaccactgacacccacaagcagagaacaaatactggcaaagattcgggattgggggtcaggtagcgatacattacggtgtcttgccctcgcaacacgcgacgcaccaccgcgcaaggaagatatggagctcgatgactgctccaaatttgttcaatacgaaacagatctaacctttgtggggtgtgttggaatgttggaccctcccagacctgaggtggctgcctgtatcacacggtgctatcaggccgggattcgagtggttatgatcactggagataataagggtaccgccgtcgccatctgccgcaggctggggatctttggtgatactgaggacgtagctggaaaggcctacacaggaagggaattcgatgacctctctcccgagcagcagcgccaggcctgcagaacggctcgatgcttcgccagagtggaacctgcccacaagtcccggatcgtggagaacttgcagtcctttaacgagattacagccatgactggggacggtgtgaacgatgctccggccctgaagaaggccgaaatcggaattgctatgggatcaggaacggccgtagccaagtctgcagccgagatggttttatcggatgataatttcgctagcattgttgccgctgtcgaggaagggagagcaatctattccaatatgaagcagttcatcaggtacctgatctcaagcaacgtaggggaggttgtttgtatattcttgaccgccattctgggcctgcctgaggcacttatccctgtacaacttctgtgggtgaatttggttactgatggtctgcctgccactgcattaggatttaatccaccagacctagacattatggaaaaactaccaaggagtcctagagaagccctcatatctggctggctctttttcagatacctcgctattggagtgtacgtggggctggccacagtagccgctgcaacatggtggtttgtgtacgacgccgaaggcccacacattaatttctatcagttgagaaacttcctgaagtgttcagaggacaatcctttattcgctggtatagactgcgaagtcttcgagtctcgctttccaacaaccatggcactgagcgtcctagtgacaattgagatgtgcaacgcccttaatagcgtaagtgagaaccagtcacttttacgaatgccaccctggatgaatccgtggctcctcgtagctgttgcgatgagtatggccctgcattttctgattctgctggtgcccccccttccactcatcttccaagttacgccattgagcggaagacagtgggttgtcgtgctacagatctccctgccagtgatcctgttagatgaggccttgaagtacctgagtagaaatcacatgcacggccatacccagtcctag

SEQ ID NO: 179816 - DNA, 2997 bp, synthetic construct
  misc_feature 1..2997: note = Description of Artificial Sequence: Synthetic coding sequence
  source 1..2997: mol_type = other DNA
atggaggccgcccacctgctgcccgccgccgacgtgctgcggcactttagtgtgacagcggaaggcggactcagtcctgcgcaggtgacgggagcacgagaacggtatggccctaacgagctcccctccgaagagggcaagtccctgtgggagctggtactagaacaattcgaagatctgttggtcagaatactcttactagcagccctggtgagtttcgtccttgcatggttcgaagagggcgaggagacgacgactgcattcgtggagccgctggtcattatgcttattttggtggctaatgcgatcgtgggagtctggcaggagcggaatgctgagtctgctatcgaagctctcaaagagtacgaacccgaaatgggtaaagtgattcggagcgaccgcaagggagtgcagaggatacgcgccagggatatcgttcctggcgatatcgtcgaggtggctgtcggagacaaggtgcccgccgacctcagactaattgaaattaagagcaccaccctgagagtcgatcagtcaatcctcaccggggagtcagtaagcgtgaccaagcataccgaggctattccggacccacgcgcagttaatcaggataagaagaacatgctctttagcggcacaaatatcaccagcggtaaagctgtcggtgtagccgtggccacaggcctacacacagaattagggaagatcaggtcacagatggctgccgtggagcccgagaggacacctctccagaggaagctcgacgaattcggccgccaacttagtcatgctatctccgttatttgtgtggccgtgtgggtgatcaacattggccactttgcagatcccgcccatggcggaagttggctgcgcggtgcggtttactactttaagatcgccgtggctctggctgttgcggctattcctgaaggacttcccgcagtcattactacatgtctcgctttggggacccgccgtatggctagaaagaatgccatcgtgcggtctttgccttccgttgaaactctcgggtgtacttctgttatttgttccgataaaacaggcacgttgaccaccaaccagatgtctgtgtgtcgcatgtttgtagtcgctgaagccgatgctggctcctgtttactacacgagtttacgatcagcggcactacttatacaccagagggagaggttcgacagggcgatcagccagtccgatgcgggcagttcgacgggctggtggagctcgctactatttgtgccctgtgcaacgactctgctctggactacaacgaagctaagggagtgtacgagaaggttggcgaagcaacagagaccgcactgacatgccttgtggaaaagatgaacgtgttcgacacagacctgcaggctctgtcccgcgtggagcgggccggagcttgtaacacagttattaaacagttaatgaggaaagagttcacactggagttttctagggaccgcaagagcatgagtgtctattgcactccaactaggccccaccctaccggccaggggtcgaagatgttcgttaagggggcccccgagagcgtgatcgagaggtgtagtagtgtccgcgtgggcagccggacagctcccctgactccaacttctcgggagcaaattctcgcgaagataagagattggggctctgggagtgataccctgcgatgtctggctctggcaaccagagatgctcctccacgtaaagaggacatggaacttgatgactgttccaagtttgtgcaatatgagaccgaccttacttttgttggctgtgtcggaatgttggatcccccccgaccggaagtcgccgcctgtattaccagatgttaccaggcgggcattagagttgtgatgattactggcgacaataagggaaccgccgtcgccatctgtcgacggcttggtatctttggcgacaccgaggatgtagcggggaaagcatacaccgggcgggagttcgacgatctctctcctgaacagcaaaggcaagcctgtcgtaccgcgcgctgctttgcccgcgtggaacctgcccacaaatctcgaatcgtggagaatctgcaatcctttaacgagatcacagcaatgacaggtgacggcgtcaacgacgcccccgctctcaagaaggcggaaattggtatcgccatgggaagcggcacagcagtagctaagagtgctgccgaaatggtgctctctgatgataatttcgcatccatcgtcgcagccgtagaggaaggacgcgcaatatacagtaacatgaaacagttcataagatacctcatcagctccaatgtcggcgaagttgtatgtatctttctgactgctatcctgggactcccagaggcactgatcccggtgcagcttctgtgggtgaacttggttaccgacggtctgcctgcgactgccctcggttttaaccctcccgacttagacattatggagaagctgccgagaagcccaagagaggctctcatcagtggctggctcttcttccgctacttggccatcggggtctatgtgggactggccacagtagctgctgcaacttggtggttcgtgtacgacgcagagggcccacatatcaacttttaccagcttcggaactttctgaaatgtagcgaggacaatccgttattcgctggaatcgattgcgaggttttcgaatcaaggtttcctacaaccatggctctgtctgtcctggttacaatcgagatgtgcaacgccctgaactcggtgagcgagaaccagtctctcctccggatgcccccctggatgaatccttggctgttggtcgcagtggcaatgagtatggccttacatttccttattctgcttgtgccccctctacctctgattttccaagtgacaccgctttccggccgacagtgggtggttgtgctgcagatcagcctcccggtgattctcctggatgaagctttgaagtatctgtcccgcaatcacatgcatgagatgtcccaaaagtag

SEQ ID NO: 179817 - DNA, 1386 bp, synthetic construct
  misc_feature 1..1386: note = Description of Artificial Sequence: Synthetic coding sequence
  source 1..1386: mol_type = other DNA
atgaccgtgcccaaggagatgcccgagaagtgggcccgggcccaggccccaccgtcctggtcgcgcaaaaagcctagctggggtacagaggaggagagacgggcccgggctaatgacagagaatataacgaaaaatttcagtatgcctccaactgcatcaaaacctcaaagtacaatattctcacctttctgcctgtaaacctgtttgaacaatttcaagaggtcgccaacacatacttcctcttccttcttatactgcaactgattccgcagattagctctcttagctggtttacgacaatcgtgcccctggtccttgttctgaccatcactgcagtcaaggatgctaccgacgattattttcggcataaatctgataaccaggtaaataatcgccagtcccaggtcctcatcaatggcatcctccagcaggagcagtggatgaacgtgtgcgtgggtgatataattaagctcgaaaacaaccagttcgtggccgcggatctactcctgctgagcagcagtgagccacacggattgtgctacattgagactgctgaactcgacggtgagacgaatatgaaagttaggcaggccattcccgtgacttccgagctgggggacatctctaagctggcaaagttcgacggggaggtaatttgcgagccccctaataacaaacttgacaagttttcgggcaccctgtactggaaggagaacaaattccctctatcaaatcagaacatgctactcagaggctgcgtgctgcggaatacagagtggtgtttcgggttagtaatcttcgcgggccccgacactaagctgatgcagaattctggccgaaccaagttcaaacggactagtattgatagactgatgaatactctggttttatggatctttggctttttagtgtgtatgggtgtaatactcgcaattggcaacgcaatatgggagcatgaagtgggtatgcgcttccaggtctatttgccatgggatgaagcagtcgattccgcattcttctccggcttcctttcgttctggtcttacatcatcatactcaatacagtcgtccccatctccctttatgtttctgtagaagtcatccgcttgggtcattcttacttcatcaactgggataagaagatgttttgtatgaagaaaagaacacctgctgaggcccgtaccactaccctgaacgaagaactgggccaagttgagtatatcttctccgacaaaacaggcacgctaactcagaacattatggttttcaataagtgctccatcaatggccactcttacgtgggctccgagggtcccaggagaaaggggccctcatggcccggtactgtggcccatgcttattctcatagtaccctgggagggtag

SEQ ID NO: 179818 - DNA, 1164 bp, synthetic construct
  misc_feature 1..1164: note = Description of Artificial Sequence: Synthetic coding sequence
  source 1..1164: mol_type = other DNA
atggccgtgtgcgccaagaagcggccccccgaggaggagcggcgggctcgagctaacgatagggaatacaacgaaaaattccagtacgcttctaattgtattaagaccagcaaatacaatattctcacattcctgcctgtgaacctgttcgagcagttccaggaggtcgccaatacatactttctgtttctgctgattttacaattgattccccagatctcatctctgtcatggttcacaactatcgtccccctcgtgttggttcttaccattacagccgtgaaagatgcaactgatgactacttccgtcacaagagcgacaatcaggttaataacaggcagtcccaggtgttgatcaatggaatcctccagcaagagcaatggatgaatgtctgcgtgggggacatcattaagcttgagaacaatcagttcgtggccgcggacctccttctcttgagctcaagcgaaccccacggcctctgttatatcgagacagccgagttagatggcgaaaccaacatgaaggtgagacaagccattcccgtgacgtccgaactgggcgacatctccaagctggctaagtttgatggagaggtgatttgcgaaccacccaacaacaagctggataagttttcaggtaccctttactggaaggaaaacaaattccctttatccaaccagaatatgctccttagagggtgcgtgcttcgtaacactgagtggtgctttgggctggtcatatttgcaggccccgacactaaacttatgcagaattccggtcgtaccaaatttaagcgcacttctattgataggctaatgaacaccctggttctgtggatttttggattcctggtctgtatgggtgtcatcctggccattgggaatgcgatttgggagcatgaagtaggaatgcggtttcaggtttatctgccctgggatgaagctgttgactcagcctttttctcgggcttccttagtttttggtcctacatcattattctcaacactgtagttccgatatctctgtatgtacggtacgtgccgagcctcacctggggcctgagccgcgaatccggggggcctatcgagctttttttcagtatgaagatgaagagcctgaggtcaaatgaaaagtccagttcctcttgcactgtcaatatctag

SEQ ID NO: 179819 - DNA, 3672 bp, synthetic construct
  misc_feature 1..3672: note = Description of Artificial Sequence: Synthetic coding sequence
  source 1..3672: mol_type = other DNA
atggacaccctgcgggccgtgcccctgttcagcatcagcggcctgttttccttcccttatagagtttcacacgggatcgctgggattttacttggagaaatggccgtctgcgctaaaaagagaccaccagaggaagaaaggcgcgcacgcgccaacgaccgggaatataatgagaagttccagtatgctagtaactgtatcaagacaagcaaatacaatatcctgactttcttgccagtgaatctgtttgagcagtttcaggaagtggctaacacgtactttctgttcctgctgatacttcaattgattccccaaatttctagcttgtcatggttcacaaccatagtgccgcttgtgctggttctcacaattaccgcggtcaaggatgcaacagatgactatttccgacataagtcagataaccaggtgaataatcgccagtcacaggttcttattaacgggattctccagcaggagcagtggatgaacgtatgcgtgggcgacatcatcaagctcgagaacaatcagtttgtggctgctgacctgcttctactgagcagctctgaaccgcatgggctctgttacatagagactgccgagctggatggggagaccaacatgaaagtaagacaagcaatcccagtgaccagtgagttgggtgatatcagcaagctagctaagttcgacggagaagtcatttgcgagcctccaaacaataaactggacaagttcagcgggactctgtattggaaagagaataagttcccactaagtaaccagaacatgctccttagggggtgcgtgctcaggaacacagagtggtgctttggactagtcattttcgctgggcctgatacaaagctgatgcagaactctggaagaactaagttcaaaaggactagcattgaccggttgatgaacaccttagtgctttggatttttgggtttctcgtgtgcatgggcgtgattctggccattggcaatgcaatctgggaacacgaagtcggcatgcggtttcaagtatacctgccctgggatgaggcggtggactccgccttcttcagtggctttctgtcattctggtcatacatcatcattctgaacacagtcgttccaatttcattgtatgtttctgtagaggtcatccgtctgggccactcatatttcatcaactgggacaaaaaaatgttttgtatgaagaagcgcacacccgctgaggcacggacgacaacattaaatgaggagttaggccaagtggagtacattttcagcgacaagactggcaccctgactcagaatataatggtattcaacaaatgctcgatcaatgggcattcctatggcgacgttttcgacgtgctgggacataaggccgaattaggcgagagaccagaacctgtggacttctcgttcaatcctctcgctgataagaagttcctgttctgggacccttcactgctagaggccgtaaagattggagaccctcacacccatgaattctttaggctgctatctttgtgtcatacagtgatgtcagaggagaaaaacgaaggcgaactctactataaagcgcagagccctgacgagggtgcactggtaactgcggccagaaacttcggatttgtattcagatccaggacacccaaaactatcacagtacacgagatgggaactgctatcacttatcagctgcttgcaattctagacttcaacaatataagaaaaagaatgtccgtaattgtgcggaatcctgaaggcaagatcaggctgtactgcaagggagccgacaccattctgctggatcgcctgcaccactccacacaggaattgctgaacaccacaatggatcacttgaatgaatacgccggggaaggacttcgtactctagtcttagcatataaggacctggatgaagaatactacgaagaatgggccgagcgacggctgcaggcttcgttagctcaggattccagagaggacagactggcctccatatacgaagaggtggagaacaacatgatgcttctcggagctacagccatcgaagacaaactccagcagggggtgcctgaaaccatcgccctcctgaccctggctaacattaagatttgggtgttgacaggcgataaacaggagactgcagttaatatcggttacagttgcaagatgcttactgatgatatgaccgaagtattcatcgtgacagggcacactgttctggaggttagggaggaacttcggaaggcccgagagaagatgatggacagcagtcggtccgttggaaatggttttacataccaggacaagctcagctcctctaaactgacctccgtactggaagccgtggccggcgagtacgccctggttatcaacggccactccctggcccatgctcttgaagcggatatggagttagagtttctggagaccgcatgcgcgtgcaaagcagtgatatgttgtagagtcacacccctccagaaggcccaggtggtcgaactggtgaaaaagtacaagaaggccgtgacattggccatcggggacggggctaacgatgtttcaatgatcaaaactgcacatattggagttggtatttcaggtcaggagggtatccaggcagtacttgcgagtgactacagtttctcccagtttaaatttctgcagcgcctcctgctggtgcacggcagatggtcgtacttgaggatgtgtaaattcctttgttatttcttttacaagaactttgccttcacaatggtccatttttggtttgggttcttctgtggtttttccgcccagaccgtttacgatcaatattttattacactttacaacattgtctatacatctttgccagtacttgctatgggagtttttgatcaggacgtgcctgagcagcgcagcatggagtatccaaagctgtatgagccaggccaacttaatctcctgttcaataaacgcgagttcttcatatgtatcgcccaggggatatacactagcgttttaatgttctttattccctatggagtgttcgcagatgcaacaagagacgacggcacgcagctggcagactaccagagctttgcagtcaccgtggctacatctttagtgatcgtcgtgagcgtacagattggcttggacaccggctattggacagccattaaccactttttcatctggggaagtctcgcagtatactttgctatcctttttgctatgcacagcaatggactcttcgatatgtttccaaatcagttcaggtttgtgggcaatgcccagaataccctggcccagccaaccgtatggctgaccatagttttaacaactgtcgtgtgcatcatgcctgtggtcgcattccgcttccttcgcttgaacctcaagcctgaccttagcgacacagtgagatatactcagttagtacgaaaaaagcaaaaggctcaacaccgttgtatgaggcgggtcggacggacaggtagcagacgcagtggttatgcgttctcccaccaggagggattcggggagttaattatgagcgggaagaatatgaggctctcttctctggcactcagctcctttaccacacgcagtagctctagttggattgagagtcttaggcggaaaaagagcgattccgcatcaagcccgagcggaggcgcagataaaccactcaagggctag

SEQ ID NO: 179820 - DNA, 3444 bp, synthetic construct
  misc_feature 1..3444: note = Description of Artificial Sequence: Synthetic coding sequence
  source 1..3444: mol_type = other DNA
atggccgaccagatccccctgtaccccgtgcggagcgccgccgccgctgccgccaacagaaagagggccgcatattactcagcagcaggacccagaccaggcgctgaccgccacagtaggtatcaacttgaagatgagtcagctcatctggacgaaatgccactgatgatgtcagaagaagggtttgagaacgaggagagtgattaccacaccctgccccgagcccgaattatgcagcgcaagcgcggtttggaatggtttgtgtgcgacggctggaagttcttatgtacttcctgctgtggatggctgatcaatatttgtcgcagaaagaaagagctgaaggcccgtactgtgtggctgggctgcccagagaagtgcgaggagaaacatccacgaaactcgatcaaaaaccagaagtacaacgtttttacctttattcctggggtcctttatgagcagttcaagtttttcctgaacctgtactttctggttatctcgtgcagccagttcgtgcccgccctaaagattggatacctgtacacatattgggcgcccttgggctttgtgctggcagtgacaatgacaagggaggccatagatgaattcagacggttccagcgggacaaagaggtcaactctcaactttactcaaaactcacagtgcgggggaaagtgcaggttaagagctccgacatccaagtaggcgacctgataattgttgagaagaaccaacgtatcccatcagatatggtcttcctgagaacatcggaaaaggccggaagctgtttcattaggacggaccagctggatggggaaacagattggaaactcaaagttgcagttagctgcacacagcagcttccagccttgggcgatctcttttccatcagcgcttatgtatacgcacagaaacctcagatggacattcattcctttgaaggcacgtttacgcgcgaagattctgatcctccaattcacgaaagcctgagtattgaaaacacgttgtgggcatccaccatcgttgcatctggaaccgtgataggggtcgtaatatacaccggcaaggaaaccagatcggtgatgaatacgtctaatccaaagaacaaagtgggactgctggatctcgagctgaatagactgactaaggccctatttctcgctctcgttgctcttagtatcgttatggtgaccttgcaggggttcgtggggccatggtatcgtaacctgttcagattcttgcttttattttcctatattataccaatcagcctgcgggtgaacttagacatgggcaaggccgtgtacggctggatgatgatgaaggatgaaaacattcccggcacggtggtgcggaccagcacaattcctgaagagctgggccgtcttgtgtacttattgacagataagacaggtaccttgacgcagaacgagatgattttcaagagattgcatctgggtacagtgagttacggagctgacaccatggatgaaatccagtcccatgttcgagatagttactctcagatgcagagccaggcaggggggaataatactgggagcacacccctccgaaaagcccagtcttctgcacccaaagttcggaaatctgtgtcatcccgaattcacgaggcggtgaaggcaattgttttgtgtcacaacgtgactcctgtgtacgagtccagagctggagtgacggaggagaccgagttcgccgaggccgatcaagacttcagtgacgagaatagaacatatcaggctagcagccccgatgaagtagcgttagtccaatggaccgagtctgtgggcctgacgctggttagcagggacctgaccagtatgcaactcaagaccccatctgggcaggttttgtcgttttgtatactgcagctttttccctttacgtcagagagcaaacgcatgggtgtgatagtaagggacgaaagtaccgctgaaattaccttttatatgaaaggagctgatgtcgcgatgagcccgattgtccagtataacgattggctggaggaggaatgcgggaacatggcccgggaaggcctgagaacacttgtggtggcaaaaaaggccctcaccgaagagcagtaccaggacttcgagtcccgatacacacaggctaagttgagtatgcacgatagatcccttaaagtggccgcggtggtcgagtctttggagcgcgagatggagttgctgtgccttaccggtgtcgaagaccagctccaggcggacgtgagacctactttggaaatgcttaggaacgctggcatcaagatctggatgctgacaggcgacaagctggagaccgctacctgcatagcgaaatccagccaccttgtctccagaactcaggacattcatatttttagacaggtgacgtcccggggcgaagcacacttggaactgaatgctttcagaagaaagcacgattgtgccctggtgatcagcggagactccttagaagtgtgtctgaagtactatgaacacgagttcgtggaactggcttgtcagtgccctgccgtcgtgtgctgcagatgcagcccaacacagaaggcacgcatcgtgacattgctgcagcagcatacaggtaggagaacttgcgcgatcggcgacggcggcaatgacgtaagcatgatccaggccgccgattgcggtataggaattgagggcaaagagggtaaacaagcctctctcgctgccgattttagcatcacccagttccgccatatcggtagactgcttatggttcacgggaggaactcatacaaacgttcagctgcattggggcagttcgtaatgcacagagggctcataatctctaccatgcaggcagtgttcagctctgttttctactttgcttcagtgcccctttaccagggcttcctcatggtggggtatgccactatctacaccatgttccccgtcttctccctcgtgctggatcaggatgtcaagcccgaaatggcgatgctgtatcccgaactatacaaggacctcactaagggcaggtcactgtcttttaagactttcttaatctgggtactgataagcatttaccagggaggaatcctcatgtatggtgcattagtgctatttgaatctgagtttgttcatgtcgtggcaatcagttttaccgccctgattctcaccgagttgctcatggtggccctgaccgtaagaacatggcactggttgatggtagtggctgagttcctctccctgggatgctatgttagcagcttagccttcctgaacgaatattttggcatcggtcgggtgagttttggagccttcctggacgtggctttcataactactgtgacctttttgtggaaggtgtccgctattactgtggtgagttgtttgccactgtacgtgttgaaatacttaaggcgtaaattgtccccacctagctattgtaagctggcaagctag

SEQ ID NO: 179821 - DNA, 408 bp, synthetic construct
  misc_feature 1..408: note = Description of Artificial Sequence: Synthetic coding sequence
  source 1..408: mol_type = other DNA
atgcaggccgtgttcagcagcgtgttctacttcgccagcgtgcccttgtaccagggcttcctcatggttggctacgctacgatctataccatgtttcccgttttcagtttagtgctggatcaagatgtcaaacccgagatggcaatgttgtatcctgaactctacaaagaccttacaaaatcccaacaggacggccgatctaaccgtcgacagcacgaaagactcacctctggtacaagcggtcatgtctgggatccagggtcattcttccgaatccgggtttccgggaagggagccagaaatgctggaaagatattagttcttcagaaccttcctcacttgggcttcaataagtacctcccgcggcgtcaccctcacgtgtgggggcctggggcactcagagtctag

SEQ ID NO: 179822 - DNA, 3411 bp, synthetic construct
  misc_feature 1..3411: note = Description of Artificial Sequence: Synthetic coding sequence
  source 1..3411: mol_type = other DNA
atggccgaccagatccccctgtaccccgtgcggagcgccgccgccgcagcagcaaacaggaagagggccgcctattactcggccgctgggcctcgtcctggcgccgaccgccacagtcgttaccagctggaggacgagagcgcacacttggacgaaatgccacttatgatgagcgaggaaggcttcgagaacgaggagtcggactatcatactctgcccagagcccgtataatgcaacgcaagcgcggcttggagtggtttgtttgtgatgggtggaagttcctgtgcaccagctgctgtgggtggcttataaatatctgccggcggaaaaaagagctcaaagcgcgaacggtgtggttggggtgccccgagaagtgtgaagagaaacaccccagaaatagtattaagaatcagaagtacaatgtcttcacattcatcccaggtgtgctatacgagcagtttaagtttttcctgaatctgtacttcctggtgattagctgtagtcaattcgtgcccgcattgaaaattgggtatctgtacacatattgggcgcctctgggatttgtcctggctgtgaccatgacccgagaggctatcgatgagttccgacgcttccagcgagacaaggaagtcaatagccagctgtactctaagctgactgtacgcggtaaggtccaagtcaagagctctgacattcaggtgggtgacctcattatcgtggaaaaaaaccagcgtattccaagtgacatggtgtttcttaggacatcggagaaggctgggtcatgtttcattaggacagaccagctggacggtgaaactgattggaagttgaaggtagctgtctcatgcacccagcagctgcctgcgctcggcgacctgttcagcatttccgcttatgtttacgcgcaaaaaccccagatggacatacattcattcgaagggacatttacacgggaggatagtgaccccccgattcatgagtcactgtctattgagaatactttatgggcatctacaatcgtggcttccggaacagtgattggagtggtgatctatacaggaaaagaaactcgaagtgtgatgaatacatccaacccaaagaataaagtggggctcttggacctggaactaaatcgcttgacaaaagccctgtttttggccttagtggcgctgtcaatcgtcatggtaaccctgcagggattcgtgggcccatggtatcgtaatttattccgctttctacttttgtttagttacattattcctattagcctccgagtgaacctggatatggggaaagccgtttacggatggatgatgatgaaagatgaaaacatccctgggacagttgtgagaactagtaccatccccgaggaacttggccgtctggtgtacctgctgacggataaaactggcacactaacgcagaacgagatgatattcaagcggctacacctcggtacagttagctacggagctgacactatggatgagatccaatcccacgtgcgcgatagttacagtcagatgcaatcccaggcagggggaaacaacaccggctctacccccttaagaaaagcccagtcttctgctcccaaggtaagaaaatcagtctcgagccgaattcacgaggcggtgaaggcaattgtattatgtcataatgtgacacccgtctatgaaagcagagctggtgtgacagaagagactgagttcgccgaggccgatcaggacttttcggatgaaaaccgcacctaccaggcctcgtctccagatgaagtggccttagtacagtggactgaaagcgtgggtttgaccctggtgtcccgcgatctgacatcaatgcagttgaagaccccatctggacaggtgctaagtttctgtatattacagttgttcccctttaccagtgaatcgaagaggatgggggtgatcgtacgggatgaatcaacggctgagatcactttctacatgaagggggcggacgtcgccatgtcgcctattgtccagtacaacgactggctcgaagaggaatgtgggaacatggcccgcgaaggattgaggacactggtcgtggctaaaaaggcacttacggaggagcaataccaggacttcgaaagccggtacactcaggccaaactgagcatgcatgatcgcagtctgaaggttgcagctgttgttgagagcctagagagggagatggagctgctgtgcctgacgggggtcgaagaccagctgcaagctgacgtgcgtcctacactcgaaatgctgcggaacgcaggaattaaaatttggatgctgaccggagacaaacttgaaacggccacctgcatcgccaaatctagtcacctggtctcccgtacacaggacattcacatttttagacaggtgacctcacgcggggaggctcacctggaattgaatgcatttagacggaaacacgattgcgccctggtcatctccggtgatagcctcgaagtctgccttaaatattacgagcacgagtttgtggaactcgcatgccagtgccccgctgtcgtctgttgcaggtgttcacctacacagaaggccagaatcgtcacgctgcttcagcaacatacgggacgtaggacatgcgctataggggatggggggaatgacgtgtccatgatacaggcagctgattgcggtataggaatcgagggaaaggagggaaagcaggcatctctggctgccgattttagcatcactcagttcagacatatcggacggttactgatggtacacggaagaaatagctataagagaagtgctgccttgggacagttcgtgatgcatcgtgggctgatcatctctacaatgcaggcagttttctcttctgtcttctattttgcttctgttcccctctatcagggttttctaatggtgggttacgcaacaatatatacaatgtttccagtattcagtctggtccttgaccaagacgtgaagcctgagatggccatgctgtacccagaactttacaaggacttaactaagggtcggtctctttcctttaagacctttctgatctgggtgctgattagcatctaccagggggggattcttatgtacggtgctttggttctgtttgagtccgagttcgtccatgtcgtcgccatcagctttacagcactgattctaaccgagctcctgatggttgctttgaccgtgagaacctggcactggctgatggtcgtcgccgagtttttgagcctaggttgctatgtctctagcctcgcctttttgaatgagtactttgatgtggctttcattaccaccgtcacctttttatggaaggtgagtgcaatcacggtcgtttcctgcctgccattgtacgtgttgaaatacctgaggagaaaactgtcaccacctagctactgcaagctcgcttcctag

SEQ ID NO: 179823 - DNA, 411 bp, synthetic construct
  misc_feature 1..411: note = Description of Artificial Sequence: Synthetic coding sequence
  source 1..411: mol_type = other DNA
atgcccctgatgatgagcgaggagggcttcgagaacgaggagagcgattaccacacactgccacgggcacggattatgcagcgaaagaggggcctggagtggttcgtgtgtgatggatggaaattcctttgcacctcatgttgtggttggctgatcaatatctgccggcgtaaaaaagagctgaaggcacgcacggtgtggcttgggtgtcccgaaaagtgtgaggagaaacacccacgaaactctatcaagaaccagaaatataatgtttttactttcatacccggtgttctatacgaacagttcaagttctttctcaacttgtattttctagtgatctcttgctctcagttcgtgcccgcgctgaagataggatatctgtacacttactgggccccactcatgacttag

SEQ ID NO: 179824 - DNA, 609 bp, synthetic construct
  misc_feature 1..609: note = Description of Artificial Sequence: Synthetic coding sequence
  source 1..609: mol_type = other DNA
atgcagcggaagcggggcctggagtggttcgtgtgcgacggctggaagttcctgtgtacctcttgctgtggctggctgattaacatatgtaggcgcaagaaggaacttaaggcaagaacagtctggctcggatgtcccgagaagtgcgaggagaagcatccaagaaattctattaagaaccagaagtacaatgtgtttactttcataccgggtgtgctgtacgagcaattcaagtttttcctaaatctctactttctggtgatctcatgctcccagtttgtccctgccctgaagatcggctatctgtacacatactgggctccactggggtttgttttggccgttaccatgacaagggaagccattgacgagtttcgtcggtttcagcgggacaaagaagtgaatagccagctgtacagcaaactaaccgtgaggggcaaggtccaggtgaaatcatccgacatacaggtcggagacctgattattgttgagaaaaatcagcgcatcccctccgacatggtgtttctcagaacatctgaaaaggcagtcagtaataatctcgactactgtagccatctagtgctttttatcttttgcttcctcaattag

SEQ ID NO: 179825 - DNA, 1374 bp, synthetic construct
  misc_feature 1..1374: note = Description of Artificial Sequence: Synthetic coding sequence
  source 1..1374: mol_type = other DNA
atggcccgggagggcctgcggaccctggtggtggccaagaaggcccttactgaggaacaataccaggactttgagtctcgctatacccaggcgaagctatcaatgcacgacagaagtctgaaagtagccgcagttgtagaaagccttgagcgcgaaatggagttgctttgtcttacaggtgtcgaagaccagctccaggcagacgtgagaccaactctggaaatgcttcgaaacgctggtatcaagatctggatgctgacgggagataaactcgagacagcaacctgtatagctaaaagcagccacttagtatctcgaacacaagatatccatatcttcaggcaggtgactagccgaggcgaggctcatctcgaactcaatgcgtttagacggaagcatgactgcgccttggtcatttctggcgattcacttgaggtgtgtctgaaatattacgagcatgagttcgtggagctggcgtgccaatgcccagccgtcgtttgctgccgctgctcccctacccagaaagctagaatcgtcactttattgcaacagcacacaggacgcagaacttgtgccattggggacggaggaaacgatgtatccatgatacaagccgcggattgtggcatcggcattgaaggcaaggagggcaagcaggccagcttggctgccgatttcagtatcacccagttcaggcacattggccgcctcttgatggtgcacggtcgtaatagctacaagaggagtgccgccctaggacagttcgtgatgcatcggggactcattatttcaaccatgcaggccgtcttttcatccgttttttacttcgcatcagtccctctgtaccagggctttctcatggtgggctacgctaccatttacactatgtttcccgtattttctctcgtgttagatcaagatgtgaaacccgaaatggctatgctatatccagaattatacaaagacctgacgaagggaagaagcctctcttttaaaacctttcttatctgggtcctgatctctatttaccagggcggtattcttatgtatggagcgttggtgctgtttgagtctgaattcgtccacgtcgttgcaatctcatttaccgctctcatcctaactgagctcctgatggtagcgctgaccgttcgcacgtggcattggttgatggttgtggccgaattcctgagcttgggatgttatgtgtccagcctggcattcctcaacgagtattttgacgtggcctttattaccactgttaccttcctgtggaaggtgagtgccataactgtcgtgtcatgtctgcccttatacgttctgaagtacctgcggcgtaaactttctcccccttcctattgtaagctggcaagttag

SEQ ID NO: 179826 - DNA, 4500 bp, synthetic construct
  misc_feature 1..4500: note = Description of Artificial Sequence: Synthetic coding sequence
  source 1..4500: mol_type = other DNA
atggagcgggagcccgccggcaccgaggagcccggcccccccggccgtagaagacggcgcgaggggcgtaccagaaccgttagatcaaatctgctcccacctccgggagctgaggatccagctgccggggctgccaaaggggaacgaaggaggcggcgcgggtgtgcccaacacttagccgataatagactgaagacaacaaaatacactcttctttcctttttgcctaaaaacttgttcgaacaattccacagacctgccaacgtgtatttcgtgttcattgcattgcttaatttcgtgcccgcagttaacgcgtttcaaccaggccttgcacttgcaccagtactctttattctggcaattacagccttccgggacctctgggaggattactcccggcacagatcggaccacaaaattaaccacttgggctgtctggtgttcagcagagaggagaagaagtacgtaaatcggttctggaaagagatacacgtcggcgatttcgtgagactccggtgcaacgaaatttttcccgcggacatcctgctgctgtcttcgtctgaccctgatgggctttgccacattgagacagccaacctggacggcgaaaccaacttaaagagaaggcaagtcgtccgtggattttctgagctcgtgtctgaatttaatcccctcactttcacttcggtgattgagtgcgaaaagcctaataatgatttatcccggttccggggctgcatcattcatgacaatgggaagaaagccggtctctacaaggagaaccttctacttcgaggatgtaccctgaggaataccgatgctgtcgtgggcatcgtgatctacgctggtcacgaaactaaagcactgcttaacaacagtgggccccggtacaaacggagcaagctggaaagacagatgaactgtgatgtgctgtggtgcgtgctgctcttggtttgcatgtctctattctcagccgtgggacacggactgtggatttggcgctatcaggaaaagaagagcctgttttacgtccctaaatctgatgggtctagtcttagccctgtcaccgccgccgtgtatagtttcctgacaatgatcattgtccttcaggtcctcatcccgatttctctatacgtgtccatcgagatcgtaaaggcctgtcaagtgtatttcattaatcaggatatgcagctgtacgacgaggaaacagatagccaattgcagtgtcgggcactgaacatcaccgaagatttagggcaaatacagtacatattctccgacaagactggtacacttactgagaataaaatggtctttcgccggtgcacggttagcggagtcgagtatagtcatgatgccaacgcccagcggctggcgcgctatcaggaagctgatagcgaagaggaggaggtcgtgccccgcggaggatctgtgtcccagaggggtagtattgggtctcatcagagcgtgcgcgtcgtacatcggacacaaagtactaaaagccacaggcgcacaggatcccgcgcagaggccaaaagagcttccatgctttctaagcatacagcattctcatctccgatggagaaagacattacgcctgacccaaagcttctggagaaggtcagtgaatgtgacaaatcactggccgtcgcccggcaccaagaacacttgctcgcccacctaagccccgaactcagcgatgtattcgacttttttatcgctctcaccatctgtaacacagtcgttgtcacgagcccggatcagccgagaacaaaagtcagggtgcgatttgagctgaaatcccccgtcaaaactatcgaggacttcctgcggaggttcacgcccagctgtcttaccagtgggtgcagctctattgggtccctagcagctaacaaatcctcccataagttgggcagttcctttccctctactcctagctccgacggaatgcttcttagactcgaagagcggctcgggcaacccactagtgccatcgcgtcgaacgggtactcaagccaggcagacaattgggcatcggagcttgcacaggagcaggagtcagagagagaactgcggtacgaagctgagagtccagacgaggcagctctagtgtacgccgcgagggcatataactgtgtgcttgtcgagagacttcacgatcaggtgtcagtcgaactcccccacctgggcagactgacctttgaactactgcataccctgggatttgattcggtgagaaagagaatgtcagtggtgatacggcaccctttaacagacgaaattaacgtttatactaaaggcgccgactccgtggtgatggacctcttacagccatgtagtagtgtggatgcccgaggacggcaccagaaaaagatcaggtctaagacacaaaactatctcaatgtatacgcagcagagggcttgaggacgttatgcattgctaaaagggtgttgagcaaggaggaatacgcatgttggctgcagtcccacctggaagcagagagctctctcgaaaacagcgaggaacttctctttcagtctgccattcgcctggagactaacctccacctcctcggcgcaacggggatagaagatcgactccaggacggcgtacctgagactataagcaagctgcgccaggccggcctgcagatttgggtgctgacaggcgataagcaagaaacagccgttaatattgcatacgcctgcaaacttcttgaccacgatgaagaagttatcacgctcaacgcgacaagccaggaagcctgtgctgccctcctggatcagtgtctttgctacgtgcagtcaaggggtctccagcgagcccctgaaaagactaagggcaaggtaagcatgcgattctcttcgctttgtcctccctctacgtctaccgccagcgggcgaagacctagtctggtcattgacggacggtcactggcatatgctcttgaaaaaaatctggaagataagtttctattcctggccaaacagtgcaggagtgtgctttgttgccgatctactcccctgcagaagtcaatggtcgtcaagctcgtccgatctaagcttaaagcaatgaccctagctattggcgatggggctaatgacgtttccatgattcaggtcgccgatgttggtgtgggcatatccggacaggaaggaatgcaggccgttatggcctctgacttcgcggtcccaaagtttaggtacctcgagcgcctgctgatattacacgggcattggtgctactcaagattggccaatatggtgctctactttttttacaagaatacgatgttcgtggggcttctgttctggtttcagttcttctgtggatttagtgcttctaccatgatagaccagtggtatctgattttctttaatctcctgttttcatccttgccccccctggttacgggcgtcttggatagagacgtgccggcgaatgtgttgctgacgaacccccagttgtacaagtctggccagaacatggaggaatatcgaccgcgaacgttctggttcaacatggcagacgccgcctttcaatcgttagtatgtttcagcatcccttacttagcttattacgactctaacgtggatctcttcacatgggggacccctatcgtaaccattgcactcttaacctttttactccacctcggaattgaaacgaagacgtggacctggctgaattggatcacctgcgggttctctgtgctactatttttcaccgtggcactgatttataatgcgagttgtgccacctgttacccacccagtaacccttactggacgatgcaggcactgttgggtgatcccgtcttctatttgacttgcctgatgacaccagtggctgctctgctgccccgtttatttttcaggtccctccaaggacgcgtgttccccacacaacttcagctggccagacagctgactcgcaaaagccccagacgatgcagcgcacctaaagagacatttgcccagggacgactgccgaaagactccggcactgagcatagtagtgggcggactgtaaagacctccgtgccactctcccagcccagttggcacacacaacaacctgtttgctccctggaggcgagcggggagccttctaccgttgacatgtccatgccagtacgagagcatactctgctggaaggattaagcgcccccgcccccatgtcttctgcccccggcgaggcagtgcttcgctcgcccggcgggtgcccagaggaaagtaaagttcgagctgccagcacaggtcgcgtcaccccgctgtcctccctgttctctctgcccacctttagccttctgaattggattagctcatggtcactcgtctcgcgtctgggaagcgtgctgcagttctctcggactgaacaactcgctgacgggcaagcagggaggggcctaccagtgcagccacacagcgggcggtccgggctccaaggccccgatcacagacttcttataggcgcctcatcccgcaggtcccagtag

SEQ ID NO: 179827 - DNA, 3405 bp, synthetic construct
  misc_feature 1..3405: note = Description of Artificial Sequence: Synthetic coding sequence
  source 1..3405: mol_type = other DNA
atggactgcagcctggtgcggaccctggtgcaccggtactgcgccggggaggaaaattgggtggacagcagaactatctatgtggggcacagggagccgccgcctggagctgaggcttacattccccagagataccccgacaatagaattgtctcttctaagtacacgttctggaattttatacccaaaaacctatttgagcagtttagacgggtagctaatttttactttctgattatcttcctggtccaactcatcattgataccccgacctcacctgtcacatcaggactgcccctatttttcgtgatcaccgtgacggcaattaaacaaggctacgaggactggctgagacacaaagctgataacgccatgaaccagtgccctgttcatttcatccagcatggcaagctggtcaggaaacagtcgcggaaacttcgggtgggggatattgtcatggttaaggaggacgaaaccttcccatgtgacctaatttttttaagcagcaatagaggagatggcacttgtcatgtgacaactgccagccttgatggcgagagttctcacaaaacccattatgctgtgcaagacactaaggggtttcatactgaagaggacatcggagggctgcatgcaaccattgagtgtgagcagcctcagccagatctctataagttcgtgggacgaattaatgtatactcggacctgaatgatccagtggttagaccactgggctctgaaaatctgctcctgcgcggggccacactgaagaacaccgagaagatcttcggcgtggcaatatacaccggtatggaaacaaaaatggctttgaattatcaatccaagagccagaagcgctccgccgtggaaaagtccatgaacgcatttcttatagtgtatttatgtatcctcatcagtaaagccctgatcaacacagtactcaagtacatgtggcagtctgaaccatttcgagatgagccctggtacaaccagaagaccgagagtgagcgccagcgcaatctatttctcaaagcatttactgacttcctggcgttcatggtcctgttcaactacataattcccgtcagtatgtacgtaacagtggaaatgcagaaatttttaggatcctattttatcacttgggatgaagacatgtttgacgaggagacaggggaagggccgctggttaatacttccgatcttaatgaggagcttggtcaggtggagtatattttcactgataagaccgggacattgacagagaataacatggagtttaaagaatgctgcatcgaaggacacgtgtacgtaccacatgttatctgcaatgggcaggtgctgcccgagagcagcggcatcgatatgattgactcatctccaagtgtcaatggccgtgaacgggaggagcttttcttcagggcgctgtgtctctgccatacagttcaggtgaaagatgacgactcggttgatgggccccgtaagagccctgatggcggtaaatcttgcgtgtacatttcgtcttcccccgatgaggttgctctcgtggagggggtgcagaggctgggcttcacatatctccgtctgaaggacaattacatggagattcttaatcgtgaaaaccatatcgaaagattcgaactgttagaaattctttctttcgactccgtgcgtcggcgcatgtccgtcattgtgaagtccgctactggggaaatttatctgttctgcaagggtgccgatagtagtatattcccccgcgtgattgagggaaaggtcgatcagatacgtgctcgcgtggagagaaatgctgtcgagggactacgcaccctttgtgtggcctacaagcgcctgatccaggaggaatacgagggaatttgcaaattattacaggccgccaaggtcgcactgcaggacagggagaaaaagctcgcggaagcctacgagcagatcgaaaaggacctgacgctgctgggcgccacagccgtggaagaccgcctgcaggagaaagccgctgacacgattgaggcgctgcagaaagccggcatcaaggtctgggttctaactggggacaaaatggaaacagccgccgctacttgctatgcctgtaagctctttcgaagaaacacccagctgcttgagcttaccactaaacgcattgaggagcagtcacttcatgacgtgctgttcgaactgtccaagactgtactccggcattccggctccctcacccgggacaatttatcaggactcagcgcggatatgcaggactatggactgatcattgacggtgcagcgctgtctctcatcatgaaacctcgggaagacgggtcaagtggcaactatcgggaactgttcctcgagatttgccgaagttgttcggcagtgctatgttgccggatggccccgctccagaaagcacagatcgtgaagctaattaaattctcaaaagaacatcccataacgctcgcaattggggacggtgcaaatgacgtgtctatgatactcgaggctcacgtcggtatcggtgtcatcggcaaggagggacggcaggccgcacggaatagcgattacgccatcccaaaatttaagcaccttaagaaaatgctgctggtgcatggacacttctactatattagaattagtgagctggttcaatacttcttctacaagaatgtgtgttttatttttccccagttcctttatcagttcttttgcgggttcagtcagcagacattatatgacactgcatacttgacattgtacaatatttccttcacttccttgcctatcctcctatattccctgatggagcagcacgtggggattgatgtactcaagcgggatccaacactgtatcgagacgttgccaagaatgctttactgcggtggcgcgttttcatctactggaccctgcttgggctttttgacgccctggtcttcttcttcggggcttattttgtgttcgaaaatacgacggtgacttctaacggtcagatcttcggcaattggaccttcggaactctcgtctttactgtcatggtgtttactgtcacattaaaactggcccttgacacacattattggacgtggataaatcacttcgtaatctggggctcactattgttctacgtcgtattcagtctgctatgggggggagttatttggcccttccttaactatcaaaggatgtattacgtttttattcagatgctctcgagtggcccagcctggctggcgattgtactcctggtcaccatctccctgttacccgacgtgctcaagaaggtgttatgtagacaactgtggcctaccgctaccgagcgcgtccagactaaaagccaatgtcttagtgtagaacagtccacgatttttatgctttcccagacctcctccagcttaagcttctag

SEQ ID NO: 179828 - DNA, 3576 bp, synthetic construct
  misc_feature 1..3576: note = Description of Artificial Sequence: Synthetic coding sequence
  source 1..3576: mol_type = other DNA
atggactgcagcctggtgcggaccctggtgcaccggtactgcgccggggaagagaattgggtagattccaggacaatttacgtcggacacagggaaccacctcccggcgcagaggcctacattccacagaggtatccagacaatcggatagtgtcctctaaatacacattctggaatttcattcccaagaacctctttgagcagtttcggagagttgccaacttctattttctgattatcttcctggtccaactcattatcgacactccgaccagtcccgtgacctccgggttgcccttattttttgtcatcacagtgacagctataaagcagggctacgaggactggctgagacacaaggctgataacgccatgaaccagtgccccgtgcatttcattcagcatggcaaactggttagaaagcagtcccgcaagctcagagtgggtgatatagtgatggtaaaggaagatgaaacattcccttgtgatcttatcttcctctcctccaatcgtggggatggcacctgtcatgtcaccactgccagccttgatggcgagagttctcacaagacgcactatgccgtgcaggacaccaaggggttccacactgaggaggacattggcggcctccacgcgaccatcgaatgtgagcagccccaaccagacctgtacaaattcgttgggcgcattaatgtgtacagcgatttgaatgatccagttgttaggccactggggagcgagaacctcctcttgagaggcgctactctcaaaaataccgaaaaaatctttggtgttgccatatacacggggatggaaacgaagatggcccttaactaccaaagcaaatcacagaagcggtcagccgtggaaaagtccatgaacgcgtttttgatcgtgtacctctgtatcctgatctcaaaagcactgatcaacacggttctaaaatacatgtggcagagcgagccatttagggacgagccctggtataaccagaagacagaaagcgaaaggcagagaaacctgttcctgaaggctttcactgatttcctggccttcatggtactgtttaattacatcattcccgtgagtatgtatgtcacagtggaaatgcagaaattcctggggtcttactttattacctgggatgaggacatgttcgacgaagagacgggagagggccccttagttaatacctctgatctcaacgaggaacttgggcaggttgagtatatttttaccgataaaacaggtacactgactgaaaacaatatggaattcaaggaatgctgcatcgaagggcatgtgtatgtccctcacgttatctgtaatggccaggttctccctgagagcagcgggattgatatgatagactccagcccttccgtgaatgggcgagaacgcgaggagctattctttcgagccttgtgcttgtgccacactgttcaggtgaaagacgatgatagtgtcgatggaccacgcaaatctcctgacgggggaaaatcgtgcgtttatatttcgagcagtcctgatgaggtagctctggtcgaaggcgtccagaggctgggctttacatacctcagacttaaagataattacatggagattctcaatagggagaaccacattgaaagattcgaattgctcgaaatcctatccttcgacagtgtgaggcgacgcatgagtgttatagtgaaaagtgcgacgggagaaatatacttgttctgcaagggtgccgattcctctattttccctcgcgttattgagggtaaggtggaccaaatcagggctcgggtggaacgaaatgccgttgagggtcttcgaaccttgtgcgttgcttacaaacgcctgatacaagaggagtatgaagggatctgcaagctacttcaggcagctaaggtggcgctgcaggaccgcgagaaaaagctagctgaagcatacgaacagatcgagaaggatctcacccttctgggagcaactgcagtagaggatcggttacaagagaaggcagcagacaccatcgaggctttgcagaaagccggtattaaggtgtgggtgctcactggcgataagatggagactgccgcagcaacctgttatgcctgcaagctgttccgaagaaacacgcagctgctggagttgacgactaaacggatagaagagcagagcctgcatgatgtgctattcgagctgtccaagacggtgctgaggcattccggatccctgactcgggacaacctgagcggactcagcgcagacatgcaagattacggtctcatcattgatggggctgcactgtctctcatcatgaaaccccgtgaagatgggagctctggtaattacagggagttgttcctggagatttgcaggtcatgctctgctgtgttgtgttgcaggatggccccgctgcagaaggcacagattgtgaagctcatcaaatttagcaaagagcatcctattactctcgccattggggatggagctaacgacgttagcatgattctggaagcccatgtaggcatcggggtgatcggaaaggagggcagacaagctgctcgcaattctgactacgccattcccaagttcaaacatcttaagaagatgcttcttgtgcatgggcatttttactacatccgaattagtgagttggtgcaatactttttttataaaaacgtgtgcttcattttccctcagttcctctaccaatttttctgcggcttctcccaacaaacactctatgatactgcgtatcttaccctctataacatttcttttacttccctgcccattctgttgtacagtctgatggagcagcacgtcggtattgacgtattgaaaagagaccctacactgtatcgtgacgtggcaaagaacgcgctgctgcgatggcgcgtgttcatctactggacactgcttggcctgtttgatgcattggtgttcttcttcggagcgtattttgtctttgagaacacaacagtgacaagcaacggccagatcttcggcaattggacctttggcaccctggtgtttaccgttatggtgtttacggtcactctgaaactcgctttagacacccactactggacatggatcaatcacttcgttatatggggatccttactattctatgtcgtgttcagtctcctttgggggggcgtgatttggccttttttgaactaccagcggatgtactacgttttcatccaaatgctgtcatccggaccggcctggctggctattgtgctgctggtgaccatttccctactgcctgatgtgctcaaaaaagtcttatgtaggcagctgtggcccaccgcaaccgaaagggttcagaatgggtgcgctcagccgagagaccgagactccgaattcacaccactggcgtcacttcagagccccggctatcagtcaacctgtccctcagccgcctggtattcctctcattcacaacaggtgacccttgctgcctggaaagaaaaagtgtccacagagccgcctcctatattggggggctctcaccatcattgctcatcaattccgtcccactcttgcccacgatcccgggtcggtatgctagtctag

SEQ ID NO: 179829 - DNA, 3405 bp, synthetic construct
  misc_feature 1..3405: note = Description of Artificial Sequence: Synthetic coding sequence
  source 1..3405: mol_type = other DNA
atggactgcagcctggtgcggaccctggtgcaccggtactgcgccggtgaggagaattgggtagactctcgcaccatctacgtgggccaccgtgagcctccacctggcgccgaggcatacatcccccagcgctatccagataatcgtatagtctcgagcaaatacactttttggaattttatacctaagaatcttttcgagcaattccgccgcgtggccaatttctatttcctgatcatctttctggtccagctcattatagacacccccacttcgcccgttacaagtggtttaccattgttcttcgtcattacagtcaccgcaattaaacagggatatgaggactggctgagacacaaggccgacaacgctatgaatcagtgccctgtgcatttcatccaacatgggaagctggtgcgaaaacagtcacgcaagctaagggtaggcgacatagttatggttaaggaagacgaaacattcccatgtgaccttatattcctaagcagcaacaggggggacggcacatgccatgtgacaactgcaagcctcgacggcgagagttcccacaaaacacattacgcagttcaggacactaaagggtttcatactgaggaagatattggaggacttcacgctaccattgaatgcgagcagccacagccagacctttacaaattcgtggggagaatcaacgtttacagcgatctgaacgatcccgttgtcagacctctaggtagcgaaaatttattactgcggggagccaccctgaaaaataccgagaagatttttggggtcgccatatacacaggcatggaaactaagatggctctgaattatcaatccaaatctcaaaagaggtccgcagtggagaagtctatgaatgcttttctgatcgtctatctgtgtatcttgattagcaaggcgcttatcaatacggtgcttaaatacatgtggcaatccgagccttttagggatgagccctggtacaaccagaaaaccgaatcagagcgtcagaggaatctatttttgaaagcatttactgattttctggcattcatggtgctcttcaactacattatccccgtctccatgtacgtgactgtggagatgcagaagttcttaggatcatacttcatcacctgggatgaggacatgttcgatgaagaaactggcgaagggccacttgtgaacaccagtgaccttaatgaggagcttgggcaggtcgaatatatctttacagataaaaccggaaccctgaccgaaaataacatggagtttaaggagtgttgcattgagggccatgtgtatgtgccacatgtcatttgcaacggccaagtactcccagagtcaagcggtattgatatgatcgactcttcaccttccgtgaacggccgtgagagagaagagctcttcttccgcgccctgtgtctttgccacacagtgcaggtgaaagatgacgactccgtggacggacccagaaagtcgcctgatggaggcaagtcttgtgtttatatctcatcaagtcctgatgaggtcgctctggttgagggggtgcaaagattaggttttacttacctcagactcaaggacaactacatggagatactgaaccgggagaaccatatcgagagatttgagttattggagattctatccttcgatagtgtgcggaggaggatgtctgtgattgtaaagtctgccaccggcgaaatttatctgttctgcaagggcgccgatagtagcatctttcccagggtcatcgaggggaaggtcgaccagatccgcgcccgggttgaacggaacgccgtcgagggtcttaggacgctgtgcgtggcctacaagcgattgatccaggaagaatacgagggcatctgcaagctgcttcaggccgccaaagttgctcttcaggaccgggaaaagaaactcgcagaggcatatgagcagatcgaaaaggacctgaccctgctcggcgccacggcagtggaagatagactgcaggaaaaagcagctgatacaatcgaggctctgcaaaaggccggcatcaaggtgtgggtactgacaggtgacaagatggaaaccgcggcggccacctgctacgcctgtaagctctttcgcaggaatacacagctcctggagctcaccaccaagagaatcgaagaacagtcattgcacgacgtgctgtttgagctgagtaagactgttctgcgccactctggaagtctgacaagggacaatctctcgggcctgtctgctgacatgcaagattacgggttaattattgacggggctgctttgagccttattatgaagcctcgcgaagatggcagctccgggaactacagggaattattcttagagatttgccgcagttgctctgctgtgctgtgttgcagaatggcccccctccagaaagctcaaattgtgaagctcatcaagttttccaaagaacaccctataactctggctataggagatggagctaacgacgttagtatgatcttggaggcccatgttggcatcggagtgatcgggaaggaaggtagacaggccgcgcgcaatagcgattacgcgatacccaaatttaaacatctgaagaagatgctcctcgtacacgggcacttctattatattaggatatccgaactggttcagtactttttctataagaatgtttgcttcatctttccacagtttctttaccagtttttttgcggattcagccagcagaccctgtacgacacagcttacctcaccttgtataatataagctttactagcctaccaatcctcctctacagcttgatggaacagcatgtgggaattgacgtgctgaagagagaccctactctttatagagatgttgccaaaaatgccctgctgcgttggcgagtgttcatttattggacacttttaggactgttcgatgcactcgtgttttttttcggtgcctatttcgtgttcgagaacacgaccgtcacatctaatggacaaatttttggcaactggacttttggcaccctggtattcaccgttatggttttcacggtaacactgaaattggcacttgatacccactattggacctggatcaatcactttgtaatttgggggtccctcttgttctatgtcgtgttcagcctcctgtggggaggggtcatctggcccttcctgaattaccaaaggatgtactatgtgttcattcagatgctttcaagtggacccgcctggcttgcaatcgtcctgctcgtgaccatctcgctcctgcctgacgtgttgaaaaaggtgctatgccgccagctgtggcccacagctaccgagcgcgttcagactaagtctcagtgcttatcggtggaacaatccactatttttatgctatctcaaacatcctccagccttagcttctag

SEQ ID NO: 179830 - DNA, 2808 bp, synthetic construct
  misc_feature 1..2808: note = Description of Artificial Sequence: Synthetic coding sequence
  source 1..2808: mol_type = other DNA
tgatacgtgggccaccgggagcccccccccggcgccgaggcctacatccctcaacggtacccagacaaccgcattgtctcaagtaaatacacattttggaactttattcctaaaaacttgttcgagcagtttagacgagtcgccaatttttactttttaatcatcttcctggtgcagctaatcatcgacacaccaaccagtcccgttacatccggattaccactgtttttcgtgatcaccgtgacagccatcaagcaaggctacgaggactggctgcggcacaaagctgataacgcaatgaatcagtgtccagtccattttatacagcacggcaaattggtccgcaagcagagtcgcaagctgagagtcggagacatcgtcatggtgaaggaggatgaaacattcccctgtgacttaatctttttgagcagtaacagaggcgacggcacatgtcatgtaaccactgcctcactcgatggagagtcaagtcacaaaacacattatgccgtgcaggatacaaagggtttccatactgaagaagacattgggggtttacacgcaacgatagagtgtgaacagccacagccagacctctacaaattcgttggtagaattaatgtatacagcgacctcaacgatcccgttgtccgcccactgggtagcgaaaatctgctgctgcgtggcgcgaccctgaagaacactgaaaaaattttcggcgtggcaatctacactggcatggaaacaaaaatggctctcaactatcagtccaagagccagaagagatccgctgtggagaagtcaatgaacgctttcctgatcgtctatttgtgtatcctcatctctaaggctttgatcaacacggtgctaaaatacatgtggcagtccgagccctttcgcgatgagccttggtacaatcagaagaccgagtctgagaggcaaagaaatctcttcctgaaagctttcaccgactttctggcctttatggtgttgttcaactatatcatcccggtcagcatgtacgtgacggttgaaatgcagaagttccttggttcctacttcatcacctgggacgaagacatgtttgacgaggaaaccggggagggcccactggtgaatacttctgacctgaacgaagagttgggccaggtggagtacatttttactgataaaaccgggaccttgacagaaaataatatggagtttaaggagtgctgcatcgagggtcacgtgtacgtccctcacgtgatttgcaatgggcaggtgctgcccgagagctctggaatagatatgattgattccagcccatccgtcaatggaagggaacgtgaagagctctttttcagagcgctgtgtctgtgtcacacggtgcaagtgaaagacgacgactcagtggacggccccaggaagtctccagatggtgggaagtcttgcgtatacatctcgtcctcccctgacgaagttgcactggtggaaggcgtgcagagactggggttcacttacttgcgcttaaaagataattacatggagatcctgaatcgagaaaatcacatcgagcgtttcgagcttctggaaatccttagctttgattcagtcaggcgccggatgagcgtcatagtgaagtctgccacaggggagatctatctcttctgtaaaggcgccgactcaagcatttttccccgggtgatcgagggcaaagtggaccaaattcgggcgagggtggagagaaacgccgtcgaaggcttgagaactttgtgcgtggcctataaaagattgattcaagaagaatacgaaggcatctgcaaactcctgcaagccgcaaaggtcgcattacaggatcgcgagaaaaagctcgctgaagcttatgagcagatcgagaaggatctcaccctcttgggcgctactgcagttgaagatcgactgcaagaaaaagctgcggacaccattgaagcgttacaaaaggctggaataaaggtgtgggtccttacgggggataaaatggagaccgccgctgccacttgttacgcctgcaaactgtttagacgaaatactcagctactggagctgaccacaaagaggattgaagagcagtccctgcacgacgtgttgtttgaactatccaagacagtcttacggcactctgggtctctgacccgtgacaacttgtccggattgagcgccgatatgcaagactacggccttattatcgatggggcagcgttatctctgattatgaagccacgtgaagacgggtcttctggcaattatcgggaactgttcctggagatatgcaggagctgctctgccgtattgtgttgtagaatggcaccgctgcagaaggcgcagattgtgaagctgatcaaattctccaaggaacacccaatcaccctagcaatcggtgatggcgcaaatgatgtgagcatgattcttgaggcacatgtgggcataggagtgataggcaaagagggtcgccaagcagcccggaatagcgattatgccattcctaagtttaagcacctgaagaagatgctcctggtgcacggacacttctactacatcaggattagtgaactggtgcaatatttcttctataaaaacgtgtgcttcatcttcccccagttcctttaccagtttttctgcggcttcagtcagcaaaccctgtacgacacagcttacctcaccctctacaatatcagcttcacttcacttcccattctcctgtatagtctgatggagcagcacgtcggtatcgacgttctgaagcgtgaccctacactgtaccggtatcatcctcccaattccctgtcatag

SEQ ID NO: 179831 - DNA, 1119 bp, synthetic construct
  misc_feature 1..1119: note = Description of Artificial Sequence: Synthetic coding sequence
  source 1..1119: mol_type = other DNA
atgagcgtgatcgtgaagagcgccaccggcgagatctacctgttctgcaaaggggcagacagttccatctttcccagggtaattgaagggaaggtagaccagattagggctcgcgtggagaggaatgccgtcgagggtttacgcacactctgtgtagcttacaagcgccttatccaagaagaatacgagggcatttgcaaactccttcaggccgccaaggtcgccctccaagaccgcgagaaaaaactggcagaagcgtatgaacagattgaaaaagatctcacactgctcggcgctactgcagtcgaggatcggttgcaggagaaggctgccgacacaatcgaagctctgcagaaggcagggatcaaagtgtgggttctgacaggggacaagatggagactgccgctgcaacatgttatgcatgtaaactgttccgacgcaatactcaattgttggagcttacaaccaagcgcatcgaagagcaaagtcttcatgacgtactctttgaactgtctaagacggtcctccggcactcaggatccttaactcgggacaacctgtcagggttgtccgctgacatgcaggactacgggcttatcatcgatggtgcggccctttcactgattatgaagcctcgagaggacggcagcagtggcaattaccgagaactctttctggaaatctgccggtcctgcagtgccgtcctttgctgtagaatggcaccactgcagaaagcgcagatagtcaagctgataaagttctcaaaggaacatccaataaccctcgctatcggggatggcgctaatgacgtgagcatgatcttggaggcccatgtaggtattggagttatcggcaaagaggggcgtcaggctgcgcgcaattctgactacgccatccccaagttcaaacatcttaagaaaatgttgctggtgcatggacacttctactacattagaatatccgaattggtccaatatttcttttacaaaaatgtgtgcttcatctttccacaattcctgtatcagtttttctgcggattctcgcagcagggacgccgccaggagtgtcctgctgctctggcgagggtccaccttctcgacgcacctggcaccgtttag

SEQ ID NO: 179832 - DNA, 1059 bp, synthetic construct
  misc_feature 1..1059: note = Description of Artificial Sequence: Synthetic coding sequence
  source 1..1059: mol_type = other DNA
tgaagcatcttcccccgggtgatcgagggcaaggtggaccagatcagagccagggtggaaagaaatgctgttgaaggactcaggacattatgtgttgcatacaagaggttaattcaagaggaatacgagggaatttgcaagctgctccaggccgctaaagtggctctgcaggatcgcgaaaaaaaacttgcagaagcgtatgaacagattgagaaagatctcacactgctgggggccaccgccgtggaagatagactccaggaaaaagccgcggacacaattgaggccctgcagaaggcaggcataaaggtttgggtgctcacaggtgacaagatggaaaccgctgcagctacctgttacgcctgcaagttgtttaggagaaacacccagctgcttgagcttaccaccaagcgaattgaggaacagtcccttcacgacgttctttttgaactgtctaagactgtgctgcggcacagcggatccctgacccgcgacaatctgtctgggttgtcggccgatatgcaggactacggcctcatcatagacggcgccgccctgtcattaatcatgaagcccagagaagacgggtcatccggtaattacagggaactgttcctggaaatctgtaggagctgcagtgctgtactgtgctgtagaatggctccactacagaaggcacagattgtgaagctcattaaattctctaaggagcatccaatcactctcgctattggggacggcgcgaacgatgtgtctatgatcctggaagcccatgtgggtattggagttatcgggaaagagggaaggcaggctgccaggaactcagattatgcaatccccaaatttaaacatcttaagaagatgctgttggtccatggccatttttattacattagaatatctgagctggtgcagtattttttttacaaaaacgtgtgttttatctttcctcagtttctttaccagttcttctgtgggttctcacaacagggccggagacaggaatgcccagctgccctggccagggttcatctgctcgatgcccccggaacagtctag

SEQ ID NO: 179833 - DNA, 3405 bp, synthetic construct
  misc_feature 1..3405: note = Description of Artificial Sequence: Synthetic coding sequence
  source 1..3405: mol_type = other DNA
atggactgcagcctggtgcggaccctggtgcaccggtactgcgccggagaggaaaactgggtagactcgcgtaccatctatgtgggtcatagggaaccaccacctggtgcagaggcttacatcccgcagcgctaccctgataatcgcatcgtgtcctccaagtacacattctggaacttcatccctaaaaaccttttcgagcagttcaggcgcgtcgcaaacttctacttcctgatcatctttctggttcagcttataatagacactcctacttcccccgttacctcaggactccccctcttctttgtcatcacagtgactgccataaagcagggctacgaggactggttgcggcataaggcggataatgcaatgaaccagtgccctgtgcacttcattcagcacggaaagttggttcggaaacagagccgcaagctgcgcgtgggtgacattgtgatggtaaaggaggatgaaaccttcccttgtgatctcatatttttgtcctctaataggggagacggcacatgccacgtgactactgcaagcctggacggtgagtcttcgcataaaacccactacgcggtgcaggacaccaaagggtttcacacagaggaggatataggcggtctgcatgcgaccattgaatgcgagcagccacagccagatctctataagttcgtgggaagaatcaatgtctactcagatctgaatgaccctgttgtgagacctttaggttctgagaatctgcttctcaggggcgcgacactgaagaacacagagaaaatcttcggcgtagcaatttataccggaatggagaccaagatggctttgaattatcagtcaaagagccagaagcgatccgctgtggagaagagcatgaatgccttcttaatcgtctatctgtgcatcctaattagcaaagctcttataaacactgttctaaagtacatgtggcagtcagagccttttcgcgatgaaccttggtacaaccaaaagacagaatctgaacgccagcggaatcttttccttaaagcattcaccgacttcctggcatttatggtactcttcaactacataattccagtgtcaatgtacgtgacggttgagatgcaaaagttcctgggttcttatttcatcacctgggacgaagatatgttcgacgaggaaacgggggaagggccactggtgaatactagtgatctgaatgaggagctcgggcaagtcgaatacatctttactgataagactggtacccttactgaaaacaacatggaatttaaagagtgttgtatagaaggccatgtttacgtgccccatgtgatctgtaacggacaggtgctaccagagagctcgggtatcgatatgattgactcatctcctagcgtcaacggccgagaacgtgaggagctgttcttcagagctctttgcctgtgtcacacagtacaggttaaggatgatgacagcgttgacggcccaaggaaatccccggacgggggcaagtcttgcgtctacatttcaagtagtccggatgaggtagccctggtcgaaggcgtccagcgcctggggtttacttacctgcggcttaaagacaattatatggagatcctgaacagagaaaaccacatcgaacgcttcgaactgttagaaatactctcattcgattccgtgagacgtcgcatgagcgtaatcgtaaaatccgctacgggtgagatttacctgttttgtaagggcgccgattcctcaatttttccacgtgtgattgagggtaaagtggaccagatcagggcccgtgtcgagcgtaacgccgtagaaggcctacgaactctatgcgtagcgtacaagcgccttatccaggaggaatacgagggcatctgcaagctgctgcaggccgcaaaagttgccctgcaggacagggagaagaaattggccgaggcatacgagcaaattgaaaaggatcttactctattgggagcaacggctgtagaagacaggttacaagaaaaggcagctgacacgatagaagccctgcagaaagccggaatcaaggtctgggtgctgactggcgacaagatggagacagccgctgccacctgctatgcctgtaaattatttaggcggaacactcaactgttggagttgactacaaagagaatcgaggaacagagcctgcatgacgtgttgttcgagttgagcaagaccgtcctcaggcattcaggcagcttaacaagggacaacctcagtgggctgtccgcggatatgcaggattacggcttgataatagatggggccgcactttctcttatcatgaaaccgcgcgaagacggtagcagcgggaattatcgagagctgtttttggagatatgcagaagctgtagcgcagttctatgctgccgcatggcccccctgcagaaagctcagattgttaaattgataaaatttagcaaagagcaccccatcacactggccattggggacggcgccaatgacgtgagcatgattctggaagcccacgtaggtattggtgtgataggcaaagagggccgacaagccgcccggaacagcgactacgccattcccaagtttaaacatctaaaaaagatgctgcttgtgcacggccatttctattacatacggatctctgagctagtacagtattttttctacaagaatgtgtgctttatctttccccaatttctctatcagtttttttgtggtttttcccagcagactttgtatgacacagcttacttaacactgtacaatatcagcttcacaagcctcccgattctgctgtactccctgatggaacaacatgtgggtattgatgtgctgaagagggacccaactctgtaccgggacgttgctaagaacgcactcctgaggtggagggtgttcatctactggaccctactgggactctttgatgccttggtgtttttcttcggcgcatactttgtgtttgagaacaccaccgttacatcaaatggccagatttttgggaactggacattcggcactctggtgttcacggtcatggtcttcactgtaacactgaaactggctctggatactcattattggacctggattaaccactttgtcatctggggatccctcctattttacgtagtgttttccctgctgtggggtggcgtcatttggccattcctgaactatcaacggatgtactacgtttttattcagatgctgagctccgggcctgcatggctcgctattgtactactcgtgaccatttcccttcttccggacgtattaaagaaagtcctctgtcggcagctgtggcctactgccaccgaacgagtgcagaccaaaagtcagtgcttaagtgtagagcagtctaccattttcatgctgtcccagacaagcagcagcctgagtttctag

SEQ ID NO: 179834 - DNA, 3534 bp, synthetic construct
  misc_feature 1..3534: note = Description of Artificial Sequence: Synthetic coding sequence
  source 1..3534: mol_type = other DNA
atgtggcggtggatccggcagcagctgggcttcgaccccccccaccaatccgacacgagaaccatctacgtggccaataggtttccccagaatgggctctacactccccagaaatttatagataataggattatatcatctaagtacaccgtctggaactttgtcccaaaaaacttattcgagcagtttagacgcgtcgctaacttctactttctcatcatcttcctggtgcagctgatgatcgacacaccaacttcacctgtgacatccggactgcctcttttttttgttataaccgtgactgctattaagcagggctacgaggactggctgaggcacaactccgacaatgaagtcaacggagcacccgtctatgttgtgaggagcgggggcctcgtgaagacaaggtcaaagaacattagagtgggcgacatcgttcgcatcgccaaggacgagatcttccccgcagacctcgtccttctgtcctccgaccgcctggatggttcttgtcatgtcaccaccgccagccttgacggtgaaaccaatctgaagacgcatgtcgcggttccggaaacggccctattacaaactgtcgccaacctcgacaccctggtggccgtcattgaatgtcagcagccagaagccgatctatacaggttcatggggagaatgattataacgcagcaaatggaggagattgtgcggccactggggcccgaatcactgttgctaaggggagctcgcttgaagaatacaaaggaaatcttcggggtcgccgtttacactggcatggagaccaagatggctctgaactacaagagcaagagtcagaagcgttctgctgtggagaagtcaatgaacacttttttgatcatctacctggtgatcttgatctccgaggcagtgatttccacaatcctgaagtacacgtggcaggcagaagaaaagtgggacgaaccctggtataatcagaagactgagcatcaacggaatagtagtaagatcctgcggttcatctccgattttctcgccttcctggtgctctataatttcatcatcccaatctcgctgtacgtgacagtggagatgcagaagtttcttggatccttcttcatcggctgggatcttgacctgtatcatgaggagtccgaccagaaggcacaggtgaatacttcagacctgaacgaagaattaggccaagtggagtacgtttttacggacaaaacagggaccctgactgagaacgaaatgcagtttagggaatgcagtatcaatggaatgaaataccaagaaatcaacgggagactcgtgccagagggccctactcccgactcgtcggagggcaacttatcgtatttgtctagtctctctcatctaaacaacttgtcccaccttacgacttcctcctcctttcgcacctccccagagaacgagactgaacttatcaaggagcacgaccttttctttaaggcggtgtcgctgtgtcatacggttcaaatttccaacgtgcaaaccgactgtactggcgatggcccatggcaatcaaatctggcgccctctcagctggaatactacgcgtccagtccagacgaaaaagcccttgtggaagccgctgcacgaatcggcattgtcttcattggaaactcggaagaaactatggaggttaaaaccctaggcaagctcgaacgctacaaacttttacatattctcgagttcgactctgacagaaggagaatgtctgtgatagtgcaggccccttcaggtgagaaactgctgtttgcaaaaggcgctgaatcctctattttgcctaagtgcatcggaggcgagatcgaaaaaacccggattcacgtcgatgagttcgctctgaagggactgaggaccctctgtatcgcgtacagaaagttcaccagcaaagagtacgaggagatagacaaaagaatctttgaggcacgtacggctttacagcagcgagaagagaagctggccgccgtctttcagtttatagagaaggacctgatcctcctgggcgccactgccgtggaggatcgactccaggataaggtacgggaaactatcgaggccttgcgtatggctggcatcaaggtgtgggtgttaaccggcgacaagcatgagacagccgtcagcgtgtccctgtcttgcgggcacttccatcgaaccatgaatattcttgagctgataaaccaaaagagcgattcagaatgcgctgagcagctgaggcagctggcccgccgtattacagaggaccacgtaatccaacacggccttgtcgtggacggtacgtccctgtccttggcgctgcgggagcacgagaagctcttcatggaggtgtgcagaaactgctccgcagtcctgtgctgccggatggctccgttgcagaaagcaaaggttatcagactgatcaagatcagccctgaaaagcccatcaccctagctgtgggcgatggggctaatgacgtcagcatgattcaggaggcccacgtcggcatcggaattatgggaaaggagggcagacaggctgccaggaactccgactacgccatcgcccgctttaagttccttagtaaactgttatttgtgcacgggcacttttattatatccgcattgccaccctggttcagtatttcttttacaagaacgtgtgtttcataaccccccagtttctttaccagttctattgcctgttctcacagcagacattgtatgactccgtgtatctgacactgtacaatatttgcttcacatcgctaccaatactgatttatagcctcttagagcagcatgtggaccctcacgtactccagaacaagcctactctgtatagagacatctccaagaaccggctgctgtccatcaagacgtttctgtactggaccattttgggcttttcccatgcctttatttttttcttcggtagctatctgcttataggcaaagacacaagcctgttgggaaacggccagatgttcggaaactggaccttcgggactttggtgttcacagtcatggtcattacagtaactgtgaagatggcgctcgagacccacttctggacctggatcaatcatctcgtgacctggggatctattatcttttatttcgtctttagcctcttctacgggggtatcttatggccattcttaggctctcaaaacatgtattttgtgttcatccaactgctcagttccggttccgcctggttcgcaatcatattaatggtggtaacctgtctgtttttggatatcatcaaaaaagtgtttgacagacacctgcatcctacaagcaccgagaaagctcagctaacggaaacgaatgccggaatcaagtgtttggacagtatgtgttgcttccctgagggtgaggcagcctgtgcctctgtcggacgtatgctggagcgggtcatcggccgatgttctcccactcatatctcacgtagttggtccgcatcagacccattctacacgaatgatcgaagcatcctaaccctgtcgacaatggattctagcacctgctag

SEQ ID NO: 179835 - DNA, 315 bp, synthetic construct
  misc_feature 1..315: note = Description of Artificial Sequence: Synthetic coding sequence
  source 1..315: mol_type = other DNA
atgtacttcgtgttcatccagctgctgagcagcggcagcgcctggttcgctataattctgatggtggttacgtgcctgttcctagacatcatcaagaaggtctttgatcgccatttacatcctacgtctacggagaaagcccaaatgtattcaaataccgtggccttgtcagacgaattcatcgcattgcaacccttgagcagagctcgcaatcagctgagcaagttgagatggaaaaagatccgcgtgcagagcgctcagcacatgaacctgctcaaggccagcactgagggccgcacagttggaacttgctag

SEQ ID NO: 179836 - DNA, 4503 bp, synthetic construct
  misc_feature 1..4503: note = Description of Artificial Sequence: Synthetic coding sequence
  source 1..4503: mol_type = other DNA
atggaccccagcatgggcgtgaacagcgtgaccatcagcgtggaggggatgacttgcaattcatgtgtgtggaccatcgaacagcagatagggaaggtcaatggtgtacaccacattaaggtgagtctggaagagaagaacgccaccattatctatgatcctaaattacagacacctaaaacactacaggaggccatcgacgatatgggattcgacgccgtaattcataatcccgatcccttaccggtactgacagataccttatttctgaccgtgacagcgtccctcaccctgccgtgggatcatatccagtccacactacttaagactaagggcgtgactgacatcaagatctacccacagaagcgcactgtggccgtaacaatcataccaagcatcgtgaacgcgaatcagatcaaggaactagttcctgaattatccttggatactggcactcttgaaaagaaaagcggggcatgcgaagaccactcaatggcacaggccggggaagtcgtcctgaaaatgaaagtggagggcatgacttgtcattcttgcacctccactatcgaaggcaaaatcggtaagctgcagggtgtgcagaggattaaggtgtcacttgataaccaggaagccacgattgtatatcagcctcatctgattagcgtggaggaaatgaagaagcagatcgaagccatgggcttccccgcctttgtcaaaaagcagccaaaatacctgaagctgggggccattgacgtcgaaaggctcaagaatacgcccgtgaagagcagtgagggaagccagcagcgtagccccagctacactaacgactctacggctacctttatcatagacggcatgcattgtaaaagctgtgtgagtaatatcgagagcactctgtccgcgctgcagtatgtgagttcaatagtcgtgtcactggaaaacagatctgccattgtgaagtacaacgcgagctcggttacacccgagagtctgcggaaagctattgaggccgtgagcccggggctgtatagggtcagcataacatcagaggtggagagcacgagcaacagtccttccagttcatcactgcagaagatccccttgaatgtcgtctcccagccgctcacacaagagaccgttatcaacatagatggcatgacgtgtaactcctgcgtacagtctattgagggcgtcatctccaagaagccgggagtcaagagcattagagtctcccttgcaaactccaatgggaccgtggaatatgatcccttgctcacttctcccgagacacttagaggcgccattgaggacatgggatttgatgccaccctatctgacaccaatgagcccctggtcgtaatcgcccagcccagcagcgaaatgcctctactgacctctaccaatgaattttataccaagggcatgacaccagtgcaagacaaagaggaaggcaaaaactcatccaagtgctacatacaggttaccggaatgacctgcgctagttgcgtcgctaacattgaacgcaacctccgccgtgaagaggggatctacagtattctcgttgcgctaatggcaggcaaagctgaagtgcgatacaaccctgccgtgatccagcctcccatgatagccgagttcatcagagagctgggctttggggccaccgtcatcgaaaacgctgacgagggggatggcgttctggagctggtggtacgaggcatgacctgcgccagctgcgtgcacaagatcgagtctagcctcaccaagcacaggggcattctgtattgctcagtggcactcgccacaaataaggcccacatcaagtacgatcccgagattattggccctcgtgacatcattcataccattgaaagcctcgggtttgaggcaagcctcgtcaagaaagatagatccgcatcacacctggaccacaaacgggaaattcgccaatggcggcgatctttcctggtatctctgttcttttgcatccccgtcatgggtttgatgatctacatgatggttatggatcaccattttgcaaccctgcaccacaaccagaatatgtccaaagaggagatgattaacctgcatagcagcatgtttcttgagcgccagattctgcccggactctccgtgatgaacctgcttagctttctgttgtgtgtgcctgtgcaattctttggaggatggtatttctatattcaggcgtataaggccctgaaacacaagactgcaaacatggatgtgttgatcgttcttgctaccaccatcgccttcgcatatagcttgataattttgcttgtagcaatgtatgaacgggcgaaagttaatcctattacgttctttgacactcccccaatgttgtttgtctttatcgccctggggagatggttagagcacatcgccaagggtaagaccagtgaggctctggcaaagctcatctcactccaagctaccgaagccactattgtgacccttgactccgacaacattctcttaagtgaagagcaggtagacgtggagttagtgcagaggggggacataattaaggtagttcccggcggcaaatttcccgtcgacggcagagttatcgagggacattccatggtggatgagtctctcatcaccggtgaagccatgccggtggcgaaaaaacccggatcgaccgtaattgctggttcgattaatcaaaacgggtctctgctgatctgtgcaactcatgttggcgctgatacaaccctgtcacaaattgtaaaattagtcgaggaggcccagacatccaaggcccccattcagcagttcgccgataaactcagcggctactttgtgccattcattgtcttcgtgtccattgctacccttctcgtgtggattgtcattggcttcctgaatttcgagatagtggaaacttacttccctggatacaaccgaagcatttcgagaaccgagactattatcaggttcgcatttcaggcttccattacagtcctctgtatcgcttgtccatgttctctgggactggcgacaccaacagcagtgatggtcggaacaggtgtgggtgcacagaatggaatcctcatcaaaggaggcgagcctctggagatggcacacaaagttaaagtggtcgtgtttgataagacgggcacaattactcacgggacacccgtggtcaatcaagtgaaagtgctgactgagtcaaataggatttcacaccacaaaattctggctatcgtcgggaccgctgaatcaaatagtgagcaccccctgggaaccgcgattaccaaatactgcaagcaagagctggatactgaaaccctcggaacatgcatcgactttcaagttgtacctggttgtggcatcagttgcaaggttacaaatatcgaagggctgctgcacaaaaacaattggaacattgaggacaacaacatcaaaaacgcaagcctggtgcagattgacgcctcgaatgagcagagctcaaccagctctagcatgatcattgacgcgcaaatctcgaacgccctgaatgcacagcagtacaaggttctgatcggaaacagagagtggatgatccgcaatggacttgtgatcaacaacgatgtcaatgactttatgacagaacatgagaggaagggaaggaccgccgtcctggtggcagtggacgacgagttgtgcggactaattgccattgcagataccgttaagccggaagctgagctggcaattcatattttgaagtcaatgggccttgaagtagtcctaatgactggggacaactctaagaccgccagatccattgcctcccaggtgggaatcactaaggtcttcgctgaggttctgcccagtcataaggtcgcaaaggtgaaacaattacaggaggaggggaaaagggtcgctatggtgggcgatggcataaatgattcccccgccttggcaatggccaatgtcgggattgctattggcaccggaaccgatgttgctatcgaggccgccgatgtggtgctcatccgaaatgacctgctagacgtggtggcttctatagatttgagccgcgagaccgtcaaaagaatccgtattaacttcgtgtttgctctcatttacaacctcgtcggtatccccatagcagcaggagtcttcatgcccatcggtctggtgctgcagccgtggatggggtctgcagcgatggccgcgtcttcggtcagcgtcgtgctatcaagcttatttctgaagctgtaccgcaagcccacctatgagtcatacgagctgcccgctcgcagccagatcggacagaagagtcctagcgagatctcagtccacgtggggatcgacgacacaagtcgcaatagccctaaactagggttgcttgaccgcattgtgaattactcaagagcgagtatcaatagcctgttgtctgataagagatctctcaactctgtggtcacctctgaacccgacaagcactcgctcctcgtgggggattttcgggaagatgatgacaccgcattgtag

SEQ ID NO: 179837 - DNA, 4269 bp, synthetic construct
  misc_feature 1..4269: note = Description of Artificial Sequence: Synthetic coding sequence
  source 1..4269: mol_type = other DNA
atggaccccagcatgggcgtgaacagcgtgaccatcagcgtggagggaatgacctgtaattcatgtgtgtggacaatcgagcagcaaataggcaaagtcaatggtgtccatcatatcaaagtgtctctggaagagaagaacgccaccattatttacgaccctaaactgcagacccctaagacattgcaggaagctattgacgatatgggattcgacgctgtgatacacaaccccgatccactgcccgtgctcactgatacattgttcctcaccgtcaccgcatctctgaccctgccttgggatcacatccagagcacgctgttgaagaccaagggtgttaccgacatcaagatatatccacagaagcgaactgtggcggtcacaattatccctagcatcgtgaatgcaaatcagataaaagaactcgtgccagaattgagcctcgataccgggaccctagagaaaaagtcaggggcatgcgaagaccacagcatggcccaggccggcgaagtggttctgaaaatgaaggtggagggtatgacctgccactcatgcacctccactattgagggcaaaattgggaagctgcaaggagtgcagagaataaaggtctcattggataatcaggaggccacaatcgtctatcagcctcatttgataagcgttgaggagatgaagaagcagatcgaagccatgggatttcccgcttttgtgaaaaagcagcccaaatatctgaaactgggcgctattgatgtcgagcgtcttaagaataccccagtcaagtcaagtgagggtagtcagcagcgctccccctcttacacgaatgactcaacagctacgttcatcatcgacggtatgcactgcaaatcctgcgtgagcaacattgagtccaccctgagtgcattgcagtatgttagctcaattgtggtgtccctcgaaaaccggtccgccatcgtgaaatacaatgcttcaagcgtcactccagagagtctgcgtaaagccattgaggctgtcagccctggcctgtaccgggtcagtatcacgtcggaagtggagtccacaagcaatagcccttcttcttcctctcttcagaaaatcccactgaacgtggtgtcccaaccccttacacaggagacagtgattaatatcgatggcatgacctgtaacagttgcgttcagtcaattgaaggcgtgattagcaagaagccaggagtcaagtcgattagggtatcactggcaaactctaatgggaccgtcgaatacgatccactcctcacttcccctgaaacacttcggggggcaattgaggatatgggtttcgatgcgactctttccgatacaaacgagccactggttgtgatcgcccaaccttcatctgaaatgcccctcctcaccagcacaaacgagttttatactaagggaatgaccccggtccaggacaaagaggaagggaagaattctagcaagtgttatatccaggtgacaggcatgacctgtgcctcatgcgtggcgaatattgaacgcaatttgcggagggaagaaggtatttattctatcctggtggccctgatggcgggcaaggcagaagtgagatacaaccctgcagtaatacagccgcctatgattgccgagttcatccgggaactgggtttcggcgccactgttatcgagaacgccgacgagggggacggtgtgctggagcttgttgtgcggggaatgacttgcgcctcctgcgtgcataagatcgagtcgagcctgaccaaacaccggggaattttatattgttcggtcgctcttgctacaaataaagcacacattaagtatgatcccgagatcatcgggcccagagacataatccacaccatagagtctctcggatttgaagccagcctggtgaagaaggataggtcagccagccatctggaccacaaacgcgagatccgacagtggcgccgcagtttcctggtgagccttttcttttgtatcccagtgatggggctgatgatctatatgatggtcatggaccaccatttcgccacgctccatcataatcagaacatgtcgaaagaggagatgatcaacctccacagttctatgtttctggaaaggcagatccttcctggcctgtccgtgatgaacctgctttctttcttgttatgtgtgcctgtccaaggaaaaactagtgaagctcttgcaaaactcatttcattacaggccactgaagctaccatcgtgaccctggactctgacaacattctcctgagcgaggaacaggtggatgtggaactggtgcagcggggcgacattatcaaggtggtgccaggcggaaaattccctgtggatggccgcgtgatcgaaggccattctatggtggatgagtctctcatcaccggcgaagcaatgcctgttgccaagaagcctggctcaacagtcattgcaggatccattaaccagaacggctcactcctgatttgcgcaacccacgttggcgcggacaccacactgtctcagattgtcaaactcgtcgaagaggcgcagaccagtaaagcccccattcagcagttcgcagataaactgtccggctacttcgtccccttcatcgtttttgtgagtatagcgaccctcctcgtctggattgtaattgggttcctcaactttgagatagttgaaacctatttccccgggtataatcgatcgatttcccgtacggagactatcatccggtttgcattccaggcgtctattacagtgctctgtattgcatgtccctgttctctgggattggcaactccaactgctgtgatggtggggaccggcgtgggagctcaaaatgggattttgatcaaagggggcgaaccactggagatggcccacaaagtgaaggtagtcgtgttcgacaaaactgggacgattacacacggcactcctgttgtgaaccaggtgaaggtgctcacggagagcaacagaattagccatcacaaaatcctggccatcgtgggcacagctgagtcaaatagcgagcatcccctgggcactgcaattactaagtattgcaagcaggagcttgacaccgagacactcggcacctgcattgactttcaggtggtccccgggtgtggaatatcttgtaaagtgactaacatcgaagggctgttgcacaaaaacaactggaatatcgaggataataacattaagaacgcaagcctggtgcaaatcgacgcctctaatgagcagagctccacttcaagctcaatgatcatcgacgcccagattagtaacgccttgaatgctcagcaatacaaagtgctgatagggaatcgcgaatggatgatcaggaatggattggtcatcaataacgacgtcaatgacttcatgactgaacatgaacggaaggggagaacagctgttctggtggcggtagacgatgagctgtgtggccttatcgctattgcagatacagttaaaccagaagcagaacttgccatccatatccttaaatccatgggtctggaggtcgtgcttatgactggggacaactcaaaaacggcaagatccattgcatctcaggtgggaatcacaaaagtcttcgctgaagtgctcccgagccacaaggttgctaaggtcaagcagctgcaagaagagggtaaacgggtggccatggttggggatggcatcaatgatagtccggccctggccatggccaacgtcggaatcgccattggtacagggacggatgtggccatcgaagcagctgacgttgtcctcatcaggaacgaccttctcgacgtagtggctagcattgacttaagtagggaaactgtgaagcgtatccgaatcaactttgtattcgctttgatatataacctcgtgggtatccccattgccgcgggggtgttcatgccaatcggcctggtgttgcaaccctggatgggcagtgcagccatggccgcttcatctgtaagtgtcgttctttcctcgctgtttctgaagctgtacagaaaaccaacgtacgaatcttacgagctcccagcgagatcgcagattgggcagaaatctccttcagagattagcgtgcacgtaggtatcgatgataccagcagaaatagccccaagcttggcttgcttgacagaatcgtgaactattccagggccagtataaattcactgcttagtgataaaagaagtctaaactccgtagtgacatcggagcctgacaaacattcactcctagtgggcgattttcgtgaagatgatgacacggcactgtag

SEQ ID NO: 179838 - DNA, 264 bp, synthetic construct
  misc_feature 1..264: note = Description of Artificial Sequence: Synthetic coding sequence
  source 1..264: mol_type = other DNA
gagtgcaacgaggagatcaagatggaccccagcatgggcgtgaacagcgttactatttctgtggagggaatgacatgtaattcatgcgtgtggaccatcgagcagcagattggaaaagttaacggagtgcatcatatcaaggtgagcttggaggagaaaaacgctacaattatcttctacgcacattggttcggcttcgctgcacttgatgggatatgttccaatgggtgctttatctgcttctgtagcactttcttctcttag

SEQ ID NO: 179839 - DNA, 1512 bp, synthetic construct
  misc_feature 1..1512: note = Description of Artificial Sequence: Synthetic coding sequence
  source 1..1512: mol_type = other DNA
atggaccccagcatgggcgtgaacagcgtgaccatcagcgtggagggcatgacctgcaacagctgcgtgtggacaattgaacagcagatcggaaaggtcaatggagtgcatcatattaaggtaaaagtggtggttttcgacaaaacggggaccatcacccatggcacaccagtggtgaaccaagttaaggtgcttaccgaatccaaccgtattagccaccacaaaatattggctatcgtgggtaccgctgaaagcaactctgagcaccccctcggtactgccattaccaaatattgcaagcaggaattagacacagaaacattgggcacctgcatcgattttcaagtagtgccaggctgcggcatttcatgcaaggtcacgaacattgaaggactcctccacaaaaataattggaacatcgaggataataatataaagaacgcatccctcgtgcagattgacgcatcaaacgagcaatcctccaccagcagctcaatgattatcgatgcccagatttcaaatgctctgaacgcccagcagtacaaggtactaataggtaaccgagaatggatgatacgcaatgggttggtgattaataatgatgtcaatgattttatgaccgagcatgagcgaaaagggcgtaccgctgtgctggtcgccgtggatgacgagctgtgtgggctcattgctatcgctgacacagtgaagcccgaggctgagctcgccatccacatcttgaagtcgatgggcttggaggtcgttctgatgactggagataactctaagacagcacggtccatcgctagccaggtaggaatcaccaaagtctttgctgaagtgcttccaagccataaagtggccaaagtcaagcagttacaggaggagggcaaaagggtggcaatggtcggggacggtatcaacgactcacccgcactcgcaatggccaatgttggcatcgcgatcggaacaggcactgacgtggccatcgaagccgctgacgttgtactgatcaggaatgatctgttagacgttgtggctagtatagatctgagtcgcgaaaccgttaaacgaatccggatcaacttcgtgttcgcccttatctacaaccttgtaggaatacccatcgctgcaggagtctttatgccaatcggtctcgtgctgcagccctggatgggatcagccgctatggctgcctcttccgtgtcagtggtgctatcctctctcttcctgaaattatatagaaagcctacttacgaatcatatgagctgcccgctagatctcagatcgggcagaagtcacccagcgaaatctcagtgcatgtaggcatagatgatacatcccgcaactctcctaagttgggcttactcgatcgcatcgtgaactattcccgggccagtattaattcacttctgagcgataaaagatctcttaactctgtggttacgagcgagcctgacaaacattctctattggtgggagattttcgggaggatgacgataccgcgctctag

SEQ ID NO: 179840 - DNA, 2049 bp, synthetic construct
  misc_feature 1..2049: note = Description of Artificial Sequence: Synthetic coding sequence
  source 1..2049: mol_type = other DNA
cggaaccaggagtgcaacgaggagatcaagatggaccccagcatgggtgtgaattccgttaccatcagcgtcgagggtatgacatgtaactcttgcgtttggacgatagaacagcagataggcaaagtcaatggcgtccaccacatcaaggtcagtctggaggagaagaatgcaactatcatttacgatccaaagttgcagacacctaagaccctacaggaagcaattgatgacatgggatttgatgccgtaatacataacccagatcccctgcctgtgctcaccgatactctttttttgaccgtgacagcatcactgacgctcccctgggaccacattcagtcaacactgctgaagaccaaaggggtaacagatatcaaaatctacccccagaagaggacagtggctgtcactatcatcccctccatcgtaaatgccaatcagataaaggaactggtgccagagctgtccctggacactggaactttagagaagaagtcaggggcttgtgaggatcacagcatggctcaggccggtgaggtggttctcaagatgaaggtagagggaatgacatgccacagttgcacatccacaattgaagggaaaattggaaaacttcagggcgtccaacgcataaaggtttctctcgacaatcaagaagccactatcgtctatcaaccgcacttaataagcgtcgaggagatgaagaaacagatagaggccatggggttccccgcgtttgttaaaaaacaacccaaatacctaaaattgggggcaatcgacgtggagaggttaaagaatactcccgtgaaaagctccgaaggaagccaacagcgctccccaagctacaccaacgattccactgccacattcataatcgatggcatgcactgtaagagttgtgtgtctaacatcgaaagcacccttagtgctttacagtatgtaagcagtatcgtcgtgtcccttgaaaacaggtctgcaatcgttaaatacaacgccagttcagtgacaccggaatcccttagaaaagcaatcgaagcagtatctcctggtttgtacagagtttccattacgagtgaggtggaaagcacctctaacagtccaagttctagcagtctgcaaaaaatccctcttaacgttgtgtctcaacctcttacacaagagaccgtcattaatatcgacgggatgacctgtaactcttgtgtgcaatccatcgaaggcgttatctccaaaaagccaggagttaaaagcatccgcgtgtcgcttgcaaattccaacggtaccgtcgaatacgatcctctcctcacatctcctgagacactccggggggccatcgaagacatggggtttgatgcaacattgtctgatacaaatgaaccgctggtcgtgatcgcacagccttccagcgaaatgcccctgttaacgagcactaatgagttctatacgaaaggaatgacaccagtgcaagacaaggaagaaggcaagaactcctctaagtgctatatccaggttaccggaatgacttgtgcaagctgcgtcgccaacatcgagcgtaatctcaggcgagaggaaggtatttactccatcctggtagcactcatggcaggtaaagccgaggtgcggtacaaccctgctgtcatccagccacccatgatcgctgaatttatcagggagctcggctttggggccactgtgatcgaaaacgcggatgaaggagatggggtgctggaattagtcgtacggggcatgacctgtgcatcgtgcgtccacaagattgagtctagtctgacgaaacacagaggcatcctgtactgttcagtcgcccttgctaccaacaaagcgcacatcaaatacgatccagagattatcggaccccgcgatattatccacaccattgaagtcagtgcaaaaaacttgtgcttctgtgtgttgacatacctcatttcaaccccagtcaatcacttctggtttgcatccgatcggggcaatgagaaaaaatctaatagcttcgaacatttcaagcaggatctttcccaaaacctgatgtag

SEQ ID NO: 179841 - DNA, 825 bp, synthetic construct
  misc_feature 1..825: note = Description of Artificial Sequence: Synthetic coding sequence
  source 1..825: mol_type = other DNA
atggaccccagcatgggcgtgaacagcgtgaccatcagcgtggaggggatgacctgtaacagctgcgtttggactatcgaacagcaaattggcaaggtgaacggcgtacatcacattaaagtgagcctggaagagaagaacgccactattatttacgatcctaaactccagaccccaaaaactcttcaagaagccatcgatgacatgggattcgacgctgttatccacaatcccgatcctctgcctgtcctgacagacaccctattccttaccgtcaccgctagtttgaccctgccatgggatcatatacagtccaccctgcttaaaacgaaaggcgtgacagacattaagatctatcctcagaaaagaactgtcgcggttacaattatcccctcgatcgttaacgccaaccagataaaagagctggtgcccgaactatcgctcgatacgggcacacttgaaaagaaaagcggcgcatgtgaagaccactccatggcccaggctggcgaggtggtcctcaaaatgaaggtggagggaatgacctgccatagttgcacctcaaccatcgaaggaaagatcgggaaactgcagggggtgcagcggatcaaggtcagtctggataatcaggaggcgacaatagtatatcagcctcatctgatttcggtggaggagatgaagaaacagattgaggctatgggctttcctgcatttgtgaaaaagcagcccaagtatctcaagctgggtgcaatcgatgtggagaggctgaaaaacaccccagtcaagtcatctgagggcagtcagcagcggtctcccagttaccagtag

SEQ ID NO: 179842 - DNA, 546 bp, synthetic construct
  misc_feature 1..546: note = Description of Artificial Sequence: Synthetic coding sequence
  source 1..546: mol_type = other DNA
atgcggcccagcggcacctgcgccagctgcggcagcgaccccccccctcctacccaagttccctctagccgcaacgattgtggctcaaccgtgcccgacaatccttttgtacgcaccttacctcatacaactatgtctggccaccaactgcctcctgccggaacccagcgacccggacccgccgcctgcctggtccccggtagcttaccaagcttaccttcccagcctggcccttggggggctctcggtacagccgccgccgaaggaatgtcttgctccaatacaagaaccgcactcgaatttgctcttttccccaaggaaatgctgttggggtcctggtatggatggggactgagcctgtatcgaagagggaggtgccaggattccgctcaccctgaggaagacacttgcccacacggagagggcgccccagcccaagccggggaaagtgtgccctcacagcagttgtgtcaccatcccgccggtaactggggcggactgtactgggtgattggcaaagcttttagtctggcttggaactgttag

SEQ ID NO: 179843 - DNA, 642 bp, synthetic construct
  misc_feature 1..642: note = Description of Artificial Sequence: Synthetic coding sequence
  source 1..642: mol_type = other DNA
atgcgggtgcggggccccgcccggctgatcgccagcggcgcccggctgcttctccgcatgctgagtgcactgccaggatggggacctgctcaccttcaaaggccgctattggggccggctagttgtctgggtatcttacgaccagccatgactgcccactcgttcgcactgcctgtgatcatctttaccactttctggggtttggtgggcattgctggtccgtggtttgtgcctaagggaccaaaccgcggggtcataataaccatgctcgtcgccacagctgtgtgttgttatctgttgtgtcctgcactcgggatgactgtcgctcccctgagcctgaccacaccgtcctccggtccgtcccctacacagctgtgtctcgtgacatcctccctgctactggcacctcgagatccggatccacaaggcctccctggctcttggaagtcaagccagagctctcagccagcacgggccctgggcagcccaggccacagcagtggccgtggagatgttttgctacagtacccccactgcagcggtgtttgtcccctgtctcagggggatgctgctggcgagctggtatgggtggggtcttttcctctgcaaactggacagatgccaggactgtcgcccagctag

SEQ ID NO: 179844 - DNA, 495 bp, synthetic construct
  misc_feature 1..495: note = Description of Artificial Sequence: Synthetic coding sequence
  source 1..495: mol_type = other DNA
atgaccgcccacagcttcgccctgcccgtgatcatcttcaccaccttctggggcttggtgggcatcgcaggcccctggttcgtgcctaaaggtccaaacaggggagtaattatcactatgctggtagctaccgcagtgtgctgttatctcctgtgtcccgccctaggtatgactgtggcccccctgtccttaaccactccctctagtggcccgagccccacccagttgtgcctcgtgacttcaagtctgctgttggctcccagggaccctgatccacagggcctgcccggcagctggaagagctcccagtcttcacaacctgctagagccctgggtagcccaggacattcttccggcaggggggatgtgctgctgcagtacccacactgctctggggtatgcccattgtctcagggagatgccgccggcgagcttgtctgggttgggtcttttcctctgcagaccgggcagatgcctggcctgtcccctagctag

SEQ ID NO: 179845 - DNA, 393 bp, synthetic construct
  misc_feature 1..393: note = Description of Artificial Sequence: Synthetic coding sequence
  source 1..393: mol_type = other DNA
atgcgggtgcggggccccgcccggctgatcgccagcggcgcccggctgctcctgaggatgctgtccgctctccccgggtggggtcctgcacacctgcaaagacctctgcttgggcccgcctcctgtctgggcatcctgaggcctgctatgactgcccactcatttgctctgccagtgatcatctttacaacattttgggggctcgtgggcattgcaggcccatggtttgtccctaagggacccaatcggggtgtgatcatcactatgctagtggcaacagctgtttgttgctatcttttttggctgatcgccatcttggcacagctgaatcccctattcggcccccagctgaagaacgagactatttggtatgtgaggttcctttgggaatag

SEQ ID NO: 179846 - DNA, 246 bp, synthetic construct
  misc_feature 1..246: note = Description of Artificial Sequence: Synthetic coding sequence
  source 1..246: mol_type = other DNA
atgaccgcccacagcttcgccctgcccgtgatcatcttcaccaccttctggggtttggttggcatcgccggaccctggttcgtgccaaagggccccaaccgaggtgttatcatcactatgctggtcgccacagccgtttgctgttatttgttttggctgattgctatcttagctcagttaaacccattgttcgggccacagttaaagaacgagacaatatggtacgtccgctttctttgggagtag

SEQ ID NO: 179847 - DNA, 564 bp, synthetic construct
  misc_feature 1..564: note = Description of Artificial Sequence: Synthetic coding sequence
  source 1..564: mol_type = other DNA
atgaccgcccacagcttcgccctgcccgtgatcatcttcaccaccttctggggcctggttggtatcgccgggccttggtttgtgccgaagggtcccaacagaggcgtgattatcactatgttagtcgcgaccgctgtgtgttgctatctgttttggctcatagccatactggctcaactgaatccactttttggcccgcaactgaaaaacgagactatctggtgccctgcattggggatgactgtggcccccctttctttgaccacaccttcttcaggacccagccctactcaactctgtcttgtcacctcaagcttactgctggcccctcgggaccctgatcctcagggcctgcctggatcttggaagagtagccaatctagtcaaccagcccgcgcactgggctcacccggtcactcaagcggtcgaggggacgttctgttgcagtatcctcattgtagtggtgtttgtcccctgagccagggagacgcggcgggcgaattagtatgggtcggcagctttccgctgcagaccggacagatgcccggtctcagcccatcatag

SEQ ID NO: 179848 - DNA, 357 bp, synthetic construct
  misc_feature 1..357: note = Description of Artificial Sequence: Synthetic coding sequence
  source 1..357: mol_type = other DNA
atggccagccagagccagggcatccagcagctgctgcaggccgagaaacgtgcagctgagaaagtgtcagaggcccgaaaaagaaagaatcgcagactaaagcaggccaaagaagaggcgcaagccgaaatcgagcaatatcggctgcagagagagaaggaatttaaagctaaagaagctgccgcgctgggaagccgagggtcttgtagtaccgaggtcgaaaaagagacacaggagaaaatgacaatactacagacatacttccgacagaatcgcgacgaagttctggacaatctgctcgcttttgtgtgtgatatcagacctgagattcacgaaaattatcgcatcaacggatag

SEQ ID NO: 179849 - DNA, 357 bp, synthetic construct
  misc_feature 1..357: note = Description of Artificial Sequence: Synthetic coding sequence
  source 1..357: mol_type = other DNA
atggccagccagagccagggcatccagcagctgctgcaggccgagaaacgagcagccgaaaaggtggccgatgctaggaagcgcaaagctaggcggctcaaacaggcaaaggaagaggcccagatggaagttgagcagtaccgtagggaaagggagcacgagttccaatccaaacagcaggccgctatgggaagccagggcaatttatccgcggaagtggaacaggcgacccggcgccaggtccaagggatgcaaagttctcagcaacgcaatagggaaagagtgctcgctcagttactgggaatggtctgcgatgttagacctcaggtccatccaaactacagaatcagtgcttag

SEQ ID NO: 179850 - DNA, 237 bp, synthetic construct
  misc_feature 1..237: note = Description of Artificial Sequence: Synthetic coding sequence
  source 1..237: mol_type = other DNA
atggccagccagagccagggcatccagcagctgctgcaggccgagaagagagctgctgaaaaggttgcagatgcacggaagcggaaagctaggcggcttaagcaggcgactaggagacaagttcagggaatgcagagcagccagcagcgaaatcgcgagcgcgtgctagcccaattgctggggatggtttgcgatgtgcggccccaggtgcatcccaattaccggatatcagcatag

SEQ ID NO: 179851 - DNA, 357 bp, synthetic construct
  misc_feature 1..357: note = Description of Artificial Sequence: Synthetic coding sequence
  source 1..357: mol_type = other DNA
atggccagccagagccagggcatccagcagctgctgcaggccgagaaacgggctgctgaaaaggtcgccgacgctaggaagcgcaaggctagaagattgaaacaagccaaggaggaggcgcagatggaggtagagcaataccgacgggagagagagcacgagtttcaaagcaaacagcaggcggcaatgggcagccaaggcaacctttctgccgaggttgagcaggctaccagaagacaggtgcaggggatgcagagttcgcagcagcggaaccgtgaaagagtcctagcccagctcctgggaatggtgtgtgacgtccggccccaagtgcatccaaactatagaattagtgcgtag

SEQ ID NO: 179852 - DNA, 477 bp, synthetic construct
  misc_feature 1..477: note = Description of Artificial Sequence: Synthetic coding sequence
  source 1..477: mol_type = other DNA
ggcggccagcagcacgccgtgccctgcccccacggcggccccggcggccaggggcagccgagggccgaagctgctggcacaggacagggccaccgcgggggtcacagacccggtgccgtggtcggggctgctcagcatttgcacagaggcttaggggtagccggcgggggcccagggcccggcccagctgtgctgcagactagaaaagcccgaaggcttaagcaggccaaggaggaagctcagatggaagtagaacagtatcgacgggagcgagagcacgagtttcagtcaaaacagcaagctgcgatggggagtcaggggaacctgtcagccgaagtcgaacaggctacacgtcgccaggtgcaaggcatgcaaagcagtcaacagagaaatcgggagcgcgtattagcgcagctgcttgggatggtgtgtgatgtgagaccccaggtccaccccaattaccggatctccgcgtag

SEQ ID NO: 179853 - DNA, 237 bp, synthetic construct
  misc_feature 1..237: note = Description of Artificial Sequence: Synthetic coding sequence
  source 1..237: mol_type = other DNA
atggccagccagagccagggcatccagcagctgctgcaggccgagaagcgggcagccgagaaggtcgcggacgcccgaaaaagaaaggcacgcaggctgaagcaggccaccagacgacaagtccagggcatgcagagcagccaacagagaaaccgggaaagggttctcgcccagctcctgggtatggtatgtgacgtgcggcctcaggtccatcccaactacaggatcagcgcgtag

SEQ ID NO: 179854 - DNA, 237 bp, synthetic construct
  misc_feature 1..237: note = Description of Artificial Sequence: Synthetic coding sequence
  source 1..237: mol_type = other DNA
atggccagccagagccagggcatccagcagctgctgcaggccgagaaacgcgctgcagaaaaggtcgcggatgctcggaaacggaaggctcgacgacttaagcaggctacccgaagacaggtccaggggatgcagtcctcccagcagagaaaccgggagagggtcctggcccaactgttgggaatggtgtgtgacgtcaggccacaggtacatccaaactatcggatatccgcctag

SEQ ID NO: 179855 - DNA, 357 bp, synthetic construct
  misc_feature 1..357: note = Description of Artificial Sequence: Synthetic coding sequence
  source 1..357: mol_type = other DNA
atggccagccagagccagggcatccagcagctgctgcaggccgagaaaagagcagcagaaaaggtagccgacgcccgcaagcgcaaagctcgacgtctcaagcaggccaaggaggaagcccagatggaagtggaacagtataggcgggaaagagaacacgaattccagtcaaaacagcaagccgctatgggttcacagggaaatttgtccgctgaggtcgagcaggcaacacgacggcaggttcagggaatgcagtcatcacagcagaggaaccgggagagggtccttgctcagctcttggggatggtgtgcgatgtgcgtccacaggtgcatcccaattaccggatctcagcctag

SEQ ID NO: 179856 - DNA, 237 bp, synthetic construct
  misc_feature 1..237: note = Description of Artificial Sequence: Synthetic coding sequence
  source 1..237: mol_type = other DNA
atggccagccagagccagggcatccagcagctgctgcaggccgagaaacgtgcagccgaaaaggtggcagatgctagaaagagaaaagccagacgtctaaaacaggcaacaaggcgtcaggtccagggaatgcaaagctcccagcagcgcaaccgggagcgggttctggctcaattgctcgggatggtttgtgacgtgaggcctcaagtgcaccctaattaccgaatctctgcatag

SEQ ID NO: 179857 - DNA, 357 bp, synthetic construct
  misc_feature 1..357: note = Description of Artificial Sequence: Synthetic coding sequence
  source 1..357: mol_type = other DNA
atggccagccagagccagggcatccagcagctgctgcaggccgagaaaagggcagcggagaaagtggctgacgcccgcaaacggaaggctcgcaggctaaagcaagccaaggaggaggcccaaatggaggtggaacagtaccggagagaacgggaacacgaattccagtctaaacagcaggcagccatgggcagccagggtaacctgagtgcagaagtcgaacaggctacgaggcgacaggttcagggtatgcagagtagccagcagagaaatcgggagcgtgtcctagcccaactactcgggatggtatgcgatgtgcggcctcaagtccacccaaattacaggatatcagcttag

SEQ ID NO: 179858 - DNA, 237 bp, synthetic construct
  misc_feature 1..237: note = Description of Artificial Sequence: Synthetic coding sequence
  source 1..237: mol_type = other DNA
atggccagccagagccagggcatccagcagctgctgcaggccgagaagcgggccgcggaaaaggttgcagacgctcggaaacgcaaggcgcgacgcctgaagcaggccacgaggcgacaagtccaagggatgcaatcatctcagcagcggaatagggagcgggtgctcgctcagctgctgggaatggtctgcgacgtgcggccgcaagtacatcccaattacagaattagcgcctag

SEQ ID NO: 179859 - DNA, 237 bp, synthetic construct
  misc_feature 1..237: note = Description of Artificial Sequence: Synthetic coding sequence
  source 1..237: mol_type = other DNA
atggccagccagagccagggcatccagcagctgctgcaggccgagaagcgcgctgccgaaaaggtagccgacgcccgcaaacgcaaggcgcggagacttaagcaggcaaccagaaggcaggtgcaaggtatgcaatcaagccagcagagaaaccgggaacgtgtgctggcacagcttctgggtatggtgtgcgatgttaggccacaagttcaccccaactatcgtatcagcgcctag

SEQ ID NO: 179860 - DNA, 357 bp, synthetic construct
  misc_feature 1..357: note = Description of Artificial Sequence: Synthetic coding sequence
  source 1..357: mol_type = other DNA
atggccagccagagccagggcatccagcagctgctgcaggccgagaaaagggccgccgagaaagtagctgatgctcgaaagagaaaagcccgacggctgaagcaggccaaagaagaggcccagatggaggtggagcagtatagacgcgagcgggagcatgaatttcagagtaagcagcaggcggctatgggctctcagggaaacctgagcgcagaagtggagcaggccacccgacgacaagttcagggtatgcagtcatctcagcagcgaaatcgtgagcgcgtcttagcacaactgctgggcatggtctgcgacgtgcgtcctcaagtacacccaaactataggataagtgcctag

SEQ ID NO: 179861 - DNA, 237 bp, synthetic construct
  misc_feature 1..237: note = Description of Artificial Sequence: Synthetic coding sequence
  source 1..237: mol_type = other DNA
atggccagccagagccagggcatccagcagctgctgcaggccgagaaacgcgcagccgaaaaagtggccgatgcaagaaaacgtaaggcccgacggctgaaacaggcaaccaggcgccaggtccaggggatgcagagctcccaacagcgcaatagagagagagtgctagcccagctccttggtatggtctgtgacgtgcggccacaggttcaccccaactatcggatcagcgcctag

SEQ ID NO: 179862 - DNA, 357 bp, synthetic construct
  misc_feature 1..357: note = Description of Artificial Sequence: Synthetic coding sequence
  source 1..357: mol_type = other DNA
atggccagccagagccagggcatccagcagctgctgcaggccgagaagagagctgctgagaaggtcgctgatgcaaggaaacggaaggcacgcagactgaagcaagcaaaggaggaagcacagatggaagtcgagcagtatcgaagggagagggagcacgaatttcagtctaagcaacaagctgctatggggagccagggtaacctgagtgcagaagtagaacaggcaaccaggcggcaggtccagggcatgcaatccagccagcagcggaatagggagcgggtgctggcccagctgcttggaatggtttgtgatgtgaggcctcaggtgcatccaaactaccgaatttccgcttag

SEQ ID NO: 179863 - DNA, 357 bp, synthetic construct
  misc_feature 1..357: note = Description of Artificial Sequence: Synthetic coding sequence
  source 1..357: mol_type = other DNA
atggccagccagagccagggcatccagcagctgctgcaggccgagaagcgagcggctgagaaggtggcggacgcccgtaagcgaaaggctaggaggctgaagcaggccaaggaggaagcacagatggaagtcgagcagtaccggagagagagagagcatgagtttcagagcaagcagcaggcagccatgggctcccagggcaacctgtccgcagaggttgaacaggctactagacgacaggtacaggggatgcagagctcgcagcaacgtaaccgggagcgggtgttggcacagttgttagggatggtctgtgacgtccgcccccaggtacatcctaactatcggatttccgcatag

SEQ ID NO: 179864 - DNA, 234 bp, synthetic construct
  misc_feature 1..234: note = Description of Artificial Sequence: Synthetic coding sequence
  source 1..234: mol_type = other DNA
atggaggtggagcagtaccggcgggagcgggagcacgagttccagtctaaacaacaagccgcaatggggtctcaaggcaatttgagcgccgaagtcgaacaggccactagacggcaagtccaaggcatgcagagtagtcagcaacgcaaccgggagagagtgcttgctcaacttttaggtatggtgtgcgacgtgagacctcaggtgcatcccaactatagaatctctgcctag

SEQ ID NO: 179865 - DNA, 348 bp, synthetic construct
  misc_feature 1..348: note = Description of Artificial Sequence: Synthetic coding sequence
  source 1..348: mol_type = other DNA
gtggagcccggcatccagcagctgctgcaggccgagaagcgggccgcagaaaaggtggcggacgctagaaagaggaaagcccgccggctgaaacaggcaaaggaagaggcccagatggaggtcgagcagtatcgccgcgagcgtgagcatgaatttcaatccaagcagcaagctgctatgggatcacagggaaacctgagcgccgaagttgagcaggccacgcgccgtcaggtccaggggatgcagagtagccagcagagaaatagagagagagtactggcacaattgttgggcatggtttgcgatgtgaggccccaggtgcaccccaactatcggatctctgcctag

SEQ ID NO: 179866 - DNA, 468 bp, synthetic construct
  misc_feature 1..468: note = Description of Artificial Sequence: Synthetic coding sequence
  source 1..468: mol_type = other DNA
atgagcgagagcaagagcggccccgagtacgccagcttcttcgccgttatgggggcctctgcagcaatggtgtttagcgcactcggggcagcttacggaacagccaagtcaggtacaggcatagcagccatgtccgtaatgcgccctgaacagatcatgaaatctataataccggtggtgatggccggaattatagcaatatacggcctggtcgtagccgtgctcatcgccaactcgttgaacgacgacatctcactctacaagtcctttcttcagctgggggccggccttagtgttgggctatccggtttggccgctggattcgcgatcggaattgttggagacgccggagtgaggggcacagcgcagcagccaagactgttcgtaggcatgattctgatcctcatctttgcagaggtcctggggctgtatggcctaatcgtcgcccttattctgtccacaaaatag

SEQ ID NO: 179867 - DNA, 477 bp, synthetic construct
  misc_feature 1..477: note = Description of Artificial Sequence: Synthetic coding sequence
  source 1..477: mol_type = other DNA
atgtggagcaacctgggcatcggcctggccatcagcctgagcgtggtaggagcagcgtggggcatctatattactggcagttctatcatcgggggaggggtcaaggctcccaggatcaaaaccaagaatctggtgtccatcatcttctgtgaagctgtggcgatctacggaatcattatggctatcgtgatctctaatatggccgagcctttttccgctacagatccgaaggctatcggccatcgtaattaccatgctggatactccatgttcggcgcaggccttaccgtgggactctcaaacttgttttgtggagtgtgcgtcggaattgtgggttctggagcagccctggcggacgcccagaacccatccctgttcgtcaaaatactcatcgtcgagattttcgggtcagctataggtttgtttggggtcatcgtcgccatcctacagacctcacgcgtgaagatgggcgactag

SEQ ID NO: 179868 - DNA, 129 bp, synthetic construct
  misc_feature 1..129: note = Description of Artificial Sequence: Synthetic coding sequence
  source 1..129: mol_type = other DNA
gtgggcagcggcgccgccctggccgacgcccagaaccccagcctgttcgttaaaatcctgatcgtcgaaatcttcggtagcctggcttccctgggcagctccagtcaattcttcaggccccctgaatag

SEQ ID NO: 179869 - DNA, 759 bp, synthetic construct
  misc_feature 1..759: note = Description of Artificial Sequence: Synthetic coding sequence
  source 1..759: mol_type = other DNA
atgaccggcctggccctgctgtacagcggcgtgttcgtggccttctgggcttgcgcactagctgttggagaagccggttcatggagagcaggagccgctagccgcccatcctggcccggcaggaacagtgcaggtaagtggcccgcaggcaacacagggccacctcgcgcgcttcaccccagactctggggtttagcccccgcccgagcaagcgactctgataaaggtgatcctgactttcagctgctcgaggaggggtttttaactgaaacaagtccgtttatgtggtcaaatcttggaatcggactggcgatttctctgtccgtggtcggcgccgcctggggaatttacattacaggctcatccatcattggtgggggagtgaaagctccacgcatcaaaactaaaaatctagtgagcattatattctgtgaggctgtcgcaatctatggcatcattatggccattgtgatctcaaatatggccgagcccttttccgcaaccgacccgaaagcaatagggcatcgtaattatcacgcgggctactcgatgttcggagctggtcttacggttggattatcgaatctgttttgcggagtttgcgtgggtattgtaggctcaggcgccgccctcgctgatgcacagaatccatctctctttgtgaagattttgatcgtggaaatcttcggatcagccatcggactgtttggcgtcatcgtggccattttgcagacctccagggtcaagatgggcgattag

SEQ ID NO: 179870 - DNA, 618 bp, synthetic construct
  misc_feature 1..618: note = Description of Artificial Sequence: Synthetic coding sequence
  source 1..618: mol_type = other DNA
atgaccggcctggccctgctgtacagcggcgtgttcgtggccttctgggcttgcgcactggccgtcggagtgtgctatacaattttcgacctgggatttaggttcgacgtggcatggtttttgaccgagacctccccattcatgtggtcaaacctgggaatcggactcgcgatatcacttagcgtggtgggcgcagcttggggaatctatatcacaggcagctctattatcgggggtggggtcaaagcccccagaatcaagacaaagaatctcgtgagtataattttctgtgaggccgtggcgatttacggcatcatcatggccatcgtgatcagcaatatggccgagcccttctcggccacagaccctaaagctatcggccaccgcaattatcacgctggctactccatgtttggcgctgggttaaccgtcggcctttcgaatctgttctgtggcgtgtgcgtgggcatagtcggaagcggcgccgcactcgccgatgcccaaaacccctcattatttgtgaaaatcctaatcgttgagatcttcggaagtgccatcggcctattcggagtaattgtggccatactgcagacaagtcgggtgaagatgggtgattag

SEQ ID NO: 179871 - DNA, 261 bp, synthetic construct
  misc_feature 1..261: note = Description of Artificial Sequence: Synthetic coding sequence
  source 1..261: mol_type = other DNA
atgtggagcaacctgggcatcggcctggccatcagcctgagcgtggttggggcagcttggggtatctatattacaggttcctccatcataggcggtggcgtgaaagccccccggataaaaaccaagaaccttgtgtctatcatcttctgcgaagcagttgccatctacggtattataatggcgattgtgatttctaatatggctgaaccatttagcgccaccgaccctaaagcaattggacacagaaactaccacgcatag

SEQ ID NO: 179872 - DNA, 477 bp, synthetic construct
  misc_feature 1..477: note = Description of Artificial Sequence: Synthetic coding sequence
  source 1..477: mol_type = other DNA
atgtggagcaacctgggcatcggcctggccatcagcctgagcgtggtgggcgcggcctggggcatttacataacaggctcatctatcattggagggggcgtaaaagccccaagaattaagactaagaacttagtgagtatcatattctgcgaggcggtcgccatctacggaattattatggccattgtgatctctaatatggctgagccgttctccgcgactgatccaaaggccattggccaccgaaattaccacgctggctacagcatgttcggggccggccttacagtcggacttagtaatctgttttgtggagtttgtgtgggcatcgtcgggtctggcgccgcgctcgctgatgcccagaatccttcactgtttgtaaaaatcctcattgtggaaatctttggctctgcaattggtctgtttggcgtgatagtggccatcttacagacctcacgcgtcaaaatgggtgattag

SEQ ID NO: 179873 - DNA, 786 bp, synthetic construct
  misc_feature 1..786: note = Description of Artificial Sequence: Synthetic coding sequence
  source 1..786: mol_type = other DNA
atgaccggcctggccctgctgtacagcggcgtgttcgtggccttctgggcttgcgctttagctgtcggagtttgttacaccatattcgatctggggttccggttcgatgtggcttggttcttgacagaaacctctccgtttatgtggagcaacctgggaatcgggctcgcaatctcgctgagtgtcgtgggagctgcatggggcatttatattacggggtccagcattataggtggtggagtgaaggccccccgaatcaaaactaaaaatttggtttctatcatcttctgtgaagcagttgctatttacggcattattatggctattgtaatcagcaatatggccgaaccattttccgccactgaccccaaagccatcggccaccgcaattatcacgccggctacagtatgtttggagctggacttactgtgggcttgagcaacctgttttgtggagtctgcgtcggcattgttgggtctggcgctgctttagccgatgcccaaaatccatctctgttcgtcaagatcctaatcgtggagattttcggcagtgccataggcctctttggagtaatagtcgctattttgcaggtgatgaatcccctcggcaaaccactctgtccttgccctcagccgtccctgacgctgttactagagaaactcaaatgttctccatcattacctatcacgattgattcgcctaaacagctgccgccccctcactttcacctcctggttttttcctacaggggctcgttattcttgagtctgatctggtgccattag

SEQ ID NO: 179874 - DNA, 681 bp, synthetic construct
  misc_feature 1..681: note = Description of Artificial Sequence: Synthetic coding sequence
  source 1..681: mol_type = other DNA
atggccctgagcgacgccgacgtgcagaagcagatcaagcacatgatggcctttattgagcaggaagccaacgagaaggctgaagagattgatgctaaagccgaagaggaatttaatatcgaaaaggggcgccttgttcaaacccagcggctgaagataatggagtactacgagaaaaaggagaaacaaattgagcagcagaaaaagatccagatgagcaatctaatgaatcaagcccgactaaaggttctccgggcacgggatgatctgattaccgacctcttgaacgaggctaagcaaagactgagcaaagttgtgaaggatactaccaggtatcaggtgttgcttgacggcctggtactgcagggcttgtatcaattacttgaaccgcgcatgatagtgcgttgcaggaaacaggattttccgttagtcaaggccgcagtgcagaaggcgatcccgatgtataaaatcgccaccaaaaatgacgttgacgtacaaatcgaccaggagtcgtatctgccggaggatattgcagggggcgttgagatctataacggcgatagaaagattaaggtgtcgaacacgttagaaagtaggctcgatctcatcgcgcagcagatgatgcccgaagtgagaggggcattgtttggtgctaacgccaaccgcaagtttttggattag

SEQ ID NO: 179875 - DNA, 591 bp, synthetic construct
  misc_feature 1..591: note = Description of Artificial Sequence: Synthetic coding sequence
  source 1..591: mol_type = other DNA
atggccctgagcgacgccgacgtgcagaagcagatcaagcacatgatggctttcattgaacaggaagctaatgagaaggccgaagaaattgacgccaaagctgaggaggaatttaatattgaaaaggggagactggtgcagacccagcgtttgaaaataatggaatattatgagaagaaggagaaacagattgagcagcaaaagaagattcagatgtccaatttaatgaaccaagccaggcttaaagtactgagggcacgcgatgatctcataacaggcctgtaccagctcttggaacctcggatgatcgtgaggtgccgcaaacaggattttcctcttgtaaaggccgctgtacagaaggccatcccaatgtacaagatagccactaagaacgacgtcgatgtgcagattgaccaggaatcatatctccccgaagatatcgccgggggagttgagatctacaacggcgaccggaagattaaggtatcaaatactcttgagtctcggttggacctcatcgctcaacaaatgatgcccgaagtgcgcggagctctctttggcgctaacgccaaccgcaaatttctcgattag

SEQ ID NO: 179876 - DNA, 615 bp, synthetic construct
  misc_feature 1..615: note = Description of Artificial Sequence: Synthetic coding sequence
  source 1..615: mol_type = other DNA
atggccctgagcgacgccgacgtgcagaagcaggccgaggaggagttcaacatcgagaaagggagactcgttcaaacacaacgactgaaaattatggagtattacgagaaaaaggaaaagcaaatcgagcagcagaagaagattcagatgtctaatctgatgaatcaggcccgcctgaaggtgctaagggcgagggatgacttaatcacggacctgctgaacgaggccaaacagcgtctttccaaggtagtaaaggacacaacccgctaccaggtcctactggacggcctcgttctgcaggggctgtatcagctcctggagcctagaatgatagtgcggtgtagaaagcaggacttccccttggtcaaggctgcggtgcaaaaggcaatccccatgtataagatcgctactaagaatgatgtggacgtccagatcgaccaggagagctacttacctgaagatatcgccggcggcgtagagatatacaacggcgaccgcaagattaaggttagtaacaccctggaaagccggttagacttgattgcacaacagatgatgccagaggtgaggggagcactgttcggcgcaaatgccaataggaaatttcttgactag

SEQ ID NO: 179877 - DNA, 1056 bp, synthetic construct
  misc_feature 1..1056: note = Description of Artificial Sequence: Synthetic coding sequence
  source 1..1056: mol_type = other DNA
atgagcttcttccccgagctgtacttcaacgtggacaacggctacctggagggtttagtgcggggcctcaaagccggggttttatctcaggcggattacctcaacttggtgcagtgtgaaactctcgaagatctgaaactgcatctgcaatcgaccgattatggaaactttttggccaacgaggcgagcccgcttacagtcagcgtaatcgacgacagactgaaagagaagatggtggtcgaattccggcacatgcggaaccacgcttacgaacctttagcgtcttttctcgacttcatcacgtactcttatatgattgataatgtcatcctgctgatcacagggacattacatcagagaagtattgccgaactggttccaaagtgccaccccctgggctctttcgaacaaatggaagcagtgaatatcgctcagacacccgccgaactttataatgccattctggtcgacactccactcgcagccttttttcaggactgtatatcggaacaggacctggatgaaatgaacatcgagataatccggaacaccctctacaaggcatacctcgaatcattctacaaattctgtacacttctggggggaacaaccgcagatgcaatgtgtcctatccttgagttcgaggccgacagaagagcattcatcattacaattaattctttcggaaccgaacttagcaaagaagatagagcaaaactattcccccattgtggcagattgtaccccgagggccttgctcagctcgctcgagccgatgactatgaacaagttaagaacgtggccgactactacccagaatacaagctgcttttcgagggagccgggtccaaccctggggataaaaccctggaagatcggttcttcgagcacgaggtgaagttaaacaaacttgcatttctgaaccaattccatttcggcgttttctatgcttttgtgaagctgaaggagcaggaatgccgcaacattgtttggatcgccgaatgcattgcccagagacatagggccaagattgacaattacattcccatattctag

SEQ ID NO: 179878 - DNA, 825 bp, synthetic construct
  misc_feature 1..825: note = Description of Artificial Sequence: Synthetic coding sequence
  source 1..825: mol_type = other DNA
atggtggtggagttccggcacatgcggaaccacgcctacgagcccctggccagttttttggattttattacatatagctacatgatcgataacgtgattctcctgattactgggacgctgcatcaaaggtcaatcgccgagctggtgccaaagtgccacccactgggatccttcgaacagatggaagctgttaacattgctcagaccccggctgagttgtacaacgcaatcctggtggacacccccctggctgcattcttccaagactgcatttcagagcaagacctcgacgagatgaatattgagattatcaggaatactctgtacaaggcttacctagagtccttctacaagttctgcactcttctgggaggcaccacagctgatgccatgtgtccaatcctcgagttcgaagcagaccgacgagcattcatcatcacgataaactcctttgggactgaactgtctaaggaagatcgcgctaaactgtttcctcattgtggaaggctttatccagaagggctggcgcaactagcccgcgctgatgattatgaacaggtgaaaaatgtggcagattattatcccgagtataagctactgttcgagggcgccggaagtaacccgggagacaagacgctggaagaccggttttttgaacatgaagttaaactaaacaaactggcttttttgaatcagtttcatttcggcgtcttctacgcttttgtgaagctgaaagagcaggagtgtcgcaatattgtatggattgccgagtgtatcgcccagcgtcaccgtgctaagatcgataattacatccccattttctag

SEQ ID NO: 179879 - DNA, 1179 bp, synthetic construct
  misc_feature 1..1179: note = Description of Artificial Sequence: Synthetic coding sequence
  source 1..1179: mol_type = other DNA
atgagcttcttccccgagctgtacttcaacgtggacaacggctaccttgagggcttggtccgtgggctgaaggccggcgtgctatctcaggcggattatcttaacctggttcaatgtgaaacactggaggatctcaagctgcacctgcagtcgacagactacgggaactttctcgctaatgaagcaagtcccctgactgtcagcgtcatagatgacagattgaaggagaaaatggtggtggagttccgccatatgcggaatcacgcctacgaaccactggcctctttcctcgatttcatcacacaggagtctgaggcaggcacacccgaagggccaggaaacatgcctaagttggggtctcgcccatcaccggggcatcggcccccttttctcagagtatctcttctcccttggccaccctcatcgtacagctatatgatcgataacgtcattctgctcattactgggacattgcaccagcggagcatcgccgaactcgtgcctaaatgtcacccactcgggtctttcgaacagatggaggcagttaacatcgcacagaccccagccgagttgtacaacgctatcttagtcgacacacccctggcggcgttcttccaagattgcatctccgaacaggatctggatgagatgaatattgaaattatacggaacaccctttataaggcgtatctggagagtttctacaagttctgcactttactgggcggcacaaccgccgatgccatgtgccccatcctcgaatttgaagccgataggcgggctttcattattacgataaatagcttcggaacggaactctcaaaagaagaccgagccaaactattccctcactgcggtcggctctatcccgaagggttggctcagttggctagagctgacgattatgagcaggtcaaaaatgttgccgactattaccctgagtacaaattgctttttgaaggagctgggtcaaacccaggcgacaaaacattggaagatcggttctttgagcacgaggtgaagctcaacaaacttgcctttttgaatcagtttcattttggagtattctacgctttcgttaagttgaaagagcaagagtgcaggaatatcgtatggatcgctgagtgtattgcacagcgccaccgggccaagatcgacaactatatccccatattctag

SEQ ID NO: 179880 - DNA, 1149 bp, synthetic construct
  misc_feature 1..1149: note = Description of Artificial Sequence: Synthetic coding sequence
  source 1..1149: mol_type = other DNA
atgaccgagttctggctgatcagcgcccccggcgagaagacctgccaacaaacatgggagaagctccatgcagctacatccaaaaataacaacctggccgtgacctctaagttcaatattcccgacctcaaagtcggtacactcgacgtgttagtgggtctgtcggatgagctggccaagctggacgcgtttgtcgagggagtggtcaagaaggtggcccaatatatggcagatgtactggaggatagtaaggataaggtgcaagaaaatcttctggcgaacggagtggatctggtgacttatatcacacggttccaatgggacatggccaagtacccaatcaaacagagcctgaaaaatatttcagaaataatagccaagggtgtcacccagatcgacaatgatctcaagagtagagccagcgcctacaataatctaaagggaaatttacagaatctcgaacgcaaaaatgctggatcactcttgacaaggtctcttgcggaaatcgtaaagaaggacgattttgtgctggacagcgagtacctggtgacactactggttgtggttccgaagctcaatcataacgactggatcaagcagtatgagacactcgcggagatggtggtcccccggtcaagtaatgtcctgtcagaggatcaggattcttacctgtgtaatgtcacccttttccgcaaggccgtggatgattttaggcacaaggcccgcgaaaataaattcattgtgcgcgacttccagtacaacgaagaagagatgaaggccgacaaagaggagatgaatcgcctctccacagataagaaaaagcaatttgggccgctggtgaggtggctgaaagtgaacttcagtgaggctttcatagcgtggatccatgtgaaagccctccgagtgttcgtcgaatccgttcttcgctatggtctgccagttaattttcaggccatgctcttgcagccaaacaaaaaaaccttgaaaaaactgagagaagttctacatgaattgtacaaacacttggatagtagtgctgctgctatcattgacgctccgatggatatccccggtttaaatctcagtcaacaggagtattacccatacgtttactacaagatcgactgcaacctgctagagtttaagtag

SEQ ID NO: 179881 - DNA, 1149 bp, synthetic construct
  misc_feature 1..1149: note = Description of Artificial Sequence: Synthetic coding sequence
  source 1..1149: mol_type = other DNA
atgaccgagttctggctgatcagcgcccccggcgagaagacctgccaacagacctgggaaaaactgcacgcagccaccagcaaaaacaacaacctggccgttacctcaaaattcaacatacccgacctgaaggtgggcacccttgatgtcctcgtcggactgtctgatgagctggcgaagctagatgctttcgtcgagggagtggtgaagaaggttgcccagtacatggcagacgtactcgaagattccaaagacaaagttcaagaaaaccttctggctaatggggtcgacttggtaacttacataactcggttccagtgggatatggcaaagtaccctataaagcagagcctgaaaaatatttccgaaattattgccaaaggcgttacgcagatcgacaatgatctgaaaagccgcgccagcgcctacaacaatctcaagggaaatctgcagaaccttgagcgaaaaaacgcaggttctctgctgacaaggtcccttgctgaaattgtgaaaaaggatgacttcgttctggacagcgagtacctggtgacactgttagtggtggtgcctaagctcaatcacaatgattggattaagcagtacgagacactggcagagatggtggtccccagatccagtaacgtcctctccgaggatcaggactcttacctttgcaatgtgaccttattccgtaaagccgtcgacgatttcaggcataaagccagagagaataaattcattgtacgagatttccagtataacgaagaggagatgaaggcagataaagaagaaatgaaccggttgtcaaccgacaagaagaagcagttcgggccactcgtcagatggctcaaggtcaactttagcgaagcttttatagcttggatacacgtgaaagctctgcgcgtgttcgtggagagcgtcctgagatacggcttacctgtcaattttcaggctatgctgctccaaccaaacaagaaaactctgaagaagctgcgggaggtgctccatgaactatacaagcacttagatagttcggcggctgccattatcgatgcaccgatggatattccaggactcaacctgtctcagcaggagtattacccatacgtctactataagattgattgcaacctcctggagttcaaatag

SEQ ID NO: 179882 - DNA, 1053 bp, synthetic construct
  misc_feature 1..1053: note = Description of Artificial Sequence: Synthetic coding sequence
  source 1..1053: mol_type = other DNA
atggccgtgttcgtggtgctgctggccctggtggccggcgtgctgggaaatgagttttctattctgaagtcacccggttccgtggtgttccgaaatgggaattggcccatccctggcgagaggattccagacgtagctgctctttctatgggattctcagtgaaggaagacttatcatggcctgggctggccgtggggaacctgttccatcgccctcgggccaccgttatggtgatggtgaaaggtgtgaacaagctcgccttgccccccggaagcgtgataagctatcctttagagaatgccgtgcctttctctctggatagcgttgccaattcaatccatagtttattctcggaggagacaccagtcgtactccagttagccccaagcgaagagcgcgtatatatggtcgggaaggcgaatagtgttttcgaagacctctctgttaccttgcgccaactgagaaaccgactcttccaggaaaattccgtacttagttccctccctttaaattcattgagccggaataacgaagtcgacttactgtttttgtccgagctgcaggtactgcatgacatatcttctctgctaagccgccacaagcatctggccaaggatcattctccagatctgtacagcctggagctggccgggcttgacgagattgggaaaagatatggtgaggactctgagcagttccgagacgctagtaaaattttggtcgacgctctccagaaattcgccgatgatatgtattccctttacggcggcaacgctgtggtcgaattggtgaccgtcaagagcttcgacacttctctcataaggaagacccgtaccatcctggaggcgaagcaagcgaaaaaccctgccagtccctacaacttggcctacaaatataatttcgaatactcagtggtttttaatatggtgctgtggattatgattgctcttgcccttgctgtgatcataacctcgtacaatatatggaatatggatcctgggtacgattccattatatacagaatgaccaaccaaaaaattaggatggactag

SEQ ID NO: 179883 - DNA, 732 bp, synthetic construct
  misc_feature 1..732: note = Description of Artificial Sequence: Synthetic coding sequence
  source 1..732: mol_type = other DNA
tgatgccccgccggccccttccgggtggccccccagtgctgcggccgtcgggggacaatggccgtattcgtagtgctgttagcgcttgtggccggtgtcctcgggaacgaattcagcatcctgaagtcacctgggtcagtcgtgtttcgtaatggcaattggcctatcccaggggaaagaatacccgacgtcgccgcccttagtatgggattttctgttaaggaggacctcagctggccaggtctggccgtagggaacctgttccaccggccgcgagcgactgtcatggtcatggttaagggagtgaataaactggctttgcctcccggctctgtcatttcttatccattagagaatgtcgacctactattccttagcgagctgcaagtcctgcacgacatcagctccctgttaagccgacacaaacacctcgccaaggaccactcccctgatctgtactcactggaactggctggacttgacgaaattggaaagaggtacggagaagactcagagcagtttagagatgcctccaagattctggtggacgcactacagaagtttgcagatgatatgtactcactctatggagggaacgcggtcgttgaactcgtcaccgtcaagtcttttgacacatccctgattagaaagacaagaacgattttagaagccaagcaggccaaaaacccagcgagcccttacaatctggcttacaagtacaatttcgaatag

SEQ ID NO: 179884 - DNA, 612 bp, synthetic construct
  misc_feature 1..612: note = Description of Artificial Sequence: Synthetic coding sequence
  source 1..612: mol_type = other DNA
gagagcgagcgggtgaccagcagccggtgcggctgccggccctgccctgccggcccctttcgtgtggcgccccagtgttgcggcaggcgtgggaccatggccgtgtttgtagtgctgctagccctcgtggcgggcgtgttagggaacgagttctcaatcctgaaaagccccggctctgtggtcttccgcaacggaaactggccaatccccggggagcggattcctgatgtggccgccttgagcatgggctttagcgtgaaagaagacctgtcctggcctggcctggccgtcggcaatctgtttcataggcccagagctacagttatggttatggttaagggagtgaacaaactggcccttccgccgggttctgtcattagctatcccctggagaacagagtgtatatggttggcaaagctaatagcgtgtttgaggacttgtcggtaacactgagacaactgcggaacaggttgttccaggaaaattccgtgctctcatccttaccattgaacagcctcagccgcaataacgaggtggaccttcttttcctaagcgagctccaggtcctgcacgacatctcatccttgctttcgcgtcataaacatctgtag

SEQ ID NO: 179885 - DNA, 780 bp, synthetic construct
  misc_feature 1..780: note = Description of Artificial Sequence: Synthetic coding sequence
  source 1..780: mol_type = other DNA
tgagtgccccccgcccggagcgtgagcccccggagcgccgccgccgccgctgctccatggctgtgtctgtcttgctcctggagatggtggcgcgacctgagctggcctggcctcgcagtgggtaacctgtttcaccggccccgggccactgtaatggtgatggtcaagggagtgaacaaacttgcgttgccaccagggtccgtgatctcctacccactagagaacgcggtgcctttctcgctggactccgtggcaaactctatccactccctttttagcgaggagacacctgttgtgctgcagctggcccctagtgaggagagagtttacatggtgggaaaggcaaacagtgtcttcgaagacctgtccgtgacccttcggcagctgaggaacaggctgttccaggaaaactccgtgttatcgtcactaccactgaactcactttctcggaacaatgaggtcgatctgctgttcctctccgaacttcaggtcctgcacgatatatccagtctgctctccagacacaagcacctggctaaagatcacagccctgacctctacagcctagagctggccgggctggacgagatcggaaagagatatggagaggactccgaacagtttcgcgacgcctctaagatcctggtcgacgccttgcaaaagttcgcggatgacatgtactctctgtatggtgggaacgccgtcgttgagctcgtgaccgtgaaatcgtttgacacgagcctcatccggaagacccgcacgattctggaggctaaatag

SEQ ID NO: 179886 - DNA, 957 bp, synthetic construct
  misc_feature 1..957: note = Description of Artificial Sequence: Synthetic coding sequence
  source 1..957: mol_type = other DNA
atggccgtgttcgtggtgctgctggccctggtggccggcgtgctgggcaacgagttcagcatcctcaagtcgcccggaagcgttgtctttagaaatgggaactggccaattccaggagaacggatacccgatgtagcggcattaagcatgggatttagtgtcaaggaggatttgtcatggcctggcctggcagtcggcaatctctttcaccggccgcgtgcgactgtcatggtgatggtgaaaggagtgaacaagttagccctgccaccgggtagtgtgatatcgtatccgctcgagaatagagtttacatggtcgggaaagctaatagcgtctttgaggatctttcagtgacactgagacagctccgaaaccgcttgtttcaggagaattccgtgttaagcagcctgccactcaattcccttagccggaacaatgaagtggacctactattcttgtccgaactgcaggtgctgcacgacattagcagcttgctgagtaggcataagcacctggccaaggatcactcccctgacttatattcgctggagctggctggcctagatgagattggaaagcggtacggcgaggattccgaacagttccgcgacgcaagcaagattctcgtggatgcattgcagaaatttgcggatgatatgtactccctttacgggggcaacgcagtcgtggaactggtcacagtgaaaagcttcgacacgtctctgatacgcaaaaccagaacaatccttgaagctaagcaggccaaaaatccggcttccccttataacctggcgtataaatataattttgaatacagtgttgtgttcaatatggtcttatggataatgatagcgctggccctagccgtcatcataacttcttacaacatctggaacatggaccctggatatgacagtatcatttatcgaatgacgaatcagaagattcgtatggactag

SEQ ID NO: 179887 - DNA, 819 bp, synthetic construct
  misc_feature 1..819: note = Description of Artificial Sequence: Synthetic coding sequence
  source 1..819: mol_type = other DNA
atggccgtgttcgtggtgctgctggccctggtggccggcgtgctgggaaacgaattctctatcttgaaatcacccggatcagttgtgttcaggaacggcaattggcccatccccggggagaggattcctgatgtggcagccctgtctatgggctttagcgtcaaagaagacttgagctggcccggactcgcagttggcaacttgtttcaccggcccagagccacagtgatggttatggtcaagggagtcaacaaactcgctctgcccccaggcagcgtgatttcatatcctctggagaacgtcgacttgctcttcctctcagaactgcaggtgctgcatgatatctcaagcttattgagtcgccacaaacatctggcgaaggaccactcgcctgatctgtactcgcttgagctggccggattggacgaaatcggaaagcgatatggagaggattccgagcagttccgcgatgcatccaagattctggtggacgctcttcagaaatttgccgacgacatgtacagtctctacgggggcaatgctgtggtggagctggtgaccgttaagtcgtttgatacttctctgatccgaaagacccggaccattttagaagctaagcaggccaaaaaccccgcgtctccctacaatctggcctataaatacaattttgagtactccgtggtgttcaacatggtgttatggattatgatcgccttggctctagcagtcataattacctcatacaatatctggaatatggacccaggctatgactcaattatttaccgaatgacaaaccagaaaattcgcatggattag

SEQ ID NO: 179888 - DNA, 498 bp, synthetic construct
  misc_feature 1..498: note = Description of Artificial Sequence: Synthetic coding sequence
  source 1..498: mol_type = other DNA
atggccgtgttcgtggtgctgctggccctggtggccggcgtgctgggtaacgagttttctatcctcaagtcacctgggagtgtcgtgttcagaaacggcaattggccaattccaggcgaaaggatcccggatgtggccgcactgagcatggggttctctgtgaaggaagatctgtcttggcctgggctggctgtcggcaatctgtttcaccgacccagggctacagttatggttatggtgaagggcgtaaacaagctggcccttccccctgggtccgtgatctcctacccgctcgaaaatgctgtgccttttagcctcgattcagtggcaaattcaatccacagtctgttttctgaagagacccccgtcgttttacagctggccccttccgaagaaagggtctacatggtgggtaccatgaagctaacctgctcctttttcttaaattgtaagtgttacatgatcttccaagcctgttgtctcgtgataagtatttag

SEQ ID NO: 179889 - DNA, 825 bp, synthetic construct
  misc_feature 1..825: note = Description of Artificial Sequence: Synthetic coding sequence
  source 1..825: mol_type = other DNA
atggtgatggtgaagggcgtgaacaagctggccctgccccccggcagtgtaatcagttatccgttggagaacgccgtcccatttagccttgatagcgtggcaaactcaatccactccctgttttccgaggagactcccgttgtgctccagctggcaccttctgaagaacgcgtgtatatggttggcaaggccaatagcgtgtttgaggacctctctgtaacactgaggcagttgcgcaacaggctctttcaagagaacagcgtgctgtcatctctccctctgaactccctgagccgaaataatgaggtggacctgctgttcctatccgaactgcaggttctgcacgatatctcatccctgctgagcaggcataagcatcttgccaaggaccattcccctgacctttattccctagagctggcaggcttggacgagattggcaagcggtacggagaggatagcgagcagtttagggacgcctctaagatactagtggacgcattgcagaaattcgcagatgacatgtatagcttatatggggggaatgcagtggtggagctggtaaccgttaagagctttgacaccagtctcattaggaagacacggacaattttggaggccaagcaggcaaaaaaccccgcatccccctataatcttgcatacaagtataactttgagtactcagtcgtgtttaatatggtcctgtggatcatgattgctctcgcgctcgcggtcattataacatcatataacatttggaacatggacccgggttatgactctataatttacagaatgaccaatcaaaagatcagaatggactag

SEQ ID NO: 179890 - DNA, 2517 bp, synthetic construct
  misc_feature 1..2517: note = Description of Artificial Sequence: Synthetic coding sequence
  source 1..2517: mol_type = other DNA
atgggcgagctgttccggagcgaggagatgaccctggcccagctgttcctgcagtcagaggctgcatactgctgcgtgagcgaattgggcgagctgggtaaagtgcagttcagggatctgaaccccgacgtaaatgtgttccagaggaagtttgtgaatgaggtgaggcggtgtgaagaaatggatcgcaaacttcgctttgtagagaaggaaattagaaaagccaacatccccattatggacaccggtgagaatccggaagtcccgtttccacgggatatgatagatttggaggccaattttgaaaagattgagaatgaactcaaggaaatcaacactaatcaagaggccctgaagcgcaatttcctagagttaaccgaactcaagttcatacttcgcaagactcagcagttcttcgatgaggctgaacttcaccatcaacaaatggcagacccagatctcttggaagagtcttcatcactgctcgagccctctgagatgggcaggggcaccccgcttagacttgggtttgtggccggcgttataaatcgggaaaggatccctacattcgaaagaatgttgtggagggtgtgcagagggaatgttttcctgagacaggcagagatagagaatccacttgaggacccagtgacgggggattacgtccacaagtcggtgttcattattttttttcaaggcgaccagctgaagaaccgcgtgaagaaaatctgcgaagggttccgtgcttctttgtacccttgccctgagacaccccaggagaggaaggaaatggcctcgggagtcaacacgcggatcgatgatctgcagatggtcttaaaccagaccgaggatcatcggcaaagggttctgcaggccgcagccaagaacattagagtgtggttcataaaggtcagaaagatgaaggctatctaccatactctaaatttatgtaatattgatgttacccaaaaatgtctgattgctgaagtctggtgtcctgtgacagatctcgattcgatccaattcgctcttcgacgaggcaccgagcacagcggaagcactgtgccatcgatcctgaatagaatgcagacgaaccaaactccgccaacgtacaataaaaccaataagtttacgtacggatttcagaatatcgtggacgcctacgggatcggaacctaccgggaaatcaatccagctccgtatactattatcacctttcctttcctatttgctgttatgttcggagacttcggtcacggtatattaatgacgctctttgcagtgtggatggtacttcgcgagagcagaattctcagccagaagaatgagaatgaaatgttctcaaccgtgttcagtggaagatacattatcctccttatgggagtctttagcatgtataccggattgatatacaatgactgcttctcaaaaagccttaatattttcggctcgagctggtctgtcaggccgatgttcacctataattggactgaggaaaccttaagaggaaatccggtgcttcaattgaatccagctctacccggcgtgtttggtggaccttacccttttgggattgatcctatatggaacatcgctactaacaaactgacttttttgaacagcttcaaaatgaagatgtctgtcattctgggaattattcacatgctgttcggtgtcagcctgagtctgttcaatcacatttactttaagaagcccctgaatatctactttgggttcattcctgagatcattttcatgacaagcctctttggctatctggttatccttatattttacaaatggacggcctatgatgcacacacaagcgagaacgctcccagtttactaatccattttatcaatatgttcttgttctcctacccagagagcggatactccatgctctattcagggcagaaaggaatacaatgctttctagtagttgtggccctgctgtgtgtgccatggatgttgctgtttaaacctctggtcctgcggcggcagtacctgcgacggaaacatcttggaacattgaatttcgggggaatcagagtgggaaatggccctactgaggaggacgccgagatcatccagcacgaccagttgtctactcattcagaggacgcagacgagtttgactttggcgataccatggttcatcaagctatccacacaatcgagtactgcttaggctgcatcagtaataccgccagctatctccgtttgtgggccctctctctggcacacgcacagctgtctgaagttctttggacgatggtaattcacatcggcctctcagtgaaaagcctcgctggcggcctggtactatttttctttttcacagcctttgcaacacttaccgtcgccattctcttgatcatggagggcctcagtgcttttttacatgctctccgacttcattgggtcgagttccagaataagttctactccggcacaggttttaaatttctgcctttcagcttcgagcacatccgcgaggggaagtttgaggagtag

SEQ ID NO: 179891 - DNA, 2514 bp, synthetic construct
  misc_feature 1..2514: note = Description of Artificial Sequence: Synthetic coding sequence
  source 1..2514: mol_type = other DNA
atgggcgagctgttccggagcgaggagatgaccctggcccagctgttcttgcagtccgaggctgcctactgttgtgtatccgagcttggagagctcggtaaagtacagttcagagatctaaatcccgacgtgaacgtgtttcagcggaagtttgtgaatgaggtccgtcggtgcgaggagatggaccgaaagctgcgcttcgtggagaaggagatcagaaaggcaaatatcccgattatggacaccggcgagaacccggaagtcccgtttccgcgagacatgatcgatctcgaggctaactttgaaaagatcgaaaatgaacttaaggaaattaacacaaatcaagaagcgctgaagcgaaactttctagaactcacagagttgaagttcattctgaggaaaacccagcagttctttgatgagatggctgacccagatctccttgaggagagctctagtcttctcgagccctccgaaatgggtagaggaacgcctttgaggcttgggttcgtggccggagtgattaatagggagcgaataccaacatttgagcggatgttgtggcgcgtttgtcggggcaacgtcttcctgaggcaggctgagatagagaacccactcgaggacccagtaaccggtgattacgtgcacaagtcagtgtttatcatattctttcagggggaccagcttaagaatcgcgtcaagaaaatatgcgaaggatttagagcatcgctgtacccatgtcccgagacgcctcaggagagaaaggaaatggcaagcggcgtaaacactaggattgatgacctccaaatggtcctgaatcagacagaagaccatagacaacgagttctccaggccgccgccaagaatatcagggtgtggttcattaaggttcgcaagatgaaagctatctaccataccctgaatctttgcaatatcgatgttacccaaaagtgcctgattgcagaagtctggtgtcctgtgacagatctggattctattcaattcgctctcaggagggggacagagcacagtggatctacagttccatctattttgaacaggatgcagacaaatcaaacaccaccgacatacaataagacaaataaatttacatatggattccagaatatagtcgatgcatacggtattggaacttaccgcgagattaatccagccccttatacaatcattacctttccctttttattcgccgtcatgttcggcgattttgggcacggtatacttatgaccttgttcgcggtctggatggtgcttcgtgagtccagaatcctgtcccagaagaacgagaatgagatgttctcaactgtcttctccggaagatatattatcttgttgatgggcgtcttttcaatgtatacagggttaatatataacgactgcttttcaaagagtctgaatatcttcggttcatcgtggagcgtgcgtccaatgtttacgtacaattggaccgaggagacactgagagggaaccccgtgctgcaattgaacccagctctacccggggtcttcgggggcccttatcccttcggaatagacccgatttggaacatcgctacaaacaaactgactttcctgaatagttttaagatgaagatgagcgtgattttaggtatcattcacatgctattcggcgtgtctctcagtctcttcaatcacatctattttaagaagccccttaatatctattttggcttcatcccggaaatcatattcatgacatcactcttcggatacctagtgatcttgattttttacaagtggacagcgtacgatgcacatacttccgagaatgccccttctctgctgatccactttattaatatgttcctgttctcctacccggaaagcggatatagtatgctgtattcagggcagaaggggatccagtgtttccttgtagtggtggccctcctgtgtgtgccctggatgctgcttttcaagcccctggtgctccgacgacaatacttgcgtcgcaaacatctcgggacgctgaattttggaggcatccgcgtcggaaacggacctactgaggaagatgctgagattatccagcatgaccagttaagcacccacagcgaagacgctgacgagccttctgaagacgaagtctttgattttggcgacacaatggtccatcaggcaatccacaccattgagtactgtctcggctgcatctctaacaccgcatcatacttaagattgtgggccctgagcttagcccatgcacagctgagcgaggtgctgtggactatggtgatacatatcggcttgagcgtgaaatccctggctggggggttggtcttattctttttcttcacggctttcgctactctcacagtggccatcctgcttattatggagggattaagtgcctttctgcacgctctacgcctgcactgggtcgagttccaaaacaaattctactctggcacaggttttaagttcctgcccttctcttttgagcatatcagggagggcaaatttgaggagtag

SEQ ID NO: 179892 - DNA, 2496 bp, synthetic construct
  misc_feature 1..2496: note = Description of Artificial Sequence: Synthetic coding sequence
  source 1..2496: mol_type = other DNA
atgggcgagctgttccggagcgaggagatgaccctggcccagctgttcctccaaagtgaagccgcatactgctgtgtttctgagcttggagaactgggaaaagttcaatttagagatctgaatcccgatgtcaatgtatttcagcggaaattcgtgaatgaagtgcgaaggtgcgaagaaatggatcgaaagctgaggttcgtcgagaaggagattcggaaagccaacattcctataatggacacaggggaaaaccccgaagtgccttttccaagggatatgattgaccttgaggctaactttgaaaaaatagagaacgagttgaaggaaattaacactaaccaggaggcactcaaaagaaacttcctggaactgacagaactaaagtttatcctgcggaagactcagcaattctttgatgagatggccgaccccgatcttttggaggaaagcagctcgctgctcgaaccctctgagatgggacggggaacaccactgaggctgggattcgtggcgggcgtgattaatcgcgagaggatccccaccttcgagagaatgctgtggagggtgtgccggggtaacgtgtttctcaggcaggctgagattgagaaccctctcgaagaccctgtgacaggagactatgtgcataaatccgtttttatcattttttttcagggtgatcagctaaaaaaccgtgtcaagaaaatctgtgagggatttcgagcatccctctacccttgtcccgaaactccccaagaacgcaaggaaatggcctccggcgttaatacacgaatcgacgatttgcaaatggttttaaatcagaccgaggaccacagacaaagagtccttcaagcagccgccaaaaatatccgtgtatggttcatcaaagtgcgtaaaatgaaggcaatataccacacccttaatctgtgcaatatagatgttacacagaagtgtctgattgccgaagtatggtgtcccgtcactgaccttgacagcattcaatttgcgctgcggcgggggacagaacattccggcagcacggtgccctcaatcctgaacaggatgcagacaaaccagacccctcctacttacaacaagaccaacaagttcacgtacggcttccagaatattgtggacgcttatgggattggtacatatcgcgagatcaatcccgccccatacacaatcatcactttccccttccttttcgcagtgatgttcggcgactttgggcacggaattcttatgaccttgttcgccgtgtggatggtccttagagagtcccgcattctttcccaaaagaacgagaatgagatgttctccaccgttttctcagggagatatattattctgctaatgggagtctttagcatgtatacaggcctgatttacaacgactgttttagtaagagccttaatatcttcggttcatcttggtccgtacgacccatgttcacctacaactggactgaggagacactgagaggcaatccagtgctgcagcttaaccctgccctgccaggagtctttggaggcccttacccgttcggcattgaccccatctggaatatagcaactaataagcttacattcctcaacagcttcaagatgaagatgtcagtgattttaggaattatccatatgttatttggcgtttcgttgtccctttttaatcatatctacttcaagaaacccctgaacatctacttcggcttcattcccgaaattatttttatgacatccctgtttgggtatctggtgatcctcatattctataaatggactgcctacgacgcccacacttctgagaatgcaccctctctgctaatccatttcatcaacatgttcttattctcttaccctgaatctgggtatagtatgctgtattccggacaaaagggaattcagtgcttcctggtcgtggtcgccctgttatgcgtgccctggatgctcctgtttaagcctctggttttacggagacagtacctgaggcggaaacacctgggaacactgaatttcggaggcatccgcgttggcaacgggccgacagaggaggacgctgaaataatacagcacgatcaactgagtacccacagcgaggatgctgatgaattcgacttcggggacactatggttcaccaagctatacataccatcgaatactgcctgggctgtatatcgaacaccgccagttatcttagactctgggccctgtctctggcacatgcccagctgagtgaagtgttatggactatggtgattcacatcgggctgtccgtgaagtccctggcaggcggcctcgtgttatttttcttcttcacagcattcgctactctaaccgtggctatcctgctgataatggagggactgagcgccttcctgcacgctctgagattgcattgggtagagttccaaaataaattttatagcggaactgggtttaagtttctcccctttagctttgaacacattagagaaggcaaattcgaggaatag

SEQ ID NO: 179893 - DNA, 2367 bp, synthetic construct
  misc_feature 1..2367: note = Description of Artificial Sequence: Synthetic coding sequence
  source 1..2367: mol_type = other DNA
atgggcgagctgttccggagcgaggagatgaccctggcccagctgttcctgcagtcagaggccgcttactgctgcgtgagtgaattaggcgaactgggcaaggtccagtttagggacttaaacccagatgtcaacgttttccaacggaagtttgtgaatgaggtgaggaggtgcgaagaaatggatcgcaagctgcggttcgtcgaaaaagagatacgtaaagccaatatcccaatcatggataccggtgagaatccggaagtgccatttcctagagacatgatcgacctggagatggcagacccagacctgcttgaggaatcaagcagcctgttggaacctagtgaaatggggcggggaactccactgaggctggggtttgtcgccggggtcatcaacagagagcgcatccccacctttgagcgaatgctatggcgcgtttgccgcggcaatgtgttcctgcgccaagctgagattgaaaatcctctcgaagatcctgtcacaggagactatgtgcataagagtgtgtttatcatctttttccaaggagatcaactcaagaaccgggtcaaaaaaatctgcgaggggttccgcgccagtctctacccctgtccagagacgccacaagagcgaaaggaaatggcctcaggagtgaacaccaggattgatgatcttcagatggttctgaaccagacagaggaccacagacagcgtgttcttcaggcggccgccaagaacatccgcgtatggtttattaaggttcgaaaaatgaaagccatttaccacacactcaatctgtgtaatattgacgtgacacagaagtgcttgattgccgaagtgtggtgccctgtgaccgacttggattcaatacagtttgcactcaggcgaggtaccgagcacagcgggagtactgtgccttcaatccttaaccgaatgcagactaaccagactcctcctacttataataaaactaataagttcacctatggcttccaaaacatcgtggatgcctacgggatcggcacctaccgggaaatcaacccagcgccctataccatcattacttttccatttttgttcgccgtgatgtttggcgacttcgggcatggtattttgatgaccctgttcgcggtctggatggtattacgtgaatcaagaatcctgagccagaagaacgaaaacgagatgttctcgacagtgttctctggccggtacatcatcctgctaatgggcgtattttctatgtatactggactgatttataacgattgcttttcaaagtcgctgaacatctttggtagtagctggtcagtccgccccatgtttacttataactggacggaagagaccctgagaggcaatccagtcttacagctgaatccagcactccctggtgtgtttggcggcccttacccctttggtatagatcctatttggaatatcgcgactaataagttgactttcttaaattccttcaaaatgaagatgtcggttattcttggaataatccacatgctgtttggtgttagccttagcctttttaaccacatttattttaaaaagccccttaatatctattttggcttcatccccgagataatcttcatgacatccctttttgggtacctggttattctcattttctataaatggacagcctatgacgctcacacatctgagaacgcccctagcctgctcattcacttcattaatatgttcttgttcagctatccagaatctggctactccatgctgtacagcggccagaagggcatccagtgtttcctcgtggtggtggctctgctgtgcgtgccctggatgctgctcttcaagcctctggtgttgaggaggcagtatcttaggaggaaacacctcgggacactgaactttggaggcatcagagtgggaaacggccccaccgaggaagacgcagagattatccagcatgaccagctgtccacccactccgaagacgctgatgagtttgatttcggcgatacgatggtccatcaggctattcacaccatcgaatattgccttgggtgtatttccaacactgcctcttacctgcggctgtgggcgctgagtcttgcccacgcacaattgagcgaagtgctttggacgatggtgatccacatcggtttgagcgtgaagtccctggccggagggctggttctgttcttcttttttacagctttcgctactctcaccgtggcgatcctgctgattatggagggccttagcgccttcttgcatgcccttagactccattgggtcgagttccagaataagttctattcagggaccggattcaaatttttacccttctctttcgaacacatacgcgaaggtaagtttgaagagtag

SEQ ID NO: 179894 - DNA, 1452 bp, synthetic construct
  misc_feature 1..1452: note = Description of Artificial Sequence: Synthetic coding sequence
  source 1..1452: mol_type = other DNA
atgcagaccaaccagaccccccccacctacaacaagaccaacaagttcacatatgggttccagaatattgtggatgcctatggtattggaacttatcgcgagataaaccccgctccatacaccattataacatttccctttctattcgctgtgatgttcggggatttcggacatggcatcctaatgaccctgttcgctgtttggatggtgttgcgagaaagccgtattttgagtcagaaaaacgaaaatgagatgttttcaaccgtgttttctgggaggtacataattctgctgatgggcgtcttttcgatgtacactggcctcatttacaacgattgcttctcgaagtcacttaatatctttggcagttcctggtcagtgcgacctatgtttacatacaactggacggaagagacgctcagaggaaatcccgtactgcagctcaacccggccttgccaggagttttcggcgggccatacccctttggaatcgatcctatctggaacatcgcaacgaataagcttacctttcttaacagcttcaaaatgaagatgtccgtgattctgggcatcattcatatgctttttggcgtgtcacttagtctttttaatcatatatacttcaagaagccgctaaatatctattttggcttcataccagagattatcttcatgacgagcttattcggctacctggtgatcctcatcttctacaagtggacagcgtacgacgcccatacatccgagaatgcaccgtccttgctgattcattttataaatatgttcctgttcagctatccggaaagcgggtattctatgctctacagtgggcagaaagggatccagtgcttccttgtcgttgtggcattgctttgcgtgccttggatgctgctgtttaaaccactggttctgcgacgccaataccttcggcgaaagcatctgggaacgctcaacttcgggggtattcgggtgggaaatggcccgacagaagaagatgccgagatcatccaacacgatcaactgtccacccatagcgaagacgcagacgaaccctctgaggacgaagtctttgacttcggcgacacgatggtccaccaggcaatccacactattgagtactgcctcggatgcatctccaatactgcatcatacttgcgactctgggccctcagcctggcacacgctcagttgagcgaggttttgtggactatggtgatccacataggattatctgtcaagtccctcgccggcggactggtgctctttttcttttttactgctttcgcaactctgaccgtggcaatactgttgattatggagggcttgtccgcctttctgcacgccttgcgactccactgggttgagtttcagaacaaattctacagtgggaccgggttcaagttcctgccttttagtttcgaacacatccgagagggaaagttcgaagaatag

SEQ ID NO: 179895 - DNA, 2514 bp, synthetic construct
  misc_feature 1..2514: note = Description of Artificial Sequence: Synthetic coding sequence
  source 1..2514: mol_type = other DNA
atgggcgagctgttccggagcgaggagatgaccctggcccagctgttcctgcaatctgaagcagcttattgctgcgtttcggaacttggtgagctggggaaggtgcagttccgcgatttaaatcccgacgttaacgtcttccagcgtaaattcgttaatgaggttaggagatgcgaagaaatggacaggaaactgcgatttgtggaaaaggaaatccgaaaagcgaacatacctatcatggatacaggagagaatcctgaagtacctttccctcgagacatgattgatttagaagctaattttgaaaagattgaaaacgagctaaaagagatcaatactaatcaggaggcgttgaagcgaaactttctcgagctgaccgagctaaagtttattctgaggaagacgcagcaattcttcgacgaaatggctgaccctgacttactcgaagagagcagtagtcttttggagccatcagagatgggccgaggtacaccccttcggctcgggtttgtcgccggcgttattaatagggaacgaattcccacttttgagaggatgctctggcgcgtatgtaggggaaatgtgttcctccgccaggccgagattgagaatccactggaggaccccgttacaggagactatgtccacaaatctgtgttcattatattttttcagggtgatcagcttaaaaatcgggtgaagaaaatctgcgagggctttagggccagtctctatccgtgtcccgaaactccccaggagcgcaaagaaatggcctcaggggtcaacactaggattgatgacctgcagatggtgctgaatcaaactgaggatcacaggcaaagggtactgcaggccgccgcgaaaaacattagagtgtggttcataaaggtcaggaaaatgaaagccatctaccacacactgaacttgtgtaacattgatgtgacccagaaatgtttgatagcggaggtgtggtgtcccgtgacggatctggactcaattcaattcgcgctgcgcagaggcaccgaacactcgggctctacagttcccagcatacttaaccgaatgcagactaatcaaacacctcctacctataacaaaacaaacaaattcacctatggcttccagaacatcgtggacgcatacgggattggtacatacagagaaattaacccggctccatacaccatcattaccttcccctttctattcgctgttatgttcggagatttcgggcatggcatactgatgaccctgttcgccgtctggatggtgctgcgggaatcgcggattctcagtcagaaaaatgaaaacgaaatgttctctactgttttctccggcaggtatattatcttattgatgggggtgtttagcatgtatacaggcttaatctacaacgattgtttctctaagtctctaaacatttttggaagctcatggtctgtgagacctatgttcacttacaattggacagaagagactttaaggggtaaccccgtgctgcaactgaatcctgcactgcctggcgtgtttggaggaccatacccctttgggatcgatcccatttggaacatcgcaacgaataagctgacttttcttaattcattcaagatgaagatgagtgtgatactgggtattatccatatgttgttcggagttagccttagcctgttcaatcacatctactttaaaaaacctttaaacatctatttcggcttcatccctgagatcatttttatgacttccctcttcgggtacctcgtaattctgatcttttacaaatggacagcctacgatgcccatacttctgagaacgcccctagcctcctaatccacttcattaacatgttcctgttttcttacccggagtccggatattctatgctctactccggacagaaagggatccaatgtttcctggtggtcgtggccctgctgtgcgtcccctggatgctgctattcaaacctttagtgctgcgaaggcaatatttgcgccggaagcacctgggtaccctgaacttcggcggcattagggttggtaacggccctaccgaggaagacgctgagataatccagcatgatcagctaagtacccacagtgaagatgctgatgagccctccacctccggtcagtttgactttggcgacactatggttcatcaagcgatccatacgatcgaatattgtctgggttgcatttcaaataccgcaagttatcttcgcttatgggcgctcagcttagcccacgcccagttgtctgaggtgttgtggaccatggtgatccatattggtctgtcggtgaaaagcctggcaggaggccttgtcctgttcttcttttttacggcatttgccacactgacagtggctatcctgctcatcatggaggggctctctgccttcctgcatgccctgaggctccattgggtggaattccagaataagttctacagcggtaccgggtttaaattccttccattttcatttgaacatatacgagagggcaagttcgaggaatag

SEQ ID NO: 179896 - DNA, 2571 bp, synthetic construct
  misc_feature 1..2571: note = Description of Artificial Sequence: Synthetic coding sequence
  source 1..2571: mol_type = other DNA
atgggcagcctgttccggagcgagaccatgtgcctggcccagctgttcttgcaatctggtacagcttatgagtgtttgtctgccttgggtgagaaaggcctggtgcagttccgtgatttgaatcagaatgtttcatccttccagaggaaatttgttggggaggtcaagcggtgcgaagagttggaaaggatattggtgtacctcgtgcaggaaatcaatcgtgctgacatacctctgccagaaggagaggcctccccaccagcccccccccttaagcaagtgctggagatgcaggagcaattgcagaaacttgaggtggaactcagagaggtgacaaaaaataaggaaaaactccggaaaaaccttcttgaactcatcgagtatacccatatgctgagggtcactaagaccttcgtgaaacgaaacgtcgaatttgagccaacctacgaagagtttccctcactggagtccgatagcctgttggattacagctgtatgcagaggctgggcgctaagttaggattcgtgtccgggctgataaatcaaggcaaggtggaggcattcgagaaaatgctgtggcgtgtatgcaagggatacactatcgtgtcctacgctgagctcgacgagagtctggaggaccctgagacgggggaggtcataaagtggtacgtattcctgatctccttctggggggaacaaatcggacataaggtcaagaagatctgcgactgctaccattgtcacgtttatccatatcccaatactgctgaagagcggagggagatccaggagggattaaatactaggatccaggatctgtacaccgtcctgcacaaaactgaggactacctgagacaagtgctttgtaaagccgcagagagcgtctacagcagggtaatccaggtcaaaaaaatgaaagccatctaccacatgctgaatatgtgttcgttcgacgtcacgaacaagtgtctcatcgccgaagtctggtgtcccgaggccgacctacaggacttacggcgggctcttgaggagggcagtcgggagagcggggccacaataccatcctttatgaatataattcccacgaaggagaccccacctacaaggattagaacgaataaattcaccgaagggtttcagaatatcgttgacgcttacggagtgggctcctatcgcgaagttaaccccgcactgttcactatcatcacctttccctttctctttgccgtgatgtttggtgacttcggccatggcttcgtgatgtttttatttgcgctgctgctggttcttaatgaaaaccaccctcgactgaaccaatctcaggagattatgagaatgtttttcaatggacgctatattctcctgctgatgggcttgttcagtgtctacacaggcctgatatataatgactgcttcagtaagagcgtgaacctctttggttcaggctggaacgtgagcgccatgtattcctcatctcatcctcctgctgagcataagaagatggtgttatggaatgattccgtcgtacgccataactccatactccagctggatccctctattcctggcgtgtttcgaggaccatatcctcttggaatagacccaatctggaacctggccacaaatagactgacctttctgaacagcttcaagatgaagatgagcgtcattctggggatcattcatatgaccttcggcgttatattaggaatctttaatcacctgcactttaggaaaaagtttaacatctacctggtttctattcctgaattactgtttatgttatgcatctttggatatctcattttcatgattttttataaatggctggtttttagtgcggagacgagccgcgtggcaccttccattctcattgagtttataaacatgtttctattcccagcatctaaaacatctgggctctataccgggcaggaatacgtgcaacgcgttcttctggtggtgactgcgctaagcgtgccagtgctatttctggggaaaccactgtttctgttgtggctccacaacggtcgcagctgcttcggggtcaatcggtccggctacaccttgatcaggaaagacagtgaagaagaggtgtcactgctcggaagccaagacatagaagaaggcaaccatcaggtggaggacggctgccgggaaatggcatgcgaagagttcaatttcggcgaaattctcatgacccaggtgatccactcaattgaatactgcctgggatgcatcagcaatacagctagttacctgaggctgtgggccctgtcattggcacacgctcaactgtccgacgtgctttgggctatgctgatgagggttggccttcgcgttgacactacctacggcgttttgctcttgttaccagttatcgctctgtttgctgttcttactattttcattctactgattatggagggcctctcggcctttctgcatgcgatccgactccactgggtggaattccagaacaaattttacgtcggcgcaggtaccaaattcgtgcccttttctttcagcctgctgagttcaaaatttaataatgacgattcagtggcatag

SEQ ID NO: 179897 - DNA, 1119 bp, synthetic construct
  misc_feature 1..1119: note = Description of Artificial Sequence: Synthetic coding sequence
  source 1..1119: mol_type = other DNA
atgggcagcctgttccggagcgagaccatgtgcctggcccagctgttcctgcaatccggcactgcgtacgagtgtttgtccgccctgggcgagaaaggcctggtgcagttccgggatctgaaccagaacgtgtctagctttcaaaggaagttcgtcggtgaagtcaagcggtgtgaggaactggaaaggatattggtgtaccttgtgcaggagatcaacagagctgatatacctcttcctgagggcgaagccagtccccctgccccaccactaaaacaagttctcgagatgcaagaacaattacagaagctggaggtcgaattaagggaggttaccaagaataaagaaaagcttcgaaaaaatctgcttgagctgatcgaatacacccacatgctaagagtcaccaagacctttgtgaaacggaatgtggaattcgaacctacttacgaggaattcccatcacttgagtcagacagtctcttggattacagctgcatgcaacgcctgggcgccaagctcggcttcgtctccggactgatcaaccaagggaaggttgaggctttcgagaaaatgctgtggagagtttgtaaggggtacacaatcgtgtcttacgccgaactggacgagtctctggaagatcccgagaccggtgaagttatcaaatggtatgtctttctgatctcattttggggcgaacaaatcggccataaagtgaaaaaaatatgtgattgctatcactgccatgtttacccttatccgaatactgccgaagaacgccgtgaaattcaggaagggctaaacacccgtatccaggacttgtacacagtgttgcacaagaccgaagactatctgcgtcaggtcctgtgcaaagccgccgaaagcgtgtactctcgggtcattcaggtcaaaaaaatgaaagccatctatcacatgctgaatatgtgttccttcgatgtaacaaacaagtgcttgattgcagaagtctggtgtcctgaggccgatttacaggatttgaggcgcgctctggaggaggggagcgtgagattgccatctagccctctgccaggcactgaagaaaggctgatggagctcattaactcggagaagaagcgcaagtag

SEQ ID NO: 179898 - DNA, 2523 bp, synthetic construct
  misc_feature 1..2523: note = Description of Artificial Sequence: Synthetic coding sequence
  source 1..2523: mol_type = other DNA
atggtgagcgtgttccggagcgaggagatgtgcctgagccagctgtttctgcaggttgaggctgcttactgttgtgtcgcagagctgggagagctggggcttgtacagttcaaggacctgaacatgaatgtcaatagtttccagagaaagttcgtaaatgaagttcggaggtgtgaatctctagagaggatcctgcgcttcctggaggacgaaatgcagaacgaaattgtggtgcaactgctcgagaagagccctttgacgcccctgccacgggaaatgatcacactggagaccgtgttagaaaagctggagggcgagttgcaggaggcaaatcagaatcaacaggctctcaagcagtcctttctggagttgacagagttgaagtacctgttgaagaagacccaggactttttcgaaactgaaacaaacctagcagatgacttctttaccgaggataccagcggactacttgaactgaaggctgtccccgcttacatgaccggcaaactgggcttcatcgccggggtaattaaccgggagcggatggcatccttcgagagactcctttggcggatctgtcgaggcaacgtatacttgaaattttccgaaatggacgctccattggaagatccagtcaccaaagaggaaatccaaaagaatatattcataatcttctatcagggagagcaactcagacaaaaaattaagaaaatctgcgacggtttccgcgccaccgtatacccatgtccagagccagctgtggaacgacgggaaatgctggagagcgtcaatgttcggctggaagacctgattacagtaattactcagacagagtcacatagacaacgacttctgcaagaagctgctgctaattggcacagctggctgataaaagtgcaaaagatgaaagccgtttatcatatcctcaacatgtgcaatattgacgtcacccagcagtgcgtcattgcggagatctggttcccagtcgccgacgccacgagaataaagagagccctggaacaagggatggagctgagtggctccagtatggcgccaattatgacaacggtccagagtaaaacagcccccccgactttcaacaggaccaataaattcacagctgggtttcagaacatagtggacgcctacggtgttggatcttaccgtgaaatcaatccagcaccatacactattattacgttcccgtttctgttcgcggttatgttcggcgattgcggccacggcactgtcatgctgcttgctgcactctggatgatcctgaacgagcgccgactgctgtctcaaaagacggataatgagatctggaataccttcttccacggacgctacctaatccttttgatgggcatcttcagcatctacaccggactcatctataatgactgcttcagcaaaagcttgaacatttttggctccagctggtcggtgcagcccatgttccgaaacggcacatggaatacccacgtcatggaggagtctctctacctgcaactagacccagctataccaggggtatatttcggcaatccatatccctttggcatagatccgatatggaacctggcaagcaataagttaaccttcctaaattcatacaaaatgaaaatgtccgtgattttgggcatcgtgcaaatggtattcggcgttattctgagtctcttcaaccatatttacttccggaggacactgaatatcatacttcagtttatccccgagatgatctttatcctctgcctgtttggttacctggtatttatgataattttcaaatggtgctgctttgatgtacatgtgagccagcatgccccttcgatcctgattcacttcattaacatgttcctcttcaactattccgatagcagtaacgcccctctctacaaacatcagcaggaagttcagtccttctttgtagtaatggccctaatctcagttccttggatgctgctcataaagccattcatactacgcgctagccaccgtaagtcccagctgcaagccagtaggatacaggaagacgccaccgagaacatagagggagattcttctagtccatcaagtaggtctgggcaacgcacttcagccgacacacacggggctttagacgatcacggcgaagaatttaattttggcgatgtgtttgtgcaccaggctattcacacaatagaatactgcctgggatgtatctccaacacagccagttatctgagactatgggcactgagtctggcccacgcccaactcagtgaggtgctttggacaatggtaatgaactctggtctgcaaaccagaggatgggggggaatcgtgggagtgtttatcatctttgctgtatttgcagttcttacagtcgctatactcctcattatggagggactttctgcctttctgcacgccctgcggctgcattgggtagaattccagaacaaattctatgttggcgatggctataagttctctccttttagcttcaagcacattcttgatggaacagccgaagagtag

SEQ ID NO: 179899 - DNA, 2523 bp, synthetic construct
  misc_feature 1..2523: note = Description of Artificial Sequence: Synthetic coding sequence
  source 1..2523: mol_type = other DNA
atggtgagcgtgttccggagcgaggagatgtgcctgagccagctgtttttgcaggtggaagcagcctactgttgtgtggccgaactcggcgagctaggcctggttcagttcaaagatttaaatatgaatgtgaattccttccagcggaagttcgtgaatgaagtgcgcaggtgcgagtcactcgagaggatcctgcgcttccttgaggacgagatgcaaaatgagattgttgtgcagctcctagaaaagtctcccctgactccactgccacgagagatgattactctggaaactgttctcgagaagctcgagggagaattacaggaggcgaatcagaatcagcaggctctgaagcagtcttttctggagctgacagaattaaaatacttattgaagaaaacacaagacttttttgaaactgaaaccaatctcgctgatgatttttttacagaagacactagtggccttcttgagttgaaggccgtcccggcttatatgaccggaaaactcgggttcatcgctggggtcattaatcgggaaaggatggccagctttgaacgattattatggagaatctgccgaggcaatgtctacttgaaatttagtgaaatggatgcgccattagaagaccctgtgaccaaggaagagatccagaagaacattttcataatcttctaccagggggaacaactgcgacagaagattaagaagatatgtgatggctttagagctaccgtgtacccctgtccagagcccgcggtggaaaggagggaaatgctggaatctgtgaatgtacggctggaggatttaataaccgtaattacccagactgagtcccatcgtcagagactgctgcaggaagccgccgccaattggcacagttggctgatcaaggttcagaaaatgaaagctgtctaccatatcctgaatatgtgcaacatcgacgtcacccagcaatgtgtgatcgcagagatctggtttcccgtggccgacgctactaggatcaaacgcgctctagagcaggggatggagctgtcgggctcctctatggcacctatcatgaccactgttcagagcaaaactgccccacccacatttaaccggacaaacaagtttaccgcaggcttccagaatattgtggacgcttacggagtcgggtcctaccgtgagatcaacccagccccctacaccattatcacttttccgtttcttttcgcagtgatgttcggagactgcggccacggaacggtaatgttgctcgcggctctgtggatgatcctcaatgagcgccgcctactatcccagaagaccgataatgaaatttggaatacgttttttcatggcaggtatctgatattattaatgggtatattctccatatacacaggcctgatttataatgactgtttcagtaagtctttgaacatcttcgggtctagctggtcagtacaacctatgttccggaatggcacgtggaacacacacgtgatggaggagtcactatacctccagctcgatccagcaatccctggggtgtactttgggaatccctatcctttcggcatcgaccctatctggaacctggccagcaacaagttaacatttctcaattcttacaagatgaagatgtctgtgatcctggggatagtccaaatggtgttcggggtcatcctgtctttgttcaaccacatctactttaggaggactctgaacatcattctccagtttattccggagatgatattcatcctgtgtcttttcgggtacttagtctttatgataatctttaagtggtgttgctttgacgtgcatgtttcacaacatgctccctcgattctgatccacttcattaacatgttcctgtttaattacagtgattcctccaacgccccactgtacaaacaccagcaggaggtccagagcttcttcgtggtcatggccctgatcagcgtgccctggatgctcttaattaagccattcattctcagggccagccacaggaaaagccagcttcaggcctcacggattcaagaggatgctacagagaacatcgagggagattcaagttctcctagcagcaggagcggtcagaggacatccgccgatacacacggggctctagatgatcacggagaggagtttaacttcggagacgtcttcgtgcatcaggctatccatactatcgagtattgcctaggctgcatttctaacactgcctcatatttgcgcttgtgggccctgtccctggcacacgcccagctgtctgaagtgttatggaccatggtaatgaactctggcctgcagacccggggctggggcggcattgtgggtgtgttcatcatcttcgcagttttcgctgtgctcaccgtggcgatcctcttaatcatggaaggactgtctgcctttctgcacgcactgcgtctccactgggtcgaattccagaacaagttctatgtaggggacgggtataagttctcccccttttcctttaagcacatcctggacgggacagccgaagaatag

SEQ ID NO: 179900 - DNA, 2523 bp, synthetic construct
  misc_feature 1..2523: note = Description of Artificial Sequence: Synthetic coding sequence
  source 1..2523: mol_type = other DNA
atggtgagcgtgttccggagcgaggagatgtgcctgagccagctgttcctgcaggtggaggccgcctattgctgcgtagccgaactgggtgagctcggactggttcagtttaaggatctgaatatgaatgtaaatagctttcagaggaaatttgttaatgaagtccgtcgctgtgagtcattggaacgcatccttcggttcttggaagatgaaatgcagaatgagatcgttgtgcagttgcttgaaaaatcccccctcacacctctcccccgtgaaatgattaccttagaaactgtgctcgagaagctggaaggcgaactacaggaagccaaccagaaccagcaggcactcaagcagtcttttctggagctgaccgagcttaagtacctgctgaaaaagactcaggacttttttgagaccgaaaccaatttagccgatgatttcttcacagaagataccagtggcctccttgaactgaaagccgttccagcttacatgactgggaaactcggattcattgccggcgtgataaatagggagaggatggcttctttcgaaaggctgctttggcgcatttgcagagggaacgtctaccttaagttctccgagatggatgcaccactcgaggatccagtgacaaaggaagaaatacagaagaacattttcatcattttctatcaaggagagcagctcagacaaaagattaagaagatatgcgatggctttcgcgctaccgtctatccctgccccgaacccgccgtggagcggcgagaaatgctcgagtcagtgaatgtgagactagaagacttgataacagttataacgcagacagagtctcacagacagagactcctgcaggaagcagctgccaattggcattcttggctgatcaaggtccagaaaatgaaggccgtctatcatattctaaatatgtgtaatatcgacgtgacacagcagtgtgtgatagcagaaatttggttcccagtggctgacgctacgagaattaaacgggcattggagcaggggatggagctgtctggcagttctatggcccccatcatgactactgtgcagagtaagaccgctccaccgaccttcaaccgtacaaacaagttcacagctggattccagaatatcgttgatgcttacggtgttggatcctaccgggaaataaaccccgccccctatacgatcatcacttttcctttcctttttgccgtgatgttcggcgactgtgggcacggtactgttatgttgttggccgctctgtggatgattctgaacgagagacggctcttatcccagaagacagataatgagatctggaatacattcttccacggacgttatctaatcctgttgatggggatattcagtatttacaccgggctgatatataatgactgtttcagcaaatcccttaacatttttggtagtagttggtctgttcagcccatgtttcgaaatggaacttggaatactcacgtcatggaggaatcgttgtatctccaacttgacccagcgataccgggcgtgtatttcggaaatccctatccattcggaatcgatccgatttggaacctggcgagcaataaactaacatttctgaattcttataagatgaaaatgtctgtcattctgggcatcgtccagatggtgttcggcgtaatcttgagcttgttcaatcatatttatttccgtcggaccctgaacatcattttgcagttcatcccagagatgatctttattctttgtttgttcgggtacctggtgtttatgataatctttaaatggtgttgctttgatgtccatgttagccagcacgccccctcaattctcattcacttcataaatatgttcctgtttaactactctgacagctccaacgccccattgtataagcatcagcaggaagttcagtctttctttgttgtaatggccctgatctcagtgccgtggatgcttcttatcaagccgttcatactccgggctagtcaccgtaagagtcagctgcaagcctcccgcatccaggaagatgccactgaaaatatagaaggagacagttcctcacccagttccagaagcggacagcgcacaagcgcagacacacacggcgccctcgatgaccacggagaagaattcaattttggagacgtgtttgtgcatcaggcaatccacaccatcgagtactgtctggggtgcatcagcaataccgcatcctacttgaggctctgggcgttgagtctagcccatgctcaactgtcggaggtgctctggactatggtgatgaactctggtcttcagactagaggttggggcggtatcgtgggcgtctttataattttcgccgtttttgcagtgctgaccgtagctatcttacttatcatggagggcttatcggcctttctgcatgctctgcgcctgcattgggtagagtttcaaaataaattctatgtcggggacggctacaagttctcacccttcagctttaaacatatcctggatggtactgcagaagaatag

SEQ ID NO: 179901 - DNA, 3108 bp, synthetic construct
  misc_feature 1..3108: note = Description of Artificial Sequence: Synthetic coding sequence
  source 1..3108: mol_type = other DNA
atgggcaaggccgagaactacgagctgtacagcgtggagctgggccctggcccagggggagatatggccgctaagatgtcaaagaaaaagaaagctggcggtggggggggcaagaggaaagaaaagctggaaaatatgaaaaaggagatggagattaatgaccatcagctcagcgttgcagagctcgaacagaagtaccagacatcagctaccaaaggacttagcgcctccctggccgccgaactcttactgagagatggaccaaatgccctgcggccccctcgtgggacaccagaatacgtgaagttcgcccgacagcttgccggtggtcttcaatgtctgatgtgggtggctgccgccatctgccttatcgcattcgctatccaggctagtgaaggagatctgaccaccgacgataatctctatctggcgattgccttgatagctgtcgttgtggtgacaggatgttttggttactatcaggaatttaagagcacgaatatcatcgcctcctttaaaaatctagtacctcaacaggcaacagtcatacgagacggagataaatttcagatcaatgccgaccagctcgttgtaggggacctagtagaaatgaaaggcggtgaccgggtaccggcagatattagaatcttggccgcgcagggatgcaaagtcgataattcaagtctaacaggcgaatccgagccacagactcgatctcctgagtgtacccacgagagccccctcgaaacacgtaacatcgcctttttctctacaatgtgcctggaaggcacagttcagggactagtagtgaacacgggggaccggactataataggacggatcgcatctcttgcctctggggtagagaacgagaagactcccatagccatcgaaatcgaacattttgtggatatcattgcaggtttggctatactgtttggcgctacattctttatcgtcgcaatgtgcatagggtatacgttcctccgggctatggtgtttttcatggcaattgttgtagcttacgtcccggagggactccttgctacagtgacggtatgtctctccctcactgccaagagattggcatctaagaattgcgtcgtgaagaatctagaagctgtggagactctgggaagtacctctgtaatatgttcagataaaacaggcactctgacccaaaacagaatgactgtatcccacctgtggtttgacaatcatatacacacagctgacactaccgaggatcagagcgggcagactttcgaccagagtagcgaaacctggcgggctctgtgtcgcgtgctgactttgtgtaatagggccgccttcaagagtgggcaggacgccgtgccagttcccaaaaggatagtaattggcgatgcctctgaaacagccttgcttaagttcagcgaactgacactgggcaacgcaatgggatacagagatcggtttccgaaggtctgtgagattcccttcaacagtactaacaagtttcagctctcaatccataccctggaagatccacgggatcctcgacacctcctggtgatgaaaggagcacccgaacgggtcctggaacgctgcagcagcattctgatcaagggacaagaactgcctctggatgaacagtggagagaggcgtttcaaaccgcctacttgagcctgggggggcttggcgagagagtattgggtttttgtcaactttacttgaacgagaaagattacccgcccggctacgcctttgatgttgaagctatgaacttcccctcctctggcctttgtttcgcgggactggtttctatgattgatcctccccgggctactgtccccgatgccgtgttgaaatgccggacagccggaattcgggtaattatggtgacaggcgaccacccaatcaccgccaaggctatcgctgcctctgtgggcattatctccgaagggtccgaaaccgtggaggacattgccgcccggttacgcgtgcccgttgaccaggtgaacaggaaagacgcccgggcatgtgttatcaatgggatgcagttgaaggacatggacccttctgagctggttgaggctcttcggacccaccctgaaatggtcttcgcacgcacctcccctcagcaaaaactggttatcgtcgaatcctgccaaagactcggcgctatcgtggctgtgactggggacggggtgaacgatagtccagcccttaagaaagccgacattggggtcgccatgggcatcgcgggcagcgacgctgctaaaaatgcagcagatatgattctcctcgatgacaacttcgcctccattgtcactggggtcgagcagggcaggctgatctttgacaacctgaagaaatctatcgcctacacgttaaccaagaacatcccagagctgaccccgtacctgatttacataactgtttcggtccctctacccctgggctgtataaccatcttattcatagagttatgcaccgacatcttcccgtctgtctcactggcttacgaaaaagcagaaagcgatatcatgcatctcaggccccggaacccaaaaagagacaggctggttaacgagccgctagctgcctactcctattttcagataggcgcaatccagagcttcgccgggttcaccgactactttaccgctatggctcaagaaggatggttccccctgctgtgcgttggacttagagcacagtgggaagaccatcacttgcaggacctccaggattcttatggacaagaatggacattcggccagaggctctaccaacagtatacatgctacacagtcttctttatctcaattgaagtttgtcagatcgccgatgtactcattagaaaaactagaaggctgtccgccttccagcaaggatttttccgtaacaagatcctggtgatcgctatcgtgtttcaggtatgcattggttgctttttgtgctactgccccggaatgcccaatatctttaacttcatgccgatcagattccaatggtggctggttccactgccctacggtatcttgatcttcgtgtatgacgaaattcggaaattgggagtccggtgctgtcccggatcttggtgggatcaggaactgtattactag

SEQ ID NO: 179902 - DNA, 876 bp, synthetic construct
  misc_feature 1..876: note = Description of Artificial Sequence: Synthetic coding sequence
  source 1..876: mol_type = other DNA
atggccgccctgcaggagaagaagacctgcggccagcggatggaggagtttcagcgctattgctggaacccagacacaggtcagatgctggggaggactctgtccagatgggtgtggatatccttatactatgtcgccttctatgtggtgatgacaggtttgtttgccctgtgcctgtacgtcttgatgcagaccgtggacccatacacccccgactatcaggaccaactgcgatcccctggggtgaccctcagacctgatgtttacggcgagaagggcttggagatcgtctataacgtctccgataacaggacctgggcagacctgacccagaccctccacgcgtttctggccgggtattcaccggctgcccaggaggattctattaattgtacttcagaacaatatttctttcaagaaagtttcagagcacctaaccacacaaagttcagttgcaagtttaccgccgatatgctgcagaattgtagcggtctggctgatcctaatttcggattcgaagaaggcaagccatgtttcattattaagatgaatagaatcgtgaaatttctgccgtccaatggcagcgcaccacgggtggactgtgcattcctggaccagcccagggagctcgggcaacccctccaagtgaaatattaccctccgaatggcactttctcgctgcattatttcccatactacggaaagaaagcccagccacactactctaaccctctggtggccgctaaacttctcaacatcccacgcaacgcagaggtggccattgtatgcaaagtcatggccgagcatgtgacgttcaataatccgcatgatccttatgaggggaaggtcgagttcaagctgaagatcgagaagtag

SEQ ID NO: 179903 - DNA, 1290 bp, synthetic construct
  misc_feature 1..1290: note = Description of Artificial Sequence: Synthetic coding sequence
  source 1..1290: mol_type = other DNA
atgcagctgcggaaccccgagctgcacctgggctgcgccctggccttgaggtttctcgccctggtgtcctgggatatcccaggggcccgggcattagataatggcctcgcacggactcctactatggggtggctgcattgggagcgctttatgtgtaatctagactgccaggaagaacctgattcttgcatttcagagaaactatttatggagatggctgaactgatggtatctgagggatggaaggacgcaggctatgaatatctgtgtatcgatgactgttggatggctcctcagagagatagcgaaggaaggctgcaagccgatccacagagattcccgcatggcattcgtcagctggcaaattacgtacactccaaagggctgaaactcggtatttatgcagacgtgggcaacaaaacatgtgcgggttttcccggatcgtttggctactatgacatcgacgcccaaacgttcgctgactggggcgtggatctgctgaaattcgacggctgttattgtgattctctagagaatctggctgatgggtacaaacatatgtcacttgctcttaaccggacaggacgctctatcgtttactcatgtgaatggccattgtatatgtggcccttccaaaaaccgaattataccgaaatcaggcagtattgcaaccattggaggaatttcgctgatatagacgactcctggaaatctattaaaagtatactggactggacttctttcaaccaggaacgtatcgtcgatgtagcaggacctggcggttggaacgatcccgacatgctagtgatcggaaatttcggtctttcatggaaccagcaagttacacagatggcgctgtgggccatcatggccgcacccttatttatgtcaaacgatctcagacacatatcacctcaagccaaggcgctgcttcaagacaaagacgtaatcgccatcaaccaggacccattggggaagcagggttaccagctcaggcagggcgacaacttcgaggtttgggagcgtcctttgagtggacttgcctgggccgtcgctatgatcaatcgccaggaaattggtggccctagatcatacacaatcgccgttgcttccctcgggaagggcgtggcctgtaatcctgcgtgctttataacgcagctgctccccgtcaagcggaaactgggcttctatgaatggacctcgaggctacgaagtcacatcaaccctacgggaacagttctgctgcagctcgaaaatactatgcagatgtccctcaaagacctgctgtag

SEQ ID NO: 179904 - DNA, 3120 bp, synthetic construct
  misc_feature 1..3120: note = Description of Artificial Sequence: Synthetic coding sequence
  source 1..3120: mol_type = other DNA
atgcaccagaagacccccgagatctacagcgtggagctgagcggcaccaaggacatcgttaagactgacaagggggacgggaaggagaagtacagaggactcaaaaataactgccttgagttaaaaaaaaaaaaccacaaagaggagtttcaaaaggagctgcacctcgatgaccataagctgagtaatcgggagctggaggagaaatacggcactgacataattatggggctcagtagcactcgggcagccgagctacttgcccgggacggccctaacagtcttaccccgccaaagcagacccctgagatcgtgaaatttcttaagcagatggtcggcgggtttagtatcctgctatgggtcggcgcatttctgtgctggatcgcttacggaatccagtatagctcagacaaatccgcctcgcttaataatgtttacctgggatgtgttctcggactcgtcgtgatcctgacaggcatattcgcctactatcaggaagcgaaatcaactaacattatgtcttcattcaacaaaatgatccctcaacaggcactggtgatacgggactctgaaaagaagactatacctagtgagcagctggtggtgggggatattgtcgaagtgaaggggggcgaccaaatcccggccgatatcagagtgttgtccagccaaggctgcagggtggataactcctccctgacaggtgagtcggagccccagccccgttcttccgaattcacccacgaaaacccacttgaaaccaagaacatttgtttctattccacaacatgcttggaggggaccgtaaccggtatggttatcaacaccggagacagaaccattatcgggcacatagcttcgctcgcttctggcgttggtaatgaaaagacccctattgcgattgagatcgagcattttgtgcacatagtagcaggcgtagccgtgagcatcggaatcctcttcttcatcatcgcagtgtctttgaagtaccaggtcttagacagcatcatctttttaatcgggatcatcgtggcaaatgtgcctgaaggccttctcgccaccgtcaccgttacactgtccctaaccgcaaagaggatggccaagaaaaattgtttggtgaagaatctcgaggctgttgaaacgttaggttcgacaagtatcatctgtagtgacaaaaccggcaccctcacgcaaaataggatgacagttgcccacttgtggtttgacaaccagatcttcgtcgcggataccagtgaggaccacagcaatcaggtcttcgatcagagtagccggacctgggccagcctgagtaagatcattacgctctgcaatagagccgaatttaagcccgggcaggagaacgtgccaatcatgaaaaaggccgtgatcggagatgcgtcagagacagcgctgctgaagtttagtgaagtcattctcggcgatgtgatggagataaggaagcggaatcgcaaggtcgctgagattcccttcaatagcacgaataagttccagttaagtattcacgagatggatgatccacacggcaaacggttcctcatggtgatgaaaggagcccctgagagaatcctcgagaagtgtagtaccataatgataaacggggaggaacacccactggacaagtccacagcaaaaaccttccataccgcctacatggagcttggaggactaggcgagagggtgctgggattttgtcacctatatctgcctgcagatgagttcccggagacttattcctttgacatagacgcaatgaacttcccaacaagtaatctgtgctttgtgggcctattgagcatgattgaccccccaagaagtaccgtgccagacgccgtgactaagtgtagaagcgcgggcattaaagtcataatggtaactggcgatcacccaattacagccaaagccatcgccaagagtgtaggcataattagcgctaatagtgaaactgtcgaggatatagctcatcggcttaatatcgctgttgagcaggtgaacaagcgcgatgcgaaggccgcagtggtcactggcatggaattgaaggacatgtcatctgagcagctggatgagattctagccaactaccaggaaatagtgttcgcgcgcacttctcctcagcaaaagctcatcatcgtcgaaggatgccagaggcaagatgccgtcgtcgcggtaaccggcgatggtgtgaacgattctcccgccctgaaaaaggctgacatcgggattgctatgggtatcgctggctctgacgccgctaaaaacgcagctgatatggtcctgttggatgacaacttcgcctcgatcgttaccggcgtcgaggaaggtcgcctgatttttgacaatctcaaaaaaacaattgcttactccttgactaaaaacatcgcggagttatgcccattcctcatatatataatcgtgggcctaccactgcccatcggcacaatcacaatattgttcatagacctcggaactgacattattccgagtatagcgctagcgtacgagaaagcagagtccgacatcatgaatagaaagccgcggcataagaacaaggaccgcctggtgaatcaaccacttgctgtttacagctatttgcacattgggttaatgcaggctttaggggcttttctggtttattttaccgtctacgcacaggaggggttccttcccaggactctgattaacctgcgggtggagtgggagaaagactacgttaacgaccttaaagattcttatggccaggaatggacacgatatcaacgcgaatacctcgaatggacggggtatacagcattttttgtaggtattcttgttcagcagattgctgatctcatcatacgcaagactcgaaggaactctatttttcagcagggcctcttccgaaataaagtgatctgggtcgggatcacgtcgcagattattatagggctcattctctcctatggcctcggaagtgtcacagccctatcttttacaatgctgagggcgcagtactggttcgtagctgtgccacacgccatcctgatttgggtatacgatgaggtgaggaagctgttcataaggctgtatcccgggtcgtggtgggacaagaatatgtactattag

SEQ ID NO: 179905 - DNA, 3072 bp, synthetic construct
  misc_feature 1..3072: note = Description of Artificial Sequence: Synthetic coding sequence
  source 1..3072: mol_type = other DNA
atgggcaagggcgtgggccgggacaagtacgagcccgccgccgtgtccgaacagggcgacaaaaaaggcaagaagggaaaaaaagatagagacatggacgagctgaaaaaagaagtttctatggacgatcacaagctgtctctggatgaactgcacagaaaatacgggaccgacctgagccggggactgacaagcgcccgcgccgcagagattctcgcgagagatggacctaacgctctgacgccacctcccactacaccagaatggataaagttctgcagacagctgttcggaggttttagcatgctcctgtggattggggccatactgtgttttctggcctacagcatacaggccgcgactgaggaggaaccccagaatgataacctgtacttaggcgtagtcttgtccgccgtagtcatcattacaggatgcttctcgtattaccaggaagccaagagcagtaagattatggaaagtttcaaaaatatggtgccacagcaggcactggtgatacgcaatggtgaaaagatgagcattaatgccgaagaagttgtggtcggagatctcgtcgaggttaagggcggcgacaggatcccggctgatcttaggattatcagtgcaaatggctgtaaagtagacaactcctccttgacaggggaatccgagccccaaaccaggagtccagatttcacgaatgaaaatcctctcgagacaagaaacattgcctttttcagtaccaactgtgtggagggaacagcaaggggcattgtggtctacacaggcgacaggaccgtgatgggccgcattgctaccctggcctcgggacttgaagggggccaaacccccattgctgccgagattgagcactttattcatattatcactggggtggctgtatttctgggagtgagtttcttcatccttagcctgatattggaatacacctggctggaagcagtgatatttcttatcggcatcatcgtggccaatgtacccgagggtctgctggccaccgtcaccgtgtgcctgacactgactgctaagcgcatggcccgtaaaaattgcctggtgaagaacttggaagcggtcgaaacccttggctcaacttctacgatttgttctgataagactggaactctgacccagaacagaatgactgtcgcccacatgtggttcgacaaccagattcatgaagcagataccaccgaaaatcagtcaggcgtcagttttgataagaccagcgccacatggttggctctgagtaggattgccggcctttgtaatagagccgttttccaggcaaaccaggagaacctccccatcctcaaaagagccgtggccggagatgccagcgaatcagctcttcttaagtgtatcgaactttgttgcggctccgtgaaggagatgagagagagatacgccaaaattgtggagattccttttaacagcaccaataaataccagctctctatccacaagaatcccaatacctctgagccacaacatcttttagtcatgaagggcgccccagaacgtattctcgaccgttgctcaagcatactactgcacggaaaggagcagccactagatgaagagcttaaggacgcattccagaacgcctatcttgaactgggaggtctgggggaaagagtcctgggtttctgccacctgtttctgcccgacgaacaattccccgagggatttcagttcgataccgatgacgtgaattttcccattgacaacctgtgtttcgttggactgatctctatgatcgatccaccaagggccgccgtacccgatgcagtggggaagtgtaggtccgccggtattaaagtcattatggtcactggcgatcacccgattacagccaaggccattgctaaaggcgttggaatcatctctgaggggaatgagaccgtggaggatatcgccgcaaggttgaacatccccgtaagccaggtcaatcctcgagacgccaaagcttgcgtcgttcacggctcagatctgaaagacatgacgagtgagcaactcgatgatatactgaaatatcacacggaaatcgtattcgcccgcacctcgccacagcagaagcttattatagtggagggttgccagcgtcagggggccatcgtagcggtgaccggcgacggcgtgaacgatagtccagctctgaagaaagctgatattggcgtagccatggggatagcagggtccgatgtctccaagcaggccgccgatatgattctactcgatgacaactttgcttctatcgtaacgggggtcgaagaaggccgcctcatctttgacaatctgaagaaatctatcgcctacactctgacgtctaatataccagagatcactccttttttaatttttatcattgccaatattccgctcccactcggaaccgtgactatcctgtgcattgacctcggcacagacatggttcctgcgatctccctggcgtacgaacaggccgagagcgatatcatgaaaaggcagccccggaaccctaagacggataagctggtgaacgaacgcttaatttccatggcttatggacagattggcatgattcaggcactgggagggttttttacgtattttgtgatactggcagagaatgggtttttgcccatccacctgttgggtttgcgagtggattgggatgatcgatggattaacgatgttgaggactcatatggacagcagtggacgtacgagcagcggaaaattgtggaattcacttgccatactgcattctttgtgtctattgtggttgtgcagtgggctgacttagtcatttgtaagaccaggcgcaactccgtgtttcagcaggggatgaaaaacaagatcctcatttttgggttatttgaggaaaccgctcttgccgcctttttgagctactgtccgggtatgggcgtggccctgaggatgtatcccctcaaacccacttggtggttttgtgcatttccctatagtctgctgatttttgtgtacgatgaggtccgcaaactcatcatccgcaggcgccctggcggctgggtggagaaggagacatattactag

SEQ ID NO: 179906 - DNA, 2043 bp, synthetic construct
  misc_feature 1..2043: note = Description of Artificial Sequence: Synthetic coding sequence
  source 1..2043: mol_type = other DNA
ggcaaggaggtgggccgggacaagtacgagcccgccgccgtgagcgagcaaggagacaagaaaggaaagaaagggaagaaagatagagatatggatgaactcaagaaggaggtgtctatggacgatcacaagctgtccctcgacgagctgcacagaaaatacggcacagatctgtccagggggctgacatctgcccgggcagctgagattctagcccgtgacggacccaatgccttgacacccccacctactacacctgaatggatcaaattctgcagacaacttttcggtgggttcagtatgcttctttggatcggcgccatcctctgcttcctggcatactccatccaggcagccactgaggaggaaccacagaatgacaacctctaccttggagtggtgctgtctgcggtggttatcataacggggtgcttttcatattaccaggaagccaagtcgtccaaaatcatggagtcgtttaagaacatggtgccccagcaggccctggttattagaaatggggaaaagatgagtataaacgccgaagaagtggtagtgggagatctcgtggaggtgaagggtggggatcggattcccgccgatctcaggatcatcagtgcgaatggatgtaaggtcgacaatagcagcctgacgggggagagcgaacctcaaacaagatctcccgatttcaccaacgaaaaccccctcgaaacacgcaatatcgcattcttcagcaccaattgtgtggaaggcactgcgaggggcatcgtggtttacactggagaccgaactgtgatggggcgcatcgctactctggcctctggcttagaagggggacaaactccaatcgccgccgagattgagcactttatacacatcattacaggagttgcggttttccttggggtgagcttctttatattgtccctgatcctggagtatacctggctggaggccgtgatttttttgatagggattatcgtggcaaatgttcccgaaggccttcttgcaaccgtgacggtttgtctgacccttactgccaagcggatggccaggaaaaactgcctggtcaaaaacctcgaggcagtcgagacactcggaagtacctcgactatttgtagcgataagaccggtaccctcacccaaaaccgtatgaccgtggcccatatgtggtttgataatcagattcatgaagcagataccacagagaaccagtcaggggtgagcttcgacaagacttccgctacctggttggcactgtctaggatagcaggcctgtgcaatcgggctgtatttcaagctaaccaggaaaatctgccaatcctaaagagggctgtcgccggagatgcttccgaatccgctcttttgaaatgtattgagttgtgttgcggttcagtcaaggagatgagagaacggtatgcaaagatcgtggagattccctttaattccaccaataaataccagttgtcaattcacaagaatcctaacacgtctgaacctcaacatctactcgtgatgaaaggtgctcccgagcgcattctcgatcgatgctcttctattctcttgcacgggaaagagcaacctttagacgaagagttgaaggatgcgttccagaacgcctacttggagttgggcgggctcggagagagggtccttggtttttgtcatctctttctacctgatgaacagttccctgaagggtttcagtttgataccgatgacgttaactttcccattgacaacctgtgcttcgttggtttgatttctatgatcgaccctccccgggccgctgtgcccgatgccgtcggaaagtgccgcagtgctggcattaaagtaatcatggttaccggtgaccacccaataactgcgaaagcaatcgccaagggggtgggaataatctccgagggcaatgaaccaatgtcccgcggaaagtcttggtcttcgccagcaacccaaccaagcagctcagtgtcatggtggtgctccggccctacttggagctcagtgagacctggtgggatcaggagctcatctcgaggatag

SEQ ID NO: 179907 - DNA, 435 bp, synthetic construct
  misc_feature 1..435: note = Description of Artificial Sequence: Synthetic coding sequence
  source 1..435: mol_type = other DNA
atggacgagctgaagaaggaggtgagcatggacgaccacaagctgtcccttgacgagctacacaggaagtacggaactgacctgagtcgcggtctgacttctgctcgcgcggctgagattctggcccgcgacggtcctaatgccctaacaccacctccaacgactccagagtggattaagttttgtagacaactcttcggcggcttctcaatgctgttatggatcggtgccatcttatgtttcctcgcctattcaatccaggcagccacagaagaggaaccccagaatgacaatttgtacctcggcgtcgtcttgagcgccgtagtgataattacggggtgttttagttactaccaggaggcgaaatctagtaagatcatggagtcttttaagaacatggtcccacaacaggcgctggtgatcagaaatggatag

SEQ ID NO: 179908 - DNA, 2979 bp, synthetic construct
  misc_feature 1..2979: note = Description of Artificial Sequence: Synthetic coding sequence
  source 1..2979: mol_type = other DNA
atggacgagctgaagaaggaggtgagcatggacgaccacaagctgtcactggacgagcttcatagaaagtatggcacagatctttcgcgtggactaacttccgcccgagccgcagaaattctcgctcgcgacggccctaatgctctgactccaccgcccactactccagaatggattaagttctgtagacagttgttcggtggcttctccatgcttctgtggataggtgccattctttgtttcctggcatacagcatccaggctgccacggaagaagaacctcaaaatgacaacttgtatctcggtgtcgtgctgtccgctgtcgtaattataacaggttgcttctcctactatcaggaggccaagtcttcaaagattatggaatcattcaagaatatggtgccacagcaggccctggtgattcgcaacggagaaaagatgtccattaacgcagaggaggttgtggtgggggatctcgtggaggtgaagggcggggatcggatccctgctgatctgcggattatcagtgctaacggctgcaaggtcgataactctagccttaccggtgaatcagaacctcaaacacgttctccagatttcaccaatgaaaatcctctggaaacaagaaatatcgcgttcttctctaccaactgtgttgagggcacagcccggggcattgttgtgtacactggcgaccgcactgtcatgggtcggatcgcaaccctggccagcgggctggaaggtggacagacccccatcgctgccgaaatcgagcactttatccatatcataaccggggtggccgtgtttctgggcgtgagtttcttcattttgagtctcattctcgaatacacttggcttgaggctgtcatcttcttgatcggaattatcgtggccaatgtgcccgaggggctcctggccactgttacagtctgtctgaccttgaccgcaaagcgcatggcccgcaagaactgcctagtgaagaatcttgaagcagtggagactttggggtccacaagtaccatttgctcagataaaacgggaacactgacccagaacaggatgactgttgcccacatgtggttcgataatcagatacacgaggcggacacaactgagaaccagagcggagtctcctttgataaaactagcgctacttggctcgctctgagcaggattgctgggctctgtaacagagctgtttttcaagccaaccaggaaaacctgccaattctgaagagggccgtggctggtgacgccagcgagtcggcccttctgaagtgtatcgagctgtgctgcggctccgtcaaggagatgagggagagatatgccaagatcgtggagattccttttaatagcactaacaagtaccaactcagtatacacaaaaaccctaacacctccgagccccagcatctgttggtcatgaaaggagctcccgaaaggatattggatcgatgttcctctatcctcttacatggtaaagagcaacccttagacgaagagctgaaagacgccttccagaatgcgtacttggagttgggcgggcttggcgaaagagtgttgggcttttgccatctgtttctgccagacgagcagttcccggaaggattccagttcgatacagatgacgtgaactttcccatcgataacctgtgcttcgtcggtctcatttcaatgatcgacccaccaagagccgcagtccccgatgccgtagggaagtgccgatccgcaggaattaaagtcataatggtgaccggggaccaccctatcactgcgaaggctattgcaaagggcgtgggaatcatcagcgaaggaaatgagactgttgaggatatcgctgccaggctcaacattcctgtgagtcaagtgaaccccagggacgcaaaagcttgcgttgttcacggttccgatctgaaagacatgacatcagagcagctggacgatattctgaagtaccacacagaaatcgtttttgctagaacctccccgcagcagaagctgatcattgtcgaaggatgccaaagacagggagctatcgtagcggtgacaggcgatggagttaacgattcgcctgcactgaagaaggcagatatcggcgttgcaatgggcattgctggatccgacgtatcgaagcaggcggccgatatgatcttattggacgacaactttgcctcaatcgtcaccggcgtggaggagggacggctgattttcgataacctgaaaaaaagcatagcctacaccctaaccagcaatatccccgagatcacaccatttctgatctttatcatagccaacattccactgcccctgggcacagtcactatcctatgtatcgatttaggcacagatatggtgcccgccataagcctagcatacgaacaagcagagtccgacatcatgaagagacaaccgagaaatcctaaaaccgataagttggttaatgagaggctgatctctatggcatatgggcagattggcatgatccaagctctcgggggcttctttacatacttcgtaatactcgcagaaaacggttttctacccattcatctcctaggcttgagggtcgattgggatgaccggtggattaacgacgtggaggactcatatggacaacagtggacctatgagcagaggaagatagtggagttcacctgccacaccgctttcttcgtgtcaattgtcgtggtccagtgggccgacctcgtcatttgcaagacacggagaaatagtgtgtttcaacaaggaatgaagaacaagatccttattttcggtttgttcgaggagaccgccctggctgccttcctcagctactgccctgggatgggcgtcgctctgaggatgtatcccctgaaacctacctggtggttctgcgctttcccatactccctactgatcttcgtgtatgacgaagtgaggaagctgattatccgcagacgtcccggggggtgggtcgaaaaggaaacgtactactag

SEQ ID NO: 179909 - DNA, 321 bp, synthetic construct
  misc_feature 1..321: note = Description of Artificial Sequence: Synthetic coding sequence
  source 1..321: mol_type = other DNA
atggacgagctgaagaaggaggtgagcatggacgaccacaagctgtctttggacgaactgcaccgaaagtacggcaccgatttgagtcgcggattgacgagcgcgcgggcggctgagatactggctagagatggacctaatgcactgactccgccaccaaccaccccggaatggatcaagttctgccggcagctttttggtggcttctcaatgctgctgtggatcggggccattctgtgtttcctagcctattctattcaagccgcgacagaagaggaaccacagaatgacaacctatacctgggggtggtgttaagctag

SEQ ID NO: 179910 - DNA, 474 bp, synthetic construct
  misc_feature 1..474: note = Description of Artificial Sequence: Synthetic coding sequence
  source 1..474: mol_type = other DNA
cggcagccccggaaccccaagaccgacaagctggtgaacgagcggttaatatccatggcatacggccaaatcggcatgatccaggccttgggtgggttctttacctatttcgtgattctggcagaaaacgggtttctcccaatccacctgctgggacttcgagtggattgggatgatcgctggataaacgatgtggaagattcttatgggcaacagtggacatatgaacaaaggaagattgtggagtttacttgtcatacagccttcttcgtgagcattgttgtagtccagtgggctgacctggtgatatgcaagacgagacggaattccgtattccaacagggcatgaagaacaaaatcctgatctttggtctttttgaggagaccgcactggctgcattcctctcttactgtcctggcatgggcgtggctctgcggatgtatccgctgaaaacactgactcagtacagttag

SEQ ID NO: 179911 - DNA, 480 bp, synthetic construct
  misc_feature 1..480: note = Description of Artificial Sequence: Synthetic coding sequence
  source 1..480: mol_type = other DNA
atgaagcggcagccccggaaccccaagaccgacaagctggtgaacgagcgtttaatcagtatggcttatggacagatcggtatgattcaggctctaggcggcttctttacgtactttgtaatcttagcggaaaacggctttctccctatacatttgctaggccttcgcgtcgactgggacgatcggtggattaatgacgtagaggatagctatggtcaacagtggacctacgagcaacggaagatcgtagaattcacctgccatacggcattcttcgtgtctatcgtggtggtacagtgggcggatctggtgatatgtaagaccagaaggaatagcgttttccagcagggcatgaagaataaaatattaatcttcggactgttcgaagagaccgcccttgccgcgttcctgtcgtattgtcccggcatgggagtggcgttgcggatgtacccgctcaagactctcacccagtacagctag

SEQ ID NO: 179912 - DNA, 3072 bp, synthetic construct
  misc_feature 1..3072: note = Description of Artificial Sequence: Synthetic coding sequence
  source 1..3072: mol_type = other DNA
atggccttcaaggtgggccgggacaagtacgagcccgccgccgtgtccgagcagggtgacaaaaaggggaagaagggaaagaaggacagagacatggatgagttgaagaaagaggtgtctatggatgaccataagttgtctttagacgagctgcatcggaagtatgggacagacctgagcagagggctgacaagcgccagagcggctgagatactcgcgcgagacggaccaaatgcactcacaccacctcccacaacccctgaatggattaagttttgtcgacaactgttcggcgggttcagcatgctgctgtggatcggagctattctgtgctttttggcgtactccattcaggccgccacagaagaagaaccccagaacgataatttatatttgggcgtcgtcttaagcgcagtggtgatcattactggctgcttcagctattatcaggaggctaaatccagcaaaatcatggagagtttcaagaacatggtaccgcagcaagcgctcgtgattcgcaatggtgagaagatgtctatcaacgcagaggaggtagtcgtgggagatctcgtggaggtgaagggcggcgaccggatacctgccgacctgcggatcatttccgctaatgggtgtaaggtggacaactcaagtctcaccggggaatccgaaccacaaacacgatctccagattttaccaacgagaaccctctggagacaagaaatatcgcctttttcagtacaaattgcgtggaagggaccgcccgcggcatagttgtgtacaccggggatcgaacagtcatgggtcggatagcgactctcgcatcaggactagaaggaggccagacccctatcgctgcagaaatcgaacatttcatacatataatcaccggggtcgcagttttcttgggggtgagtttttttattctgtccctcatcctggagtatacttggctggaagcggttatctttctcatcggcattattgtggccaacgtccctgagggcttgcttgctacagttaccgtttgcctgacactgacggccaagcgaatggctagaaaaaattgtctcgtgaagaatctagaggccgtggaaacgctggggtctacaagtactatctgctcagacaaaaccgggacactgacacagaaccgaatgacagtggcccacatgtggttcgacaaccaaatccacgaggccgataccactgagaatcaatccggcgtaagtttcgataagacctcagccacatggctcgccttatcacggattgctggcctctgtaaccgggctgtgtttcaggctaatcaggagaatctccctattctgaagcgcgccgtcgctggagatgctagcgagtctgctctcctgaagtgcatcgagctgtgctgcggttctgttaaggaaatgcgggaaagatatgctaagatcgtggagatcccatttaattccacaaataaatatcagttgagtatacacaagaatcctaacacgtcagaaccacagcacctactggtcatgaaaggggcgccagagaggattctagatagatgttcttctatcctcctgcacgggaaggaacagcctttggacgaagagctaaaggatgcatttcagaacgcttatctcgaactgggcggattaggggaacgggtgctggggttttgccacctgtttctacccgatgaacagtttccggaagggttccagtttgacacagatgatgtgaacttcccaattgataatctctgtttcgtggggttgatctcaatgatcgacccgccgcgagctgcagtgcctgatgcagtagggaaatgcagatctgccggcattaaggtgatcatggtaaccggagaccaccctattactgcaaaggccattgcaaaaggcgtggggatcatctccgagggaaatgagaccgtcgaggatatagcggcaaggctgaatattcccgtgtcacaagtgaatccccgtgatgcaaaggcctgcgtcgtccacggatcggatctcaaagacatgacgtcagagcagctggacgatatcttgaaatatcatactgagatagtgttcgccagaacttctccccagcagaaattgatcattgttgagggctgtcagaggcagggcgctatcgtggcagtgactggtgatggggtaaatgactctccggccctgaagaaggccgacatcggagtggcgatgggtatcgccggctctgatgttagtaagcaagccgccgatatgattctacttgacgacaatttcgccagcattgtgaccggagtcgaggagggacgcctgatctttgataacctgaagaagtcgatcgcctacacccttacatcgaatattccagagatcactccctttctgatttttattatcgccaatataccccttccattaggcacagtgaccatactgtgtatcgatcttggtaccgatatggtaccagccatctctctcgcctacgagcaggccgaatccgacatcatgaagaggcagccacggaatccgaagaccgataaactggtaaatgaaaggcttatcagcatggcatacgggcagattggcatgatccaggcgctgggcggtttttttacatattttgttatcctggccgaaaatggctttctgcctatccacttgctggggctgcgagtggactgggatgacagatggatcaacgatgtggaggattcttatgggcagcagtggacatacgaacagcgaaaaatagtcgagttcacatgtcataccgcattcttcgtaagtatcgtggtggtacaatgggctgacctggtgatatgcaaaaccagacgcaacagtgtttttcagcaaggcatgaaaaacaaaatcttaatcttcggtctgttcgaggaaaccgccctggcagccttcctgtcatactgcccgggcatgggggtggctctgagaatgtatcccctgaaacccacgtggtggttttgcgccttcccttactcattgttgatattcgtatacgatgaggtaagaaaattaattatcagaaggcgacctggaggatgggtggaaaaggaaacatactactag

SEQ ID NO: 179913 - DNA, 3063 bp, synthetic construct
  misc_feature 1..3063: note = Description of Artificial Sequence: Synthetic coding sequence
  source 1..3063: mol_type = other DNA
atgggccggggcgccggccgggagtacagccccgccgccaccaccgctgagaacggcggcgggaagaaaaagcagaaagagaaggagctggatgagctcaagaaggaagtggctatggacgaccacaagctctccttagacgaattaggccgcaaataccaggttgacctcagcaaagggctaaccaatcagagggcacaggacgtgctagcaagggatggtccaaacgcactcacacctccgcccacgactcccgagtgggtgaagttctgtcggcaactgtttggcggattttccatcctgctatggatcggcgctattctctgctttctggcctacgggattcaggcagccatggaagatgagccatcaaacgacaatctctacctgggcgtcgtcctggccgcggtcgtcattgtcactggctgtttcagctactaccaggaagctaagtcttccaaaataatggacagcttcaagaatatggtaccccagcaggccctcgttatccgggagggggagaaaatgcaaattaatgccgaagaagtcgtggtgggcgacctggtggaagtgaagggaggtgacagagtgcccgctgacctgcggatcatatcctcacatgggtgtaaagtggacaactcttccttgactggagaaagtgagccgcaaactaggagcccagaatttacacacgagaaccccttagaaacccggaatatctgttttttcagcaccaattgcgttgagggcactgcaaggggtatagtgatcgcaaccggcgatagaacggtcatgggtcgtattgccacactcgctagcggtctggaggtcggacggactcctatcgctatggagatcgagcacttcattcaactgatcacgggcgtagccgtgtttctgggtgtgtcgttttttgtcctgagtctgattctaggatactcctggctggaagccgtgatcttcctgattggaataatcgtggccaacgtgcccgaaggtcttctcgccacagtgaccgtgtgcctaacactgacagctaaacgaatggcaaggaaaaactgccttgtgaagaatcttgaagcagtagaaaccctcgggtctacctccaccatttgttccgataaaaccggcacgttgactcagaataggatgacggtggctcatatgtggttcgacaatcagatccatgaggcagatactaccgaagaccagtccggggctacatttgacaaaaggtcccctacctggacagcactttcaaggatagcagggctctgtaaccgggccgtttttaaggctgggcaagagaatatttccgtgtctaagcgggacaccgccggggacgcgtccgaaagtgccctgttaaagtgtatcgagctgtcctgtggctctgtgcgaaagatgcgcgaccggaatcctaaggtcgcggagattccgtttaacagtaccaacaagtatcaacttagcattcatgaacgggaggactctccccaaagtcacgtgctggttatgaagggagcaccggaaagaattctcgataggtgcagcaccatactggtccaggggaaagagatacccttggataaggaaatgcaggacgctttccagaacgcctatatggagcttggtggtctgggagagcgtgtgttaggcttttgccagctgaacttgcccagtggcaagttccctcgcggctttaaatttgatacagatgaacttaacttcccaactgagaagctttgcttcgtcggcctgatgtccatgattgatcccccccgagccgctgtgccagatgcagtgggcaaatgcagaagcgcggggattaaggtcatcatggtgactggcgaccacccgatcaccgcaaaagctattgcaaaaggagtcggcattatatcagagggcaatgagacagttgaagacatcgccgcccggctgaatatccctatgagccaggttaaccctcgtgaagccaaagcttgtgtagttcacggatccgatctgaaagacatgacatcggagcaattggacgagatcctcaagaaccacaccgagatcgtcttcgcccgaactagtccgcaacagaaactcattatcgtcgaaggctgtcagcggcagggcgccatcgtggctgtgacaggcgacggggtgaacgacagccccgcactcaaaaaggccgatatcggtatcgccatggggatttctggttccgacgtgtcaaagcaggcagccgacatgattctgctcgatgacaatttcgcaagtattgtcactggcgtcgaagagggaagactaatattcgataacctgaaaaaaagtatagcatacaccttgacctcaaacatccccgagattacacctttcttgttgttcatcatagctaatattcccctgcctttaggaacagtcacgatactgtgtattgacctggggaccgacatggtcccggcgatatcattagcatatgaggcggcagagagcgacattatgaagagacagccccgcaattctcagacagacaagctcgtcaacgaacggctcatctctatggcttacggacagattggaatgatccaggcgcttggggggttcttcacgtatttcgtgattctagctgagaacgggttcctcccaagtaggctattgggtatacggctggactgggatgaccgtacgatgaacgatctggaggactcctacggccaggagtggacctatgagcaacgcaaggtggtcgaattcacctgccataccgcgtttttcgcgtccatagttgtggtacagtgggcggacttgatcatatgtaaaacacggcgcaactccgtttttcaacagggaatgaaaaataaaatcctgatattcggattactggaggagacggctttggccgcttttctcagctattgcccgggcatgggagtcgccttgcgcatgtacccattgaaggtgacgtggtggttttgcgcttttccttacagtcttctcatcttcatttatgatgaggtgcgtaagctgattcttaggcgctaccccggcgggtgggtggaaaaggagacctactactag

SEQ ID NO: 179914 - DNA, 3030 bp, synthetic construct
  misc_feature 1..3030: note = Description of Artificial Sequence: Synthetic coding sequence
  source 1..3030: mol_type = other DNA
atgggccggggcgccggccgggagtacagccccgccgccaccaccgcggaaaatggaggagggaaaaaaaagcaaaaagagaaagaattagatgaactgaaaaaggaggtcgcaatggacgaccataaactatctttggatgagttgggaagaaagtatcaagttgaccttagcaaggggttaaccaaccagcgcgcccaggatgtgctggctcgggatggaccgaacgccttaacacccccccctacaacccctgaatgggtgaagttctgtaggcagttatttggcggcttctctatcctgctatggatcggagccatcctttgtttcctcgcctacgggattcaggctgctatggaagatgagccaagtaatgataacctgtatctcggagttgttttagccgccgtggtgatagtcaccggctgctttagctattatcaggaggcaaagtcatctaagattatggactcattcaaaaacatggtcccccagcaggcgctggttatacgagagggcgagaagatgcagattaatgctgaagaagttgttgttggagacttggtcgaagtaaagggcggtgatcgggtccctgctgacttgaggattatatcctcccatggatgcaaggtggacaacagcagcttgacaggggagtcggaaccccagacgcgcagccccgagttcactcacgaaaaccctctggagaccagaaacatctgctttttctccactaattgcgttgaaggaaccgcccgggggatagtgatcgcaactggcgataggaccgtgatgggacggattgcaactctggcatccggcctggaagtgggcaggactcccatcgccatggagatagagcatttcatccagcttatcaccggggtggccgtctttctcggagtgtccttcttcgtgttgtctcttattctgggctacagttggttggaggccgtgattttcctgattggaataatcgtggctaacgtgcccgagggcctactcgccacagtgaccgtatgtcttacattgactgctaagcggatggcccggaagaattgtctggtgaaaaacctcgaggctgtggagactttgggctctacatccactatttgcagtgacaagacaggaacactgactcaaaacagaatgactgtcgctcacatgtggtttgacaaccagatacacgaagccgatacaacagaagatcaatcaggcgccacctttgacaagcgctcccccacgtggaccgctctctcacgcatcgctggcctatgtaacagggccgtatttaaagcaggacaggagaacatttccgtgagcaagcgcgataccgctggcgacgctagtgagtcggctctgctgaagtgcatcgaactatcctgcggcagtgtgagaaagatgagagaccgtaatccaaaagtagctgagattcccttcaattcgacaaacaaatatcagttgagtatccacgagcgagaagacagtccccagtctcatgtcctggtgatgaagggcgcccccgagcgaatcctggacaggtgctcaacaatactggtgcaggggaaggaaatcccactcgataaggaaatgcaagacgcattccagaatgcatacatggaactcggtggtcttggagaaagagtgctcgggttttgccagctgaatctcccctcagggaagttcccacgcggttttaaatttgacaccgacgaattgaacttccccaccgaaaagctgtgtttcgtcggtttgatgtccatgatcgacccaccacgcgccgccgtgcctgacgccgttgggaaatgtcgctccgctggtatcaaggtgattatggtaaccggcgaccaccccatcaccgccaaagccatcgcaaagggcgtgggtattatttccgaaggtaacgaaacagtcgaggacattgcggcgcggctcaatatccctatgtcccaggtcaatcccagggaggccaaggcctgcgtggtacatgggtccgatctaaaggatatgacaagcgagcagctggatgagattctgaaaaaccacaccgagatcgtgtttgccaggacaagcccacagcagaagctcatcatcgttgagggatgccaaagacagggcgcaattgtggccgtcaccggggatggcgtgaacgattccccagcattgaaaaaggcagatatcggcattgcgatgggaatctccggcagtgacgtgtccaagcaggctgccgatatgattctgttggacgacaatttcgcctcaatagtaaccggcgtcgaagaagggcgtctgatatttgataatcttaaaaagtccatcgcgtacacattaacctcgaacattcccgagataacacctttcctcttgtttatcattgcaaacatccccctccccctcggtaccgtgactattctctgtatcgacttggggacggacatggtacctgctatcagcctggcgtatgaagccgccgaatccgatattatgaaacgccaaccccgcaacagtcagacagataaactcgtcaatgaaagactcattagcatggcctatggtcagatcggcatgattcaggcccttggggggttttttacatacttcgtgattctcgctgagaatggcttcttgcctagcagactgctgggaatcaggcttgactgggatgacagaacaatgaacgatttggaggattcatacgggcaagagtggacctacgagcagcggaaggtggtcgaattcacttgtcacaccgccttctttgccagcatcgtggtggtccagtgggctgaccttatcatttgtaaaactagacgcaactctgtgttccaacaaggcatgaaaaataagattctgatcttcggattactagaggaaacagctttggccgcattcctgagctattgccctggtatgggtgtcgccctgcgcatgtatcctctgaacctgctgattttcatctacgacgaggtgagaaaactcattttgagacgctatcccggtgggtgggtggagaaagagacgtactactag

SEQ ID NO: 179915 - DNA, 2172 bp, synthetic construct
  misc_feature 1..2172: note = Description of Artificial Sequence: Synthetic coding sequence
  source 1..2172: mol_type = other DNA
atgctgagcagcgccctggccctgagcggcgccctggtgaagcggctaaagccacccaacggacattttatcctcaccgatactcatgatcttaacacgtccaaaattgaacattcactctttaccgtctgcctgactttgacagccaagaggatggctcggaaaaattgtcttgttaagaacctggaggcagtcgaaacgctaggttcaactagcaccatctgtagcgacaagacaggaaccctcacgcaaaaccgcatgacagtggcccacatgtggtttgataaccaaatccatgaggccgacacaacagaggaccaatccggtgccacctttgataaacgatctcctacctggacggcactgtcacgtattgcgggcctatgcaacagggctgtatttaaggccgggcaagagaacatttctgtttcaaaacgggataccgctggcgacgcctcagagtctgcgctgctgaaatgcatcgagctgtcatgtggttcagtgagaaagatgagggatcgaaaccctaaggtggccgagatccctttcaacagtacgaataagtaccagctgtctatccacgagcgtgaagactcaccccagtcccatgtcttggtgatgaaaggtgcgcctgaacgaatactcgataggtgttccactattctcgtacaggggaaggagattcccctagataaggagatgcaagacgccttccaaaacgcatatatggagttgggtgggcttggggagcgcgttctcggcttttgtcagctcaatctcccttcagggaagtttccaaggggcttcaagttcgacacggatgaattgaatttccccactgaaaaactttgtttcgtcgggttgatgtctatgatagatccgcccagagccgctgtgcctgatgccgtaggaaagtgcaggagtgctggtataaaggtgataatggttaccggggaccaccccattacagctaaggcaattgccaagggtgtgggcatcatttctgaaggaaacgagacggtcgaggacattgccgcacgcctgaatatccccatgtcacaggtgaatcccagagaagctaaggcgtgtgtggtacatgggagcgacttaaaggacatgacaagtgagcagctcgacgaaatcttaaagaatcacaccgagatagtgttcgcgcgcacatcgcctcaacaaaagctgataatcgtcgaaggctgccaaagacaaggcgccattgtggccgtgaccggcgacggcgttaatgactcaccagctctcaagaaggccgatatcggtatagcaatgggtatcagtgggtctgatgtctcaaaacaggcagccgacatgatcctgctcgacgataatttcgcttccattgtgacaggcgtggaggaaggtcgcctgatctttgacaaccttaagaagagcattgcatatactttgacaagtaacatccctgagattacacctttcctgctctttatcatcgccaatattccactacccctaggcacagtgactatcctgtgcatcgacctgggcaccgatatggtcccagctatcagtctggcttacgaagcagccgagagcgacattatgaaaagacagccacgtaattcacagacggacaagctggtcaatgagcggctcatctcaatggcctacgggcaaattggcatgatccaggcactcggcggcttcttcacttatttcgttattttggcggagaacggttttctgccctcccggcttttaggtataaggctcgattgggacgacaggaccatgaacgatctggaagactcgtatggtcaggagtggacttatgagcaaagaaaggtggtggaattcacctgccacactgctttcttcgccagcatcgtcgtagttcaatgggccgaccttatcatatgcaagacgaggagaaattctgtctttcagcaggggatgaagaataagatcttaattttcggcttacttgaggagacagcacttgcagccttcctgtcatactgccccggcatgggtgtcgctttgagaatgtacccgctaaaggtcacctggtggttctgtgcctttccatattcgctgctcatctttatctacgatgaagttcgaaaactgatcctgagaagataccctggaggttgggtggagaaggaaacatactattag

SEQ ID NO: 179916 - DNA, 2145 bp, synthetic construct
  misc_feature 1..2145: note = Description of Artificial Sequence: Synthetic coding sequence
  source 1..2145: mol_type = other DNA
tgacagctgatcaccggcgtggccgtgttcctgggcgtgagcttcttcgtcttatcacttatccttggctattcctggctggaagcggtgatcttcctgattggaatcattgtcgctaacgtgcccgagggtctgctggccaccgtaacagtatgcctgacgctcaccgccaagcgaatggcccgcaaaaactgtttggtaaagaatctcgaagcggtggagacactgggcagcacatccacaatctgttcagataagacgggtaccctcacacagaatcggatgactgtggcccacatgtggttcgataaccaaattcacgaagccgataccactgaggatcagtccggagctacatttgataaacggagcccaacatggaccgccctcagtagaatcgccgggctgtgcaaccgtgcagttttcaaagcggggcaggagaatatctccgtatcaaaacgagatacagccggcgatgcgtccgagtccgcactgctgaaatgtatagaactgtcctgtggctcagtgaggaagatgagagacagaaatccgaaggttgccgagattccatttaactcaactaataagtatcagctcagcattcatgaaagagaagacagtccccagtcacacgtcctggtaatgaagggagctcctgagcgcattttagaccgatgcagtacaatactggttcaggggaaggaaattcctctggacaaggagatgcaggacgcatttcaaaatgcatacatggaactcggtggccttggagagcgtgtgcttggtttctgccagctgaacttgccatctggaaaatttcccaggggcttcaaatttgacactgacgagctgaacttcccgacagaaaaattgtgttttgtcggactgatgtctatgattgatccaccaagagcagccgtgccagatgctgttggaaagtgcagaagcgcaggtattaaagtgattatggtgacaggagaccaccccattaccgccaaagctattgccaagggagtcggcatcatttcggaggggaacgaaaccgttgaagatattgccgccaggctcaatatccctatgtctcaagtgaatccacgcgaagcaaaggcatgcgtagtgcatggttccgacttgaaggatatgactagcgagcaactggatgagatcctcaagaaccacaccgagattgtgttcgcccggaccagtcctcagcagaagcttatcattgtggaggggtgccagaggcagggcgccatcgtggctgttaccggcgatggagtgaatgattcccctgccctcaaaaaggctgatatagggatcgctatggggatctctgggagtgacgtgtccaaacaagctgccgatatgattctactggacgacaactttgccagtattgttacaggcgtggaggaaggtaggcttatttttgataaccttaagaagagcattgcctatacactaaccagcaacattccagaaatcaccccctttcttctgtttatcatcgctaacatccctctgcctttgggaacggtgaccatcctttgcatcgacctaggaactgacatggtgcctgccatctccctagcgtacgaggccgcagagtccgacataatgaagcgacagccgcgtaattcccagaccgacaaactggtaaatgagcggctcatatcaatggcttacggacagatagagaatggcttcctcccaagccggctgttgggcatacgactcgattgggatgacagaaccatgaatgacctggaggattcctacggccaggagtggacttacgaacagcgcaaggtggtggaatttacatgccataccgccttttttgcctctattgtcgtggtgcaatgggcagatttgattatctgtaaaacgaggcgaaatagtgttttccagcagggtatgaaaaacaaaatcctgatctttggcctactggaagaaaccgcgcttgcagctttcctgtcttattgcccagggatgggagtggcattgcgtatgtatcctctgaaagtgacttggtggttctgcgcctttccatactccctcttaatttttatctatgatgaagtgaggaagctcattctgcggagatatccaggaggctgggttgaaaaagaaacttactactag

SEQ ID NO: 179917 - DNA, 819 bp, synthetic construct
  misc_feature 1..819: note = Description of Artificial Sequence: Synthetic coding sequence
  source 1..819: mol_type = other DNA
atggacagcttcaagaacatggtgccccagcaggccctggtgatccgcgaaggagagaagatgcagatcaacgccgaagaggtggtggttggagacctcgtggaggtcaaaggcggtgaccgcgtgcctgccgacctgaggatcataagttctcacggctgcaaagtagataacagcagcttgacaggcgagagtgagcctcagacaagaagccctgagtttacacatgaaaatccattagagactagaaacatttgctttttttccacgaattgtgtggaaggcacagcgaggggtattgtaatcgctacaggcgaccgtactgtgatgggtcgaattgccacgcttgcatcaggcctggaggtgggcaggacaccaatcgctatggagatcgaacatttcatacaactgattacaggagtcgctgtgttcttgggagtctcgttctttgtactctctctcattctgggctacagctggctggaagccgtcatctttctgatagggattatcgtggcaaatgtgcctgaaggtcttctcgcaaccgtgactgtgtgcctgactttgaccgccaagcggatggcccgtaaaaactgcctcgtgaaaaatctcgaagctgttgaaacactggggagtaccagcaccatctgctccgacaaaacagggaccctcacccagaaccggatgactgtggcccacatgtggtttgataatcagattcatgaagccgatacgaccgaggatcagtctggagactgggttctccagcggggctggataggtcttgaagaggccgagggctccggcgtcgtgggctag

SEQ ID NO: 179918 - DNA, 3042 bp, synthetic construct
  misc_feature 1..3042: note = Description of Artificial Sequence: Synthetic coding sequence
  source 1..3042: mol_type = other DNA
atgggcgacaagaaggacgacaaggacagccccaagaagaacaaggggaaggaacgtcgcgaccttgatgatctgaagaaagaagttgcaatgactgagcacaaaatgtcagttgaggaagtctgtcgaaagtacaatacggactgtgtccaggggctcacccactcaaaagcccaggagatcctagcccgggacgggccaaatgccttgacgccacctcctaccacgccagagtgggtgaaattctgccgacaactatttggtggattcagtatattactgtggattggagccatcctctgctttctggcctatggaattcaggccggaaccgaagacgatcccagcggtgacaatctgtacctcgggatcgtgttggcagcagtagtaattatcaccggttgcttcagttactatcaggaagctaagagtagtaaaatcatggagagcttcaagaatatggtcccccaacaggcgctagtgattagagaaggggaaaaaatgcaagtaaatgccgaagaggtggtggtgggcgacctggtggaaataaaaggcggtgacagagtgcccgctgacctccggatcatttcagcccatggctgcaaggtggataattcatctctaaccggcgagtctgaaccacagacccggagccccgactgtacccatgacaatcccctcgaaactcggaacattactttcttcagtacaaactgcgtggaaggcacggccagaggggtcgttgtcgctacaggagaccgaactgttatgggaagaatcgctacactagcgtcagggctggaggtcggaaagactcccatcgccatcgagattgaacatttcatacagctaattactggcgttgccgtcttcctgggcgtctccttcttcatcctttccttgattctgggttacacctggcttgaggccgttatctttctgatcggcatcatagtcgcaaacgtgcccgaaggtttgcttgctacagtcaccgtctgccttactctgacagctaagcgaatggctagaaagaattgtttagtgaagaacctcgaggcggtcgagaccctaggcagcacaagcaccatctgtagcgataagacggggaccctgacgcaaaatagaatgaccgtcgcgcacatgtggttcgataaccagattcatgaggccgataccaccgaggatcagagtggtacctcctttgataaatcttcccatacctgggtagcactgagccacatcgcagggttgtgcaacagggctgtcttcaagggcggccaggataacattccagtgcttaagcgcgatgtggctggggacgcttccgaatctgcgctgttaaagtgtattgaattgtctagtggcagtgtgaagctaatgagggagcgcaataaaaaagtggccgagattccatttaacagtacgaataaataccagctgagtatacacgagaccgaggacccgaatgataaccgatatcttctggtgatgaaaggcgctccagagcgaattttagaccggtgcagtaccatcttgcttcaagggaaggagcaacccctggatgaagaaatgaaggaagcattccagaacgcttacctcgaattgggaggccttggtgagcgggtgcttggcttttgccattattacctccctgaagaacaatttcctaaaggattcgcctttgactgcgacgacgtcaattttactacggataatttgtgtttcgtcggtttaatgtcaatgatcgaccctcctcgagctgctgtaccggacgcagtggggaagtgcaggtctgctggaattaaggtcattatggtgacaggcgatcacccaataacggcaaaggcgatcgccaagggagtgggtattatcagtgaaggaaacgagactgtggaagatattgccgctagacttaacatccctgtgagtcaggttaatccccgggatgccaaagcttgcgtgattcacggaactgacttgaaagatttcacctcggaacagatcgacgaaatcttgcagaaccacaccgaaatcgttttcgctagaacctcaccccagcaaaagctgatcattgttgaaggttgccagagacagggcgccattgttgcagtgaccggggacggagtaaatgattccccggccctcaaaaaagccgatatcggcgtagcgatggggatcgctggatcagatgtgtccaagcaggctgccgacatgattctgctggatgacaacttcgcgtcgatagtgacaggagtggaagaaggtcgtctgatattcgacaacttaaaaaaaagtatcgcatacaccctgacctcgaacatcccagagatcaccccatttctgttatttatcatggccaacatcccacttcctctgggtacgattactatcctttgtatcgacctggggacggacatggttcccgcaatctcccttgcctacgaggccgcagagtcagacattatgaagcggcagccaagaaaccctcgtaccgataagttggtaaatgaacgccttatctccatggcctacggacaaattgggatgatacaggcgttgggggggttcttcagctatttcgtgatactcgctgagaacggcttcttacccggcaacttggtagggatccgtcttaattgggatgacaggactgtcaatgacttggaagacagttatgggcaacagtggacctacgaacagaggaaggttgtggaatttacatgtcacaccgccttctttgtctccatcgtagtggtccaatgggctgatctcatcatctgtaagacaaggcggaatagtgtctttcagcaggggatgaagaataagatacttatctttgggctttttgaggagacagcactggctgcatttttgagttattgccccggaatggatgtggcactcagaatgtaccccctgaaaccatcttggtggttctgtgccttcccttactcattcctcattttcgtctatgatgagattcgcaaactgatattgcgaaggaaccctggcggctgggtggagaaggagacctattactag

SEQ ID NO: 179919 - DNA, 2952 bp, synthetic construct
  misc_feature 1..2952: note = Description of Artificial Sequence: Synthetic coding sequence
  source 1..2952: mol_type = other DNA
atgaccgagcacaagatgagcgtggaggaggtgtgccggaagtacaatacagactgcgttcagggacttacccactctaaagcccaagagattcttgcccgcgacgggcctaatgccctcacaccaccacctacaacacccgagtgggttaagttttgccgccagctgttcggcgggttcagcattcttctctggattggtgccatcctgtgtttcctcgcatatgggatccaggctggtacagaagacgatccttccggggacaacctatatcttggaatagttctggcggctgttgtgataatcactggttgcttttcttattaccaggaagctaaatcgtcgaaaatcatggagagctttaagaacatggttccccagcaggctttagtgattagggagggggagaagatgcaagtgaacgcggaggaagtcgtggttggtgatctggttgaaattaagggtggtgacagagtgccagccgatctccgtatcattagcgcgcatgggtgcaaggtggacaactctagcctgacaggagagtccgagccccagacgcgctcacctgactgtacccacgataatcctctggaaacaaggaatattacgtttttcagcacaaactgtgtcgaaggaaccgcccgcggcgttgtggtagccacaggcgaccggaccgtgatggggagaattgccacactggcctcaggcctggaggtcggcaagacaccgattgccatcgagattgaacattttatccaattaataactggagtggcagtcttcctgggcgtgagtttttttatcctatcactcattcttggctacacctggctcgaagccgtgattttcttaattggcatcatagtggctaatgtaccagagggcctgctggccactgtcaccgtgtgcctgacgctcaccgcaaagcggatggctcgaaagaactgcctggtcaagaacctggaggctgttgagactctgggctcaaccagcacaatctgctcggacaagactggaaccctgacccagaatcggatgacggtagctcatatgtggtttgataatcagatccacgaagccgacaccacagaagatcaatcagggacatcattcgacaaaagtagtcacacctgggttgcccttagtcatatcgctggcctttgtaaccgcgccgtgtttaagggcggccaggacaatataccagttttgaagcgtgatgttgctggggacgcaagcgagtctgctttgcttaagtgcattgaactgagcagcggcagcgtgaagctgatgcgggagcgcaacaaaaaagttgcagaaattccattcaattcaaccaacaagtaccaactgagcattcacgaaaccgaggaccccaacgacaaccggtacctgctcgtcatgaagggggctccagaacggattctcgatagatgctccaccattcttcttcaggggaaggagcagccactggacgaggaaatgaaggaggccttccagaacgcttatctggagctcggtggacttggggagcgggtgctggggttctgtcattattatctgcccgaggagcagttccccaagggttttgcctttgattgcgatgatgttaatttcaccaccgacaatttatgcttcgtgggactaatgagtatgattgaccctcctagagccgccgtccccgacgcagtgggcaagtgccgttccgctggtattaaggtgattatggtcacaggtgaccatccaatcacggccaaagcaattgctaaaggagtgggcattatctcagaggggaacgaaactgtggaagacattgccgccaggttaaatatccctgtcagtcaggttaacccacgtgacgccaaggcatgtgtcattcacggtacggatctaaaagactttacatcagaacagatagatgaaattctgcagaatcacactgaaatcgtgttcgctcgaactagcccgcagcagaaattgattatagtcgaaggttgtcagcgtcagggagccattgtggccgtgacaggcgacggtgtgaacgactcaccggcccttaaaaaagccgacatcggcgtcgccatgggtatagccggcagcgacgtcagcaagcaagccgcagatatgatcttgctagatgacaattttgcttccatagtcaccggcgttgaggaaggccggctgatctttgataatctgaagaaaagcatcgcatataccctaaccagtaacatccctgagatcaccccattcttattattcataatggcgaacatccctctgcccttgggcactatcacaattctgtgcatagacctgggcactgatatggttcctgccatttccctcgcctacgaggccgctgagagcgatattatgaagagacagccaagaaacccaagaacagataagctggtgaatgaaagattgatctcaatggcgtatggtcagatcggaatgatccaagccttgggcggctttttttcttacttcgttatacttgccgaaaacggcttcctccctggcaatctcgtcggcatcagactaaactgggatgacaggaccgttaacgatctcgaagatagttatggacagcagtggacgtatgagcaaaggaaagtggtggaatttacttgccacacggcgtttttcgtgtccattgtcgtggtgcagtgggcagacttgattatatgtaagactaggaggaacagcgtcttccagcaagggatgaagaataagatcctcattttcggactgttcgaggaaaccgccctcgcggcttttctctcatattgccccggcatggacgttgccctgaggatgtatccgcttaaacccagctggtggttttgcgcttttccttacagtttccttatcttcgtttatgatgagatcaggaagctcatcctgaggaggaatccaggggggtgggtagagaaggaaacctactactag

SEQ ID NO: 179920 - DNA, 3681 bp, synthetic construct
  misc_feature 1..3681: note = Description of Artificial Sequence: Synthetic coding sequence
  source 1..3681: mol_type = other DNA
atgggcgacaagaaggacgacaaggacagccccaagaagaacaagggaaaggagcgccgagaccttgacgatctgaagaaggaagtagccatgacggagcacaaaatgagcgttgaggaggtgtgccgcaagtacaataccgattgtgtgcagggtttgacacactcaaaggcccaagaaatactcgccagagacgggcccaatgccctcacccctccacccaccactcccgagtgggtgaagttctgtaggcagctgttcggcggtttcagtatactgctgtggatcggggccattttgtgcttccttgcttatggcatccaggcaggaactgaggatgaccctagtggggacaacctgtacctcggtatcgttctggcagcagtggtgatcatcactggatgcttctcttattatcaggaagctaaatctagcaaaatcatggagtcttttaaaaatatggtgccccagcaggccctcgtcatccgtgagggcgaaaaaatgcaggtaaacgccgaggaggtcgtcgtgggagacctagtggagataaaggggggcgacagagtaccagccgacctccgtattatatccgcacatggatgcaaggtggacaattccagcctgaccggcgagagtgagccacagacacggagtcccgactgtacccatgataacccgcttgaaaccagaaacatcacctttttctccaccaactgcgtagaagggacagcacgtggcgtggtcgttgctacaggggatcgaacagtgatgggccggatcgctacactagcatccggactcgaggtgggaaagactcccatcgcgatcgaaatcgagcactttatacagttgattactggggtggcagtatttctgggtgtcagtttcttcatcctgagtctgatcctcggttacacctggctggaggctgtgatcttcctgatcggaatcatagtcgccaacgtgcccgaaggactgcttgctaccgtaaccgtgtgcttgaccctcacggccaagaggatggcccgcaagaattgcctcgtgaagaacttggaagccgtcgaaacgctgggctccacctccactatttgcagcgacaagaccggcacgttgacacagaacaggatgacagtcgcacacatgtggtttgacaaccagattcacgaggccgatactaccgaggaccagagcggcacaagcttcgataagagcagtcatacgtgggtcgcactttcccacattgcaggactgtgtaatagggcagtgtttaaaggcggacaggacaatataccagtgttgaagcgggatgtggccggggacgctagcgaaagcgcactactgaaatgtatagagctttctagcggctcggtgaaacttatgagagagaggaataagaaagtcgccgagattcctttcaattccactaacaagtaccagctctcaattcatgaaacagaggaccctaatgacaaccggtacctcttggtgatgaagggcgcccccgagcgtattctggaccgctgttcgactattctcctacaagggaaagaacagcctcttgacgaagaaatgaaagaggccttccagaacgcctatcttgaactaggtggacttggcgagagagtgctaggtttctgtcattattatcttccagaagaacagttccctaaaggcttcgccttcgactgcgatgatgttaacttcactactgataacctatgttttgttggactgatgtcgatgatcgaccccccccgggccgcggtcccagatgccgttggtaagtgccgtagcgccggcatcaaagtgatcatggtcacaggtgatcaccctattacagctaaggctatagccaagggcgtggggataatctccgaaggcaatgagaccgtggaagacatcgctgcccggctcaatatccccgtgtcccaagtcaacccgcgggacgccaaagcgtgcgtaatacacggaactgatctgaaggattttacttcagaacaaattgatgaaatacttcagaatcataccgaaatagtgttcgcgcgaacctcaccgcagcaaaaactaatcattgtggaggggtgccagagacaaggggccattgtggccgttacaggggacggggtcaacgatagtcccgctctgaagaaagccgacatcggggtggccatgggaattgctggcagcgatgtgagtaagcaggccgctgacatgatcctcttggacgacaactttgcgtccattgtcacaggcgtcgaggaaggacgactgatttttgataacctcaagaaatcaattgcatatacgcttacgtcgaacatacctgagataacaccatttctgctgtttattatggcaaatatccctttgcccctcggcacaattacaatcttgtgcatcgacttggggactgatatggtgccggcaatatctctggcttatgaggccgccgagagtgatattatgaaaaggcagcctaggaatcccagaacggacaaacttgtgaacgagcgcctgatctcaatggcctatggccagatagggatgatccaggccctgggcgggttcttttcatactttgtaatcctcgcagagaatgggttcctgccaggcaacctcgttggcatccgcctaaattgggacgacaggactgtgaacgacctagaagattcatatggtcagcagtggacctatgaacagcgtaaggtggtggagtttacctgtcacactgctttctttgtttctatcgtggtagtccagtgggcagaccttattatctgtaagactagaaggaattcagtgtttcagcaagggatgaaaaacaaaatcctaatcttcgggctgtttgaggaaactgccctcgcagccttcctcagttactgcccgggaatggacgtggccctgaggatgtaccctttgaagccctcttggtggttctgcgcattcccatactctttcttaatcttcgtgtacgacgaaatacgcaaactaatcttgcgcagaaaccctggcggagagggtgctcggcagggctccagagggggccggggagctgccggatcccaggccgccggacctcgtttaccttctccttgctggatggcacttccccctggcagccactccagcttgagttcacatctgagcgggcatcctctttgtctattaaccggcctgtgcctctgtgggttcctggtgtctctgccactgtgcccaagcctttgttgggccgcccgactcgcttgtttgtcaccctcactgactctgagcctttcttttctgctgtgtctcagccgacttggcggggagggcaatctgctgctcaccagtgcccctcctcaccgcccgtcactcccacgtcctcctggtcctgggcctcccctttccgtgcccccgatcttgtactcagggggccgctccccgttgttcctttggccacacctcggcccccaccccctgcactacttgctgcccccacccttgtggctagcaagcctaccttgcccaaagcctctgtcgagtctgttctccgtctcagtaagcttgccacttttaacccccctgtcaattccaccagctcccgccacttccttgggatctttcctgttacctttctccccccccgcagacgccatttctggaagcgggcaactgtctaacatctccgtcggacgggagtag

SEQ ID NO: 179921 - DNA, 444 bp, synthetic construct
  misc_feature 1..444: note = Description of Artificial Sequence: Synthetic coding sequence
  source 1..444: mol_type = other DNA
atgggcagcggcggcagcgacagctaccggatcgccaccagccaggacaagaaggatgacaaggactcaccgaagaagaacaagggtaaagagcgacgcgatctggacgatcttaagaaggaggtggctatgactgaacacaagatgtctgtggaagaggtttgcagaaagtataatacagactgcgtgcagggcttgacacactccaaggcccaggaaatactggctcgagatggccccaatgctttgacaccccctcccacaacccctgagtgggttaagttttgcaggcaactgttcgggggattttctatcctactgtggatcggggccattttgtgctttctggcttacgggatccaggcaggaaccgaagacgaccctagtggggacaatttgtacctgggaattgtgctggcggcggttgtgattataaccgggtag

SEQ ID NO: 179922 - DNA, 2049 bp, synthetic construct
  misc_feature 1..2049: note = Description of Artificial Sequence: Synthetic coding sequence
  source 1..2049: mol_type = other DNA
atgggccggatcgccaccctggccagcggcctggaggtgggcaagaccccaattgccattgagattgagcattttattcagctgattaccggcgtggctgtcttcctcggagtgtcctttttcattctctccctcatcctgggttacacctggcttgaggcagttatcttcctgattggaattatagttgccaacgtgcccgagggcctgctcgccacggtcacagtgtgcctgacccttactgctaagcgcatggcacgaaaaaactgcctcgttaaaaacctggaggccgtagagaccctcggatcaacctccaccatctgtagtgacaagacggggaccctgactcagaacaggatgaccgttgcgcacatgtggttcgacaatcagatccacgaagcggacactacagaggatcagtctggcacaagcttcgataaaagttctcatacctgggtcgctctaagtcatatcgccggtctgtgtaaccgtgctgtgttcaagggaggccaagacaatattccggttctgaagcgcgacgtcgccggggacgcatcagagagtgccctcctgaaatgtatagaattaagcagcgggagtgtcaaattaatgcgagagaggaacaaaaaggttgcggaaatcccctttaactccaccaacaagtatcagctgtcaatacacgaaactgaagatccaaatgacaacaggtatctccttgtgatgaaaggcgccccagagcgcattctcgacagatgctcaaccatacttctccaaggcaaggaacagcctctggatgaggaaatgaaggaggcctttcagaacgcctacctcgagttaggtggactgggcgagagggtcttaggcttctgccattactacctaccggaagaacagttcccaaaagggtttgcgtttgattgtgatgacgttaattttacgactgataacctttgctttgtcgggctgatgtctatgatagacccgccccgagccgccgtgcccgatgccgttggaaagtgtcggtctgccgggattaaggtgattatggtgaccggcgatcaccctattacagctaaagccattgccaaaggcgtggggatcatctcagaaggcaatgagacagttgaagatattgcagctcgactgaacattcccgtttcacaagtgaaccctagggacgctaaggcctgcgtcattcatgggacggatttgaaggacttcacatccgaacagatagatgaaattctgcagaatcataccgaaatcgtgttcgctaggacgtcaccccagcagaagctcatcattgtcgaagggtgccagcgacagggcgccatcgtcgctgtgacaggcgacggagtgaatgattcaccagcgttaaaaaaggcggacattggcgtcgctatgggtatagctgggtccgatgtgtccaagcaagctgctgatatgattctgctggatgataatttcgccagtatcgttactggcgtggaagagggacgcctcattttcgacaacctgaagaaaagtattgcatacactcttaccagtaatatacccgagatcacgccatttctccttttcatcatggcaaacatccccttgccactgggcacaataaccatactctgtatcgatttgggtacagacatggtaccagcgatctccctggcctacgaggctgctgaaagtgacataatgaagagacagccgagaaaccctaggaccgataagctcgtgaacgaacgactcatatctatggcttacggccagatcggcatgatccaggctctcggaggatttttctcatacttcgtgatcctcgcagagaacggattcttgcctggaaacctggtgggcatacgcctaaactgggatgatcgcactgtcaacgacctcgaagacagctatggtcaacaatggacatacgaacagcggaaagtcgtggagtttacttgccatactgccttctttgtatctatagtcgtggtgcagtgggccgatttgattatctgtaagactaggcggactcgctcttcatcccgggcatag

SEQ ID NO: 179923 - DNA, 3075 bp, synthetic construct
  misc_feature 1..3075: note = Description of Artificial Sequence: Synthetic coding sequence
  source 1..3075: mol_type = other DNA
atgggcggctgggaggaggagcggaaccggcgggccaccgacaagaaggacgacaaagattcccccaaaaaaaataaaggaaaggagaggcgcgacttagacgacctcaaaaaggaggtggcaatgactgaacacaaaatgtcagtggaggaggtgtgcagaaagtataataccgactgcgtccaagggttaacccactcaaaagcacaggaaatcttggcccgtgatgggccaaacgcactcaccccccccccaacaacacccgagtgggtgaaattctgccgccaactgtttggtggcttctctatattgctgtggataggtgccatactctgtttcttagcttacggaatccaggcggggaccgaggacgatccatctggcgataatctttaccttggcatagtgttagccgcggtggtgatcataacagggtgtttctcttattatcaggaagccaagagttccaagattatggaatcctttaagaacatggttcctcagcaggccctcgtgattagagaaggcgagaagatgcaagtgaatgctgaggaggttgttgtaggggacctggtggagatcaaaggcggcgacagagtgccagcggacctgagaataatcagcgcacacggctgcaaggttgacaattcttcactgactggcgagagcgaacctcaaaccagaagcccagactgcacccacgataatcccctggaaactcgcaacattactttcttttccaccaactgtgtagagggaactgcccgcggcgtggtggtagcgacaggtgaccgaaccgtcatggggcgcattgctacactcgcatccggccttgaagtggggaaaactcctatcgctatcgagatcgaacacttcattcagttaattactggcgtcgcggtttttctgggcgtttcattttttattcttagtcttatactggggtatacctggttggaagccgtgatttttctgatcggaatcattgtcgcaaacgtgcctgaaggactgctggcgactgtaacagtctgcctcacgctcacggccaagagaatggcccgcaagaattgcctggtcaagaatctggaggctgttgagacactaggttccacctcaacaatttgtagcgacaaaactggtactctcacgcagaatagaatgacagtggcccacatgtggttcgataatcaaatccatgaagctgacaccaccgaggaccagagcggaacgagttttgataaaagctcccatacctgggttgctctcagccacatagcgggtctctgcaatcgggccgtgttcaaaggaggtcaggacaacatccctgtcctgaagcgcgacgtcgcaggcgatgcatccgagtcggcccttctgaaatgtatcgaactctccagcggaagcgtgaagctgatgagagagagaaataagaaggtggcagagatcccttttaacagcaccaacaagtaccaactgtcaatccacgaaaccgaagatccgaatgacaaccgatatctcctggtgatgaaaggagctcctgaaagaatcctggaccgttgctcaaccattctgcttcagggcaaagaacagcctcttgatgaagagatgaaggaggcttttcaaaacgcctatctggaacttggaggacttggtgaacgcgtcttgggtttctgccactattacctacccgaagaacagttccctaaagggtttgcgttcgattgtgatgatgtgaattttacaacggacaacctctgctttgtaggattgatgagcatgatcgaccctcctagagcagctgtgcctgacgctgttggcaaatgtcggtcagccggtatcaaggtcatcatggttactggggaccacccaatcacagcaaaggcaattgccaaaggggtgggcatcatctcagaagggaatgagaccgtggaggacatagccgcgcggctgaatatacccgtatctcaggtcaaccctagggacgccaaggcttgtgtgattcacggtacagatttgaaggactttacctcggaacagatcgatgaaattttgcagaaccacactgaaattgtgttcgccagaacatctccccagcagaagttgatcattgttgaaggatgtcagcgacagggggcgattgtggctgtcaccggagacggtgtcaacgattcacccgccctcaaaaaagctgatattggagtggcaatgggcatagcgggatcagacgtaagtaaacaggctgcggatatgattttgttggatgacaacttcgcatctatcgtgacgggagtggaggagggaagactgatattcgacaacctgaagaaatcaatcgcatatacgctgacatctaacattcccgaaataacccctttcctgttatttattatggccaacatcccactgccactgggaactattactattttatgcatagatctgggaacagatatggtccccgccatcagcctcgcttatgaggcggccgagagcgatataatgaaacggcagcccaggaatccccggacggataagttggtgaacgagcgtctgattagtatggcctacggccaaatcggcatgatacaggcgctcggggggttcttctcatattttgtcattttggcggagaacggctttctgcctggcaatcttgtgggtatccgcttgaattgggatgatagaaccgtcaacgacttagaagattcttatggccagcagtggacatacgaacagagaaaagtggtggagtttacttgccacactgcgttcttcgtttcaattgtggtcgtccaatgggctgacttgataatctgtaagaccagacgtaactcagtgttccagcagggcatgaagaataagatcctcatttttgggctcttcgaggaaacagcccttgcggcatttctcagctactgcccagggatggacgttgccctccggatgtatcccttgaagcctagctggtggttctgtgcctttccgtattccttcctgattttcgtatatgacgagattagaaagctgatcctcaggaggaatcctggaggttgggttgagaaggaaacctactattag

SEQ ID NO: 179924 - DNA, 3081 bp, synthetic construct
  misc_feature 1..3081: note = Description of Artificial Sequence: Synthetic coding sequence
  source 1..3081: mol_type = other DNA
atgggcagcggcggcagcgacagctaccggatcgccaccagccaggataagaaggatgacaaagattctccaaagaaaaacaaaggcaaagagcgacgggatctcgacgacctcaagaaagaagttgccatgaccgaacataagatgagtgttgaagaggtgtgtaggaagtacaatacagactgtgttcagggcctcacacacagcaaggcacaggaaatcctggcgcgcgacggcccaaatgctttaactcctccccctaccacgccagagtgggtgaaattttgccggcagctgttcggaggattcagtattcttctgtggattggcgcaatcctgtgcttcttggcctacgggatccaagctggtaccgaggatgatccatcaggggataatctgtatctgggcattgtgcttgctgcagtggtaattatcaccggctgtttttcctactaccaggaggcaaagtcatccaaaataatggagtcctttaagaacatggttccgcaacaggctttagtgatccgtgagggagaaaagatgcaggtgaatgctgaagaggtcgtggttggagatctggtggagattaaaggaggcgaccgcgtgccagcggaccttaggatcatctcagcccacggctgtaaggttgacaatagtagcctgaccggggagtcagaaccgcagaccaggagccccgactgcacccacgacaaccctctggaaacccgcaacattaccttctttagcacgaattgcgtagagggaacagcccgcggcgtagtggtagcaactggtgatagaacagtcatgggaagaatcgctactctggcatccggcctcgaggtcgggaagacgcctattgcaatagaaattgaacattttattcagctgatcaccggggtcgccgtgttcctgggagtgtccttctttattttgagcctcatcttggggtacacttggctggaggctgttatctttctgattggcatcatcgtagcaaatgtacccgagggactgttggctactgttaccgtctgtttgactctgacggctaaacggatggcaaggaaaaattgcctggtgaaaaatcttgaggcagtcgaaaccctaggcagcaccagcacaatatgctccgataagacgggcactctgacccagaaccggatgactgtggcccacatgtggtttgacaatcagatccacgaagcagacactactgaagatcagtccggtacttcgttcgataagtctagtcatacctgggtcgccctttcccacattgccggtttgtgtaaccgtgctgtttttaagggaggccaagacaacatccccgtgctcaagagggatgtggccggcgatgcaagcgagtcagcactgctcaaatgtatcgaactctcatctggctcagtcaaactgatgagagagcgcaacaaaaaggtcgccgaaatacctttcaactccaccaataagtaccagctgagcatccacgagactgaggaccccaatgacaataggtaccttttagtgatgaagggcgctccagaaaggatcctagatagatgctctaccattttactacagggtaaggagcagcctctcgatgaggaaatgaaagaggccttccagaatgcttatttagaactgggaggacttggggaacgtgtcttgggtttttgtcactattatctgcctgaggagcagttcccaaaaggttttgccttcgactgcgatgatgtgaactttaccactgacaacttgtgtttcgttggcctcatgagtatgatcgacccgcctcgcgctgccgtcccggatgctgtgggcaagtgccgctcagctggcatcaaggtgattatggtgaccggggatcatccaatcaccgctaaggctatcgcaaagggcgtagggataataagtgaaggaaacgaaactgtggaggacattgcagcacgactaaatattcccgtgagccaggtcaaccctcgtgacgccaaggcttgcgtgattcatggcaccgatctcaaagatttcacgtccgagcagatcgacgaaatactgcagaaccacacagagatcgtgttcgcacgaaccagcccacagcagaagctcatcatcgttgagggctgtcagaggcagggcgctattgttgcagttaccggcgatggcgtcaatgactccccagccctcaaaaaggctgacattggggtagcgatgggtattgcagggtctgatgtaagtaaacaggctgctgacatgatccttctcgacgacaatttcgcctccatcgttactggagtggaggagggacgtctgatctttgacaatctgaaaaagagcattgcctacaccttgacttcgaatatacctgagattacaccattcctacttttcatcatggccaatataccactgccactgggcacaataacgattctttgtatcgatctgggaactgacatggttccggctatctcactcgcctacgaagctgccgagtccgatattatgaaacgccagccccggaaccctagaaccgacaagctggtgaatgaacggctcattagcatggcctatggacagattggcatgatccaggccctaggggggttcttctcttactttgtaatactagcagaaaatggctttctgcccggcaatctggtggggattcgcctgaattgggatgatagaactgttaatgacctcgaagattcctacggccagcagtggacctacgaacaacgcaaagtggtggaatttacatgtcatacagctttttttgtctccatagtagtggttcaatgggctgacctgatcatatgcaaaacaagacgaaacagtgtgtttcagcaggggatgaaaaacaagatactcatattcggattgttcgaagagaccgcactggccgccttcttgtcatattgtccagggatggacgtggctctacgaatgtatccccttaaaccttcctggtggttctgcgcatttccttactctttcctcatattcgtgtatgacgaaatcagaaagttgatcctgcgcaggaatcccggaggctgggtggagaaggaaacctattattag

SEQ ID NO: 179925 - DNA, 3090 bp, synthetic construct
  misc_feature 1..3090: note = Description of Artificial Sequence: Synthetic coding sequence
  source 1..3090: mol_type = other DNA
atgggcctgtggggcaagaagggcaccgtggccccccacgaccagtcacctcgacggcgccctaagaagggtctcatcaagaaaaagatggtgaagcgagaaaaacagaagaggaatatggaggaactgaaaaaagaggtggtaatggatgaccataagctcacgctcgaagagctcagcacgaagtattctgtggatctgacaaaaggacattcacatcaaagagccaaagagattttaacaagaggaggccccaatactgtgacccctcccccaactactcccgagtgggtgaagttttgtaagcaactgtttggcggattcagtttgttactctggacgggagccattctctgcttcgtggcatactctattcaaatttacttcaatgaggagcctactaaggataacttgtacttgtctatagtgctcagcgttgtcgtgatcgtgactgggtgcttctcatactatcaagaggccaagtctagcaaaatcatggaaagtttcaagaacatggtgcctcagcaggccctggtaatccggggtggcgaaaaaatgcagatcaatgttcaggaggtcgtactgggcgacctcgtggagattaaaggaggcgaccgagtgccagcagatttacggctcatttccgctcaaggctgcaaggtggacaatagctccttgactggtgagtccgaaccccagagccgcagccccgactttacacatgagaaccctctggagacccgaaacatatgtttcttctcaacaaattgtgtggaaggcacagcccgtgggatcgttattgccactggagactccacagtcatgggcaggatagcctctctgacaagcggattggccgtcggccagacacccatcgcggcagagattgagcattttatccacctgattacggtggtagccgtgttcctcggggtgacattttttgccctgagccttttacttggctacggctggttggaagccatcatcttcctaattgggattatcgtcgccaatgtgccagagggattgctcgcaacagttactgtttgcctgactctgacagctaaaaggatggccaggaaaaattgtttggtaaagaatctggaagccgtggaaacgcttggctcgacatcaacaatttgctcagacaagaccgggacactcacgcaaaaccgcatgacagtggcacacatgtggttcgacatgacagtgtacgaggcagacaccacagaagagcagacaggcaaaaccttcacaaaatcgtctgacacgtggttcatgctcgcccgaatagccggcctgtgtaaccgcgccgacttcaaggctaatcaggaaatcctacctatcgcaaaacgcgctaccaccggtgacgcgtctgaaagcgcactcctgaagttcatcgagcaaagttattcctccgtggcagagatgcgcgaaaaaaatccaaaagtggcggaaattccttttaacagcaccaacaagtatcagatgagcatacacctacgtgaggattcatcccagactcacgttttaatgatgaagggtgcccctgagaggatcctcgagttttgtagcactttccttcttaacggacaggaatacagcatgaatgatgaaatgaaggaggcctttcagaacgcttacttggaactggggggcctgggagagagggtacttggtttttgttttttgaatctgccttccagtttcagtaagggcttcccgttcaatactgacgaaattaactttccaatggacaacctgtgttttgtcggactgattagcatgatagatcccccacgtgcagccgtgcctgacgcagtaagcaagtgccgcagtgccggaattaaagtgatcatggtgacgggtgaccaccccatcacggctaaggctattgcgaagggggtgggcatcatctctgaaggcactgagacagctgaggaagtggccgcccggctcaaaatccctatatctaaggtcgatgcgtccgccgcaaaagccatcgtcgtccacggtgctgagctcaaagatatccaaagcaaacagctggaccagattttgcagaatcaccccgaaattgttttcgcgcgcacaagtcctcagcagaagctgattatcgtcgaagggtgtcagcggttaggagccgtcgtggccgtgactggtgatggggtgaacgattctccagccctcaaaaaggccgacattgggatcgccatgggaattagcgggtccgacgtctctaagcaggctgcagacatgatactgttagatgataacttcgcttctattgtgacgggcgtggaagagggacgcctcattttcgataatttgaaaaaatccatcatgtacaccctaacgagcaacattccagagattactccttttttgatgtttataatccttggcatccctctccctctgggcaccatcacgatcttatgtatcgacttgggaacagacatggtgccagctatcagtctagcatacgaatctgccgaaagcgacattatgaaacgtctgccccgcaatccaaagacggataacctggttaatcacagactaattgggatggcctatggacaaataggcatgatacaagccctggcaggattcttcacatatttcgtgatactagcggagaacggattccgcccagtagacctgctgggaatccgtctgcactgggaggacaagtacctcaacgacctggaggactcgtatggccaacagtggacatacgagcagcgtaaagtcgttgaatttacatgccagaccgctttttttgtaactattgtggtggttcagtgggcagacctaataatctctaaaacacggcggaatagcttgtttcagcaaggtatgaggaacaaggttctaatctttggcatactggaggagacgctcttagcagcctttctctcctacacccccggaatggatgtagccctgcgcatgtacccattgaaaatcacatggtggttgtgtgctattccatactcaatcctcatttttgtctatgacgaaatcagaaaactgcttatacgtcagcatcctgacggctgggtggagcgcgagacgtattattag

SEQ ID NO: 179926 - DNA, 498 bp, synthetic construct
  misc_feature 1..498: note = Description of Artificial Sequence: Synthetic coding sequence
  source 1..498: mol_type = other DNA
atgatccaggccctggccggcttcttcacctacttcgtgatcctggcagaaaacggatttcgacctgtcgacctgctggggatccgcttgcattgggaggacaaatacctcaacgacctggaagacagctacggacagcagtggacatatgaacaacgcaaggttgtggaattcacatgccagacagccttcttcgtgaccatcgtggtagtgcaatgggccgacctgatcattagcaaaactcggcggaacagtctgttccaacaaggtatgaggaacaaagtactgatttttggaattttagaagagacgcttctcgccgctttcttaagctacaccccagggatggatgtggccctgcgcatgtatcccctcaaaattacctggtggctatgtgccatcccttacagcatcctcatcttcgtgtatgatgagattagaaaattattaattcgacagcatcctgatgggtgggtggaaagggagacctattattag

SEQ ID NO: 179927 - DNA, 888 bp, synthetic construct
  misc_feature 1..888: note = Description of Artificial Sequence: Synthetic coding sequence
  source 1..888: mol_type = other DNA
atgggcaagcggaagtgcagccccgccagccagagcctgttcctgttccagttccagaagatggagctcaagtttaaaatactcctgttttacgtcattttctacggttgtctggccgggattttcatcgggactattcaggttatgctgctcaccatctccgagttcaagcccacttatcaagatcgtgttgcacctccagggctgacccagatcccacagatccagaagaccgaaattagcttccgacccaacgatccgaagagttacgaagcctatgtgttaaacattgtccgcttcttggagaagtacaaagactcagcccaacgcgatgacatgatcttcgaggattgcggggacgtaccatccgaacccaaggagcgcggagactttaatcacgagcgtggagaaagaaaagtgtgtcggtttaagctggagtggctgggcaattgctcaggcttgaacgacgaaacttacgggtacaaagagggcaagccctgtatcatcatcaagttgaaccgggtgctcggctttaagcccaagcctcctaagaatgaaagcctggaaacctatcctgtcatgaaatataatcccaacgtcttgcccgtccaatgtaccgggaaacgcgacgaagacaaggacaaggtaggtaacgtggaatacttcgggctgggtaattccccaggctttcccctgcagtactatccttattacggtaaactgctgcagcctaagtatttgcaaccgttgctcgccgtccagtttacaaacctcactatggacaccgaaattcggattgaatgcaaagcctatggcgagaatattggttattccgaaaaagatcgcttccagggccgattcgacgttaaaatagaagtgaaaagctag

SEQ ID NO: 179928 - DNA, 912 bp, synthetic construct
  misc_feature 1..912: note = Description of Artificial Sequence: Synthetic coding sequence
  source 1..912: mol_type = other DNA
atggcccggggcaaggccaaggaggagggcagctggaagaagttcatctggaatagcgagaaaaaggagttcctcgggcgcacagggggcagttggtttaagatactcctgttctacgtgattttctacggttgccttgcaggcatctttatcgggacaatccaagtcatgttattaaccatcagcgaattcaaacctacgtaccaagacagagtcgcaccccccggcctgacccagattccgcaaatccagaaaactgaaattagtttccggcctaacgacccaaaaagctatgaagcatacgtgctcaacatcgtgcgctttcttgaaaagtataaagactcagcgcagagggatgatatgatatttgaggattgtggggatgtccctagtgagcctaaagagcgcggcgattttaatcacgaacgcggagaaagaaaggtatgtcgttttaaactggagtggctgggcaactgttcaggactgaacgacgagacatacggctacaaggagggaaaaccctgcattatcatcaaactaaaccgtgtccttggttttaaacccaagccaccgaagaacgaaagccttgaaacttacccagtcatgaaatataaccccaacgtgcttccagtccaatgtaccggcaagcgagatgaggacaaagataaagtagggaacgttgagtattttgggcttggcaacagcccaggctttccactgcagtactacccttactacggtaagctgctgcagccaaaatacttgcaaccattgctggcagtccagttcactaatcttactatggacaccgagatccggatcgagtgcaaagcttatggcgagaatatcgggtacagcgaaaaagaccgctttcaaggcagattcgacgtgaagattgaagttaagagctag

SEQ ID NO: 179929 - DNA, 912 bp, synthetic construct
  misc_feature 1..912: note = Description of Artificial Sequence: Synthetic coding sequence
  source 1..912: mol_type = other DNA
atggcccggggcaaggccaaggaggagggcagctggaagaagttcatttggaactcagagaagaaggaattcctgggcagaaccgggggatcttggttcaagattcttctcttctatgtgattttctacggctgcctcgccggtatctttattggtactatccaagtcatgctcctcaccatttcggagttcaaacctacataccaggaccgggttgctccccccggactcacccagatacctcaaattcagaaaactgagatctccttccggcctaatgatcctaagagctatgaagcatatgtccttaatattgtgaggttcctggagaaatataaggacagcgcgcagcgagacgatatgatcttcgaggattgcggcgacgtacccagcgaacccaaggaacgaggcgactttaatcacgagagaggggagcggaaagtctgccggttcaaactcgaatggctcggaaattgttcaggcctcaacgacgagacatacggctataaggagggcaaaccatgtatcattataaagctgaacagggtgctcggatttaagcctaaacctccaaaaaacgaaagtttggagacataccctgtgatgaagtacaacccgaatgtccttccagtccaatgcacaggcaagcgggatgaggacaaagataaggttggcaacgttgaatactttggccttggaaattccccaggatttcctctacagtattacccttactacggcaaactgctgcaaccgaaatatctgcagccgttgctggccgttcagtttaccaacctaaccatggatactgaaatccgtatcgagtgcaaggcttacggggagaacatcggctactctgagaaagataggtttcaaggccgcttcgatgtcaagattgaggtcaagtcttag

SEQ ID NO: 179930 - DNA, 744 bp, synthetic construct
  misc_feature 1..744: note = Description of Artificial Sequence: Synthetic coding sequence
  source 1..744: mol_type = other DNA
atgctgctgaccatcagcgagttcaagcccacctaccaggaccgggtcgccccacctggactcacacaaatcccccagatccagaagaccgagattagcttccgccccaacgaccctaagagctacgaagcctatgtactaaacatcgtccgttttctcgagaaatataaggattctgcgcagcgagacgatatgatttttgaggactgtggagacgtgccttccgagcccaaggaacggggtgatttcaaccacgagcgcggagagcgtaaggtatgtaggttcaagctggagtggctcggaaactgttctgggctgaatgatgagacctacggctacaaggaggggaaaccatgcattattatcaaactcaaccgggtcctgggctttaaaccgaaacctcccaagaacgaaagcctggagacctacccagtaatgaaatataatccgaacgtgctgccggttcaatgcacaggtaagagagacgaagataaggacaaggtcgggaatgtggaatatttcgggttaggaaacagccccgggtttccactgcagtactatccttactacggtaaacttctacagccgaaatacctgcaacccttgctggccgtccagttcactaacctgacgatggacaccgagattcgtattgagtgcaaagcatatggcgagaacatcggctattccgaaaaggatagattccaggggaggttcgacgtaaagatagaggtcaagagctag

SEQ ID NO: 179931 - DNA, 873 bp, synthetic construct
  misc_feature 1..873: note = Description of Artificial Sequence: Synthetic coding sequence
  source 1..873: mol_type = other DNA
atggtgatccagaaggagaagaagagctgcggccaggtggtggaggaatggaaggaatttgtgtggaatccccgcacacatcaattcatgggtcggaccgggacaagctgggcgttcatcttgctcttttacttggtattttacggctttctgactgccatgttcacactgactatgtgggtgatgcttcagactgtgtcagatcacacccctaaataccaggatcgactggcaactcccggactcatgatccggccaaagaccgagaacctagatgtcattgtgaatgtgtccgacaccgaatcttgggaccaacacgtccagaagctgaataagttccttgagccgtataacgatagcatccaagctcagaagaacgatgtgtgtagacctggccggtattacgagcagcctgataatggcgtactgaattatcccaagcgagcttgccagttcaatcgaacacaattgggaaactgttccggaatcggtgatagcacccactatgggtactctaccgggcagccatgcgttttcattaagatgaacagagtcatcaatttctacgctggagcaaaccaaagcatgaatgttacatgcgccgggaagagagacgaagacgccgagaacctgggcaatttcgtcatgtttccagccaatggaaacatagacctcatgtattttccgtactacggtaaaaagtttcacgtaaattatacacagccccttgtggcagtgaagtttcttaatgtcacccctaacgttgaggtgaacgtggagtgtagaatcaacgcagcaaacattgccaccgatgatgagagggataagttcgccggcagggtcgctttcaaactgcggattaataaaacgtag

SEQ ID NO: 179932 - DNA, 840 bp, synthetic construct
  misc_feature 1..840: note = Description of Artificial Sequence: Synthetic coding sequence
  source 1..840: mol_type = other DNA
atgaccaagaacgagaagaagagcctgaaccagagcctggccgagtggaagttgttcatctacaaccccactactggggaattcctaggccgcactgcaaaatcttggggactgatcctgttgttttatctagtgttttacgggttcttggcagcactgttctcttttactatgtgggtgatgttgcagacactaaacgatgaagtgcctaaatatcgtgaccagatcccatctcccggccttatggtatttccaaagcccgtgactgcccttgaatacacatttagtcgctcagatcctacatcctatgctggctacatcgaagacctgaaaaagttcctcaagccgtatactctggaggagcagaagaacctgacagtgtgtcctgatggcgcactctttgagcagaaggggccggtctacgtcgcttgccagtttccaatttccctgcttcaggcatgctccggtatgaatgaccctgatttcgggtactctcagggtaatccatgcatcttagtgaaaatgaaccgcatcatagggcttaagccggaaggcgtgcctaggattgactgcgtgtccaagaacgaagacatccccaatgtggcagtgtacccccacaatggaatgatcgacttaaagtacttcccgtactacgggaaaaaattgcacgttggttaccttcagcccctggtggcagtgcaggtatcatttgcacctaataatactggtaaagaagtgactgtggaatgcaagattgacgggagcgcaaacttaaagtcacaggatgatcgtgacaaatttttgggcagggttatgttcaagattactgcacgggcatag

SEQ ID NO: 179933 - DNA, 582 bp, synthetic construct
  misc_feature 1..582: note = Description of Artificial Sequence: Synthetic coding sequence
  source 1..582: mol_type = other DNA
atgctgagcgagggcgacatcctgttcagcagcctgctgagcagcccgagcctgttttggccgcccggcttaattttactgttttatctggtgttttatggcttcttggccgccctgttcagcttcaccatgtgggtgatgctccaaacactaaacgacgaagtcccaaagtatcgcgatcagattccctcccctggactgatggtgtttcccaagccagtgactgccctggaatacactttctcaagaagcgacccaacttcttatgctgggtacatcgaggatctgaaaaagttcctcaaaccgtatacccttgaagagcagaaaaacttaacagtttgcccagatggggccttgtttgaacagaaggggccggtgtatgtggcttgtcagtttcctatcagtttgcttcaagcgtgcagtggcatgaatgatcccgatttcgggtactctcaagggaatccctgcattctggtaaagatgaataggataatcggccttaaacccgagggggtcccacggatcgactgcgtctccaaaaccaataacgttaaggacggaatgaaaatttatcagatgtag

SEQ ID NO: 179934 - DNA, 2139 bp, synthetic construct
  misc_feature 1..2139: note = Description of Artificial Sequence: Synthetic coding sequence
  source 1..2139: mol_type = other DNA
atggccctgctggccatgcacagctggcggtgggccgccgccgccgccgcctttgagaagaggaggcactctgctatactcatccgcccacttgtgtcagtttccggatctggtccccagtggcgaccccaccagctaggcgccctgggaaccgcgcgggcctatcaaatacccgagagcctcaaatcaattacatggcagaggctgggtaaaggcaactctggacagttcctggacgctgcgaaagcgcttcaggtttggcccctcatcgaaaagaggacttgctggcatggccatgctggaggaggcctgcacacagacccaaaagagggggctatgaacattgtggtccccttcatgtttaagtatgcagtcgattctctaaaccaaatgagcggcaacatgctgaacttatccgatgcccccaacacagtggccaccatggcaacagccgtcttgatcgggtacggcgtttccagagccggtgccgccttcttcaatgaagtcagaaacgcagtttttgggaaagtggctcagaacagtattaggaggattgccaagaatgtgttccttcatttacataatctggacctgggcttccacctgtccaggcagaccggggccctaagcaaagctattgatcgtgggacccggggtatatcttttgtgctgtcagcccttgtatttaatctgctgccaattatgtttgaagtgatgcttgtgagcggtgttctgtattataaatgcggggcccagttcgcacttgtcaccctgggcaccctgggcacctacactgcctttaccgtcgccgtgacgaggtggcggactcggttcaggatcgaaatgaacaaggctgataatgacgccggcaacgcggccatcgactccctgctgaactacgagacagtcaagtatttcaataacgaaaggtatgaagctcaaagatacgacgggttcctcaagacatacgagaccgcctccctgaagagcacgtccaccttggcaatgcttaatttcggccagtctgcgatatttagcgtgggcctgactgctattatggttctggccagccaagggattgtcgccggtactctgaccgtgggggatcttgtgatggtcaatggccttctgttccagctgtctctgcctctgaatttcctgggcaccgtttatagagaaactagacaagctttaatcgacatgaatacattgtttacccttctgaaagtggatactcagataaaagacaaggtgatggcaagccctctccagataacaccccaaactgccactgtggccttcgacaacgtgcacttcgagtatatagagggccagaaggttttgtccggaatttcctttgaagtgccggcaggcaaaaaggtggccattgtcgggggctctgggtcaggaaagagtacaattgtgagattgttatttcgtttctatgagccacaaaagggatccatctaccttgctgggcagaatatccaagacgtgtcactcgagagtctgaggcgagctgtgggtgttgtgccacaggatgccgtgctgtttcacaataccatctactacaacttactgtatggaaatatatccgcttcacccgaggaggtctatgccgtggccaagctggccggactgcacgacgccattttaagaatgcctcacggatacgacacccaagtcggtgaacgcggcctgaagctgtctggcggcgagaaacaacgcgtggccattgcaagagccattttgaaagaccctcctgtaatcctgtacgacgaggccacttcttctctggattctatcaccgaggagaccattctcggcgcaatgaaggacgtggtcaaacacagaacttctatcttcattgcccatagactctctaccgttgtggatgcggatgaaattattgtccttgaccaggggaaagtagccgaacgtggaacccaccacggtctgttggctaatcctcactcaatctattcggagatgtggcacacccagagctctcgtgtacaaaatcacgataatccaaaatgggaggctaagaaggagaacatttccaaagaagaagagcgaaaaaagctccaggaggagatcgtgaatagcgttaagggctgtggcaactgttcctgctag

SEQ ID NO: 179935 - DNA, 2046 bp, synthetic construct
  misc_feature 1..2046: note = Description of Artificial Sequence: Synthetic coding sequence
  source 1..2046: mol_type = other DNA
atgcggctgtggaaggccgtggtggtgaccctggccttcatgagcgtcgacatctgtgtaaccaccgctatatacgttttttcgcacctggatcgcagcctgctggaagacattcgtcatttcaatatcttcgactcagtattagacctgtgggccgcctgtctttaccgaagttgcctgctcctgggcgcgaccataggtgtcgccaagaattccgctctggggccccgacggttgagagcatcatggctggtgatcaccctggtatgcctgtttgtgggtatttatgcgatggttaagctgctgctattctccgaagtgcgtcggcccattcgagatccgtggttttgggctctctttgtatggacatacatatccctgggagcttcctttcttctgtggtggttgctgagcaccgtcaggcccgggacacaggcccttgagccaggtgcagccacagaggctgaagggttccctggctcaggccggccaccccctgagcaggctagtggcgcaactcttcaaaagctgctgagttacactaagcctgacgttgcgttcctggtggccgctagttttttcctgatcgtggctgcactgggggagacttttcttccatattacaccggacgcgctatcgacggaattgtcattcagaaatcaatggatcagttcagcaccgccgtggtgatcgtgtgcctgctggctattggctcttcattcgcagcaggcatccgggggggcatctttactctgatctttgcccggctgaacatcagactgagaaattgtcttttcaggtcgctggtttctcaagagacttccttcttcgacgaaaacaggacgggagatctaatcagcaggttgaccagcgacactacaatggtgtcagatctggtgtcccagaatataaacgttttcctgagaaatacagtaaaggtgactggagtggtggttttcatgttctcgcttagctggcagctgtccctcgttacattcatgggcttcccaatcatcatgatggtctccaacatatacgggaaatactacaagaggctgtccaaggaggtgcagaacgccctggctcgcgcttccaacacagcggaggaaactatctcagctatgaagacagtcagaagcttcgcgaacgaggaggaggaggccgaagtttacttgagaaaattgcagcaggtgtataagctgaaccgtaaagaggctgctgcatacatgtattatgtatggggcagtggcttgacattgcttgtggtgcaggtgtccatcttgtattacggcgggcaccttgttatttcagggcagatgacttccggcaacctcattgctttcatcatctatgaattcgtgttgggagattgcatggaaagcgtgggatcagtgtactcaggtcttatgcagggcgttggagctgcggagaaggtgtttgaattcatcgataggcagcctacaatggttcacgatggctcccttgccccagaccacctggagggccgcgtggactttgaaaacgtaacatttacctatcgcacacggccgcatacccaggtgctgcagaatgtgagcttttcactttctcctggtaaagttacggctctagttggccccagtgggtcaggcaaaagtagctgtgtgaatattctcgagaatttctaccctcttgaagggggacgtgtgcttctggatggcaagcccatcagcgcatatgatcataaatacctgcaccgagtcatctctttagtgagtcaagagccagttctgttcgccagatccatcaccgataatatttcatatggactgccaacggtgccttttgaaatggtcgtggaagctgctcagaaggccaacgcgcatggcttcattatggagcttcaggacggatactcaacagagacaggtgaaaaaggagcgcaacttagcgggggtcagaagcagcgcgtggctatggcccgggcactggtaagaaacccacccgttttaatcctagatgaagccacatccgcgctggatgcagagtccgagtacctgatttag

SEQ ID NO: 179936 - DNA, 2052 bp, synthetic construct
  misc_feature 1..2052: note = Description of Artificial Sequence: Synthetic coding sequence
  source 1..2052: mol_type = other DNA
atgcggctgtggaaggccgtggtggtgaccctggccttcatgagcgtggacatctgtgtgaccaccgccatctacgtgttctctcacctcgatcggtcactgctggaagacatacgccacttcaacatctttgacagtgttcttgacctgtgggctgcatgtttatacaggagctgcctgcttctcggtgccaccatcggcgtggctaagaacagcgcactgggtcctcgccgcttgcgcgcctcatggttggtgatcactctggtgtgcctctttgtcgggatttacgccatggtcaagttattgctgttctctgaagtgcggagacccatccgtgacccctggttctgggctctgtttgtttggacttacatcagcctcggggccagctttctgctttggtggctcctcagtacagtccgcccgggtacacaggctctggagcccggcgccgcgacagaggcggaagggtttcctgggagcggtaggcccccgccagagcaggcctctggggctacgctccagaaactgctgagttatactaagccggatgtggcctttctggtggcggcaagttttttcttgatagtcgccgcacttggagagaccttcctcccatactacactggccgcgcgatcgatggaattgtgatacagaagtcgatggatcaattctccacagcggtggttatcgtgtgtttgctggcaatcggtagctcttttgcggcaggcatcagaggtggcatcttcaccctgatcttcgcacgactgaacattaggctgcgtaattgtctctttaggagcctggtgagccaggagactagctttttcgacgaaaaccgtactggggatttaattagtcgtttgaccagtgatactaccatggtctctgatctcgtgagccaaaatataaacgtattcctgaggaacaccgtcaaagttaccggggttgtggttttcatgttcagcttatcctggcagttaagtttggtcacatttatgggatttcccatcattatgatggtatcaaacatctacggaaagtattacaaacgtcttagtaaggaagtgcagaatgctcttgccagagccagtaatactgctgaggaaaccatatccgcgatgaagacagtgcggtctttcgcaaatgaagaggaggaagcagaagtttatcttcgcaaactgcaacaggtgtacaaattgaaccgtaaggaggctgccgcttacatgtattacgtgtggggcagtggcctcacactgctggtggttcaggtgtcaatcctgtattacggtggccacctagtgatctctggtcaaatgacaagcggcaatctcattgcattcatcatatacgaatttgttctgggagactgtatggagtcggtcggctctgtttattcaggcctaatgcaaggcgttggcgccgccgaaaaagtgttcgagtttatcgatcggcaacctactatggtccatgatggtagtttggccccggaccacctggaagggagggtggactttgaaaatgttacattcacctataggacacgcccacacactcaagtgctccaaaatgtgagtttctcgttatctcctggtaaggtgactgctctggttggcccttctggaagtggtaagtcttcctgcgtcaacattctggagaacttctacccgctcgagggcggccgagttctgctcgatggaaaacctatcagtgcctatgatcacaagtacctgcatagagtgatctcgctcgtgagccaggaaccagtgctcttcgccagatctataactgataacattagctacggccttccaacagtgcctttcgagatggtagttgaagctgctcagaaagccaatgcccatgggttcattatggagctgcaggacggctatagtactgagacgggggaaaagggcgcccagcttagcggcggacagaagcaaagagtggctatggctcgcgctctggttaggaatccccccgtgctgattctggatgaagccacatcagcgcttgatgccgaatccgaatacctttgtgcaggctag

SEQ ID NO: 179937 - DNA, 300 bp, synthetic construct
  misc_feature 1..300: note = Description of Artificial Sequence: Synthetic coding sequence
  source 1..300: mol_type = other DNA
atggccgcccccgccgagccctgcgccggccagggcgtgtggaaccaaacagaacctgagccggccgctacgtctttgctgagcctctgcttcctgcggacagccggggtgtgggtcccccccatgtacctgtgggtgctaggtcccatctacctactgttcatccatcaccacggcaggggttacttgcggatgtctcccctgtttaaagccaaaatggtagctgccattccaggctccctggaaccagggaatgtcagaggcaggcaaggcactggctggaacttagtaaaaagctag

SEQ ID NO: 179938 - DNA, 372 bp, synthetic construct
  misc_feature 1..372: note = Description of Artificial Sequence: Synthetic coding sequence
  source 1..372: mol_type = other DNA
atgcccagcgccggcaccctgccctgggtgcagggcatcatctgcaacgcaaacaacccatgctttagatatcctaccccaggtgaagcccccggggtggtgggcaatttcaataagtccattgttgctcggttgttcagtgatgccaggcgccttttactgtatagtcagaaggacacctcaatgaaggatatgagaaaggtgctcagaacactccaacagattaagaaaagctcaagcaacttgaagttgcaagatttcctggtggacaacgaaacattctcaggattcctgtaccataatctctcattaccgaagtccacggtcgataagatgcttagagccgatgtgattctgcataaggtgtcttag

SEQ ID NO: 179939 - DNA, 6786 bp, synthetic construct
  misc_feature 1..6786: note = Description of Artificial Sequence: Synthetic coding sequence
  source 1..6786: mol_type = other DNA
atggcctgctggccccagctgcggctgctgctgtggaagaacctgacctttcggcgccggcagacctgtcagctgttgctggaggtggcttggcctctttttatttttttgattctaatttcagtgaggctcagctatcccccttatgagcaacatgaatgccattttcctaacaaagctatgcccagcgccgggaccctgccctgggtgcaggggatcatctgtaatgccaacaatccttgttttcgctaccccacccccggtgaggctccgggtgtcgtcggtaatttcaataagtccatcgttgcccggctgttctctgatgcccggagactgctgctgtatagtcagaaagacacatcaatgaaggacatgaggaaagtactgcggaccctccagcagattaagaaatcttcttctaacctcaaactgcaggatttcttggtggataacgaaacattttccggctttctctatcataatctctcattgcctaaaagtactgtggataagatgctgagggcagatgtgattctgcacaaagtgttcctccagggttaccagctccacctaacctcattgtgtaatggatctaaatctgaagaaatgatccagctgggagaccaggaggtgtcagaactttgtgggctgccccgtgagaaactggccgcggctgagagagtgctgaggagcaatatggatatactaaaacctatacttcgaactctgaactccacatcacctttcccatcaaaagaattggccgaagctacgaaaacattactccattcactggggaccttggcacaggagttattctcaatgcgctcttggagtgatatgagacaggaagtcatgttcctcactaacgtaaattcatctagttcttccacccaaatctatcaggcagtgtcccgcatagtgtgcgggcatccagagggcggaggcctcaagattaagtctctgaactggtatgaggacaacaattacaaggccctgttcgggggaaacggcacggaggaggatgcagaaaccttctatgataactccactaccccctactgtaatgaccttatgaaaaacctggagtcctcgcccctttcacggattatttggaaggccctgaagccgcttctggtcggaaaaatcctctatacgccggatacacccgcaactcggcaagtcatggccgaggtgaacaaaacatttcaggagctggccgtgttccatgatctcgaagggatgtgggaggagctaagtccaaagatttggacttttatggagaactctcaggagatggatttggtgcggatgctgctcgattcgagggacaacgaccatttctgggagcagcagctcgatggactcgactggacagcccaggacattgtggctttcctggccaagcatccagaagacgtccagtccagtaacgggtccgtgtatacctggagggaggcttttaatgaaaccaatcaggctataaggacaatttcccgcttcatggagtgcgtgaatctgaataagctcgaacctatagctacagaggtgtggttgatcaacaaaagtatggagctgctggacgaacggaagttttgggccgggattgtattcactggcatcacccctggatcaatcgagttacctcaccatgtgaaatataagattaggatggacattgacaacgttgaacgtacgaacaagataaaagatggctactgggatcccggcccaagggctgatcccttcgaagacatgagatacgtgtggggtggctttgcctatctgcaggatgtcgttgaacaggctatcattagagttctgactggaaccgagaagaagaccggcgtgtacatgcagcaaatgccatatccttgctacgtcgacgacattttcctgcgggtgatgtcccgcagcatgccgttattcatgaccttggcatggatctattctgttgctgttatcattaagggtatcgtgtacgagaaagaagctaggctaaaggagaccatgagaattatgggactggacaacagcattctttggttttcttggtttatatcatcactaataccgctgttggtgtctgccggcctgttagtggtgatcctgaaactgggtaacttgcttccctatagtgatccatcagtggtgttcgtgtttctaagtgttttcgctgtggtgacaatcctgcagtgttttttgatctctacccttttttctagagccaatctcgcggccgcatgtggggggatcatatactttacattgtacctgccatacgtgctgtgcgttgcttggcaggattacgtcggatttaccctcaagatcttcgcctctcttctctcccctgtggcttttggctttggatgtgaatacttcgctctgttcgaagagcaaggcatcggagtgcagtgggacaacctgttcgagagtcctgtagaggaggatggctttaaccttaccaccagtgtctccatgatgcttttcgatacgttcttgtatggagtgatgacttggtatattgaggcagtgttcccagggcagtatggtattcctagaccttggtatttcccctgcactaaatcttattggtttggcgaagagtccgatgagaagtcacatccaggatcaaatcagaagcggatctccgagatctgcatggaggaagaacccactcacctgaaactgggagtctccattcagaacttggtgaaagtgtatcgggatggtatgaaagtggccgtagacggacttgcactgaatttctacgaaggacagataacttcatttttgggacataacggagccggaaaaaccaccactatgagcatcctcacgggactgtttccgccaacctctggaacggcctacatcctgggaaaggacatcagatccgagatgagtaccatacggcagaaccttggggtgtgtcctcagcataatgtcttattcgatatgctcacagtagaggaacatatctggttctatgccagactcaaaggcctctcggaaaaacatgtaaaagccgagatggagcagatggcattggacgtcggcctgcccagctctaaattgaagtctaaaacctcccagctgagcggtggtatgcaaaggaaactgagcgtggccttagcatttgtcggaggctccaaagtggtcatcctagatgagccaacagctggcgtcgacccttactccagaaggggcatatgggaactgctactcaaatatagacaggggcgcacaatcatcctgtccacccaccatatggacgaagccgatgtgctgggcgacagaatagctatcatatcacatggcaagctttgctgcgtggggagcagcttgttcctaaaaaaccagctgggcaccggttattacctgacactcgtaaagaaggatgtcgagagtagcctgagtagctgcagaaatagtagctctaccgtgagctatctaaagaaagaagacagcgtgtcacagtcaagttctgacgccgggttgggcagcgatcatgagtcagacaccctgactattgacgtgtctgccatctccaatctgattcgaaaacacgtgagtgaagcccgcctcgtggaagatattgggcatgaactgacctacgttctcccctatgaggccgcaaaagaaggcgcttttgttgaactcttccatgagattgatgataggctgtcagatttggggatctcatcctatggcatttcagaaacaacactagaagaaattttcctcaaagttgccgaagagtccggggtcgacgcagaaacatctgacgggactctgcccgcccgcaggaatcggcgggccttcggcgacaagcaaagctgtcttagacccttcaccgaggatgatgcagccgaccctaacgacagtgatattgacccagaaagccgtgagacggacctgttaagtggtatggacggaaaggggtcttaccaggtgaaggggtggaagttaactcagcagcagttcgttgccctcctctggaaacggctgctcattgcccgaaggagccgaaaagggtttttcgcccagattgtactgccagccgtatttgtgtgtatcgctctggtgttttcacttatcgtgcccccatttgggaagtacccaagccttgagctgcaaccctggatgtacaacgagcaatacacattcgtgtctaacgatgctcccgaagacaccgggacccttgaactgcttaacgcgttgaccaaggatccaggatttggcacccgatgtatggagggcaaccccatccctgatactccgtgtcaagccggagaggaagagtggacaactgcccccgtcccacagacaatcatggatctctttcagaatggaaattggaccatgcaaaaccccagccctgcttgccagtgtagctccgataagataaaaaaaatgttgccggtttgtccgcccggggccggcggcctgcccccaccgcagcgcaaacagaacacagcagatattttacaagacctcactggcagaaatatctccgactatttggttaaaacctatgttcagataatcgccaaaagtctgaaaaacaagatttgggttaacgaatttaggtacggcggattctctttaggcgtgtccaacacccaagcccttcctccgtcgcaagaggtcaacgatgcaattaagcagatgaaaaagcacttgaagctagccaaagattcttctgcagatcgctttctcaatagcttggggagattcatgacggggctggataccaaaaataacgtgaaagtgtggttcaacaataagggatggcacgccataagcagcttcctgaatgtgattaataatgccatccttagggctaatctgcaaaagggggaaaatccatcccactacggaattaccgctttcaaccatcccctcaatcttaccaagcagcagctctcagaagtggccctgatgaccacatcagttgatgtgctggtgagcatttgcgtgatctttgcgatgagctttgtacctgcgtcttttgttgtgtttctgatccaagaacgtgtctccaaagcaaaacacctgcagttcatcagcggggttaaacctgtcatttactggctcagcaatttcgtgtgggatatgtgtaattatgtcgtcccagccactctcgtgatcattatatttatctgtttccaacagaagtcctacgtgtcatctactaacctccctgtgctcgctctattgctcttgctgtacggctggagtatcacaccacttatgtaccccgctagttttgtcttcaaaatcccctcgaccgcttacgtcgtgctgacaagtgtcaacctattcatcggcataaatggatcagttgccacattcgtgcttgagctcttcacagataacaagctgaacaatatcaacgatatattgaagagcgtcttcttgatctttccgcacttttgccttgggagaggcttgattgatatggtgaagaatcaggcgatggcggacgccctggagagattcggggaaaatcgattcgtatcccccctttcttgggatctggtgggacgcaatctcttcgctatggctgtggagggggtagttttcttcttaatcaccgtgctgatacagtaccgcttcttcattcgccctcgccctgtcaacgccaagctgagtccattaaatgacgaggatgaagatgtacggagagaacgccagcgcatcctcgatggaggcgggcagaatgatattctggagatcaaagagctcacgaaaatttatcgcaggaagcgaaagccagccgtggatagaatttgtgtgggaatccctcccggcgaatgtttcgggctgcttggggtgaacggagcaggtaagagcagtacctttaaaatgctcacgggagacacaaccgttactcgaggggacgccttcctcaacaagaattctatactatccaatattcacgaggttcaccagaacatgggctattgtcctcaatttgatgctattaccgagctactgactgggagagaacatgtggaatttttcgccctgctccggggagtccctgagaaggaggtcggtaaggtgggagaatgggcgatcaggaaactagggctcgtcaagtatggcgagaagtacgctgggaactattccggcggaaataagcgcaaactttccaccgcaatggcactcattggcggtcctcccgtggtgtttctggatgaacctactaccggaatggacccaaaggcaaggagattcctctggaactgcgctttgagcgtcgttaaggaggggcgatccgtggtgttaacatctcattctatggaggaatgcgaggcactgtgtaccagaatggcgatcatggtgaacgggcgcttccggtgtctgggcagtgtacagcacctaaagaacagatttggggacggatacaccatcgtcgtgcgaattgcaggaagtaaccccgacctcaagcccgttcaagattttttcggcctagctttccccggctctgtgctcaaagaaaagcacagaaatatgctgcagtatcaattgccaagtagcctgtcaagcctggctagaatcttttccattctatcccaatcgaaaaaaagactgcacatcgaagactattccgtgagccagactactcttgaccaggtgttcgttaattttgcaaaggatcagtctgacgacgatcatttgaaggacctctccttacataaaaatcagaccgtggtggatgtggccgtactcactagtttcttgcaagatgaaaaggtgaaggagtcttacgtgtag

SEQ ID NO: 179940 - DNA, 1092 bp, synthetic construct
  misc_feature 1..1092: note = Description of Artificial Sequence: Synthetic coding sequence
  source 1..1092: mol_type = other DNA
atggcctgctggccccagctgcggctgctgctgtggaagaacctgactttcaggcgccgacagacgtgtcagctgttactcgaagtggcatggccactcttcatcttcctcattctgatctctgtgcggctttcttaccctccctacgagcagcacgagtgccattttcctaacaaggcaatgccgagcgccggtacactcccttgggtgcagggtatcatttgtaatgccaataacccatgctttagataccccaccccaggggaagccccaggggtcgtggggaatttcaataagagtatcgtcgcaaggctcttcagcgatgcgagaagactgttgctgtattctcaaaaggatacctccatgaaagatatgcgcaaagttctcaggaccctccaacagatcaaaaagtcatcgtccaatttaaagctgcaggacttcttggtcgataacgaaacattttccggattcttgtaccacaatctgtctctccccaagtcgactgtggacaagatgttgcgcgctgacgtaattctccacaaggtctttctgcaggggtaccagctgcacctgacatccttatgtaacggctctaaaagcgaggagatgattcagttgggagatcaggaagtgtcggagctgtgtggactcccaagagaaaagctggccgccgctgaacgggtcctccggtccaatatggacatcctgaagcctatcctcatggatgttacttgcgatgacatagcccatggacaactcactgtcccacgctccgctgcagtggcggccacgggcgacgccaaacctaacatgatgggacgggaaactttactgagcatttgcgcgtcggtgcccaaggtggagtttcacgagcgacacattctcaagcattttagcttttgtgtgtgcgtctctgtgagcctgttcccagcaaagggcatcgtctccttctcttgggcatcctttcggatctgggtattgtggaaagccgtcttttggcaacacggggagagcatggctgtctgggaggggcagctggggttaggcctgaacatagcatttgaatatttcacctccatcgacgtgggttag

SEQ ID NO: 179941 - DNA, 4632 bp, synthetic construct
  misc_feature 1..4632: note = Description of Artificial Sequence: Synthetic coding sequence
  source 1..4632: mol_type = other DNA
atgaacaagatggccctggccagcttcatgaagggccggaccgtgataggtacacctgatgaagaaactatggatattgagttacctaaaaagtaccacgagatggtgggggtcatatttagcgatacgttctcctatcgattgaagtttaattggggctaccggatcccggttatcaaggaacatagcgagtacaccgaacactgttgggctatgcacggggaaatcttctgctacctggctaaatattggctgaaggggtttgtcgcctttcaggctgccattaatgcggccatcatcgaagtgaccacgaatcacagtgtgatggaggagctgacatccgtgattgggattaatatgaaaatacctccattcatatccaaaggagaaataatgaatgaatggttccacttcacttgtctggtctccttctcatctttcatctattttgcttctttgaatgtcgcccgcgagcggggaaagttcaagaaactgatgacagtgatgggactccgcgagtccgccttctggctctcttggggcttgacctatatctgcttcatctttatcatgtcaattttcatggctctggttatcaccagcatcccaatcgtcttccacactggctttatggtgattttcactttgtattctctttatggactgagccttattgcacttgccttcttgatgtccgtcctgatccgtaagccaatgctagccggtctggccggattcctgttcaccgtcttttggggatgtctgggcttcactgtgctatacaggcagctgccattgagcctcggatgggtgctaagccttttgtctccttttgcgttcaccgccggaatggcccagattactcatctcgacaactatcttagcggcgtgattttccccgatcccagcggcgacagctacaagatgatcgccactttcttcatcctggcattcgacacccttttttatctgatttttacactttacttcgagagagtgctgccagacaaggacggacatggcgactcacccctgttttttcttaagtcctccttttggtcaaagcatcaaaatacgcaccatgagatcttcgagaacgagattaatcccgagcatagttcagacgatagctttgaaccggtgtctcccgagtttcacgggaaagaagccatccgaatccgcaatgtaattaaggaatacaacggcaaaactggcaaagtggaggctctccagggaatttttttcgacatatatgaggggcaaataactgccatcttggggcataatggtgcaggcaagagtaccctcttgaatattctcagcggcctctcagtctctacagaaggtagtgccaccatatacaacacccagctgtcagagatcacagatatggaggaaattcgcaagaatatcggtttctgcccacagtttaactttcagtttgattttttaacagtgcgcgagaacttgcgcgtctttgccaagattaaaggcattcagccgaaggaggtggaacaggaggtgaagagaatcataatggagctggatatgcaaagtatacaggatatcatcgcgaagaaactctccggggggcagaaacggaagctcacgctagggatcgctattctgggagatccccaggtgttactgttggacgagccgacagctggacttgacccttttagcagacatcgggtgtggagcttgttaaaagagcacaaagtggatagattgattctatttagtacccagtttatggatgaggccgacatactggctgacagaaaagttttcctcagcaacggaaagctgaagtgcgcaggctccagtctcttcctgaagcgaaagtgggggattggataccacctgtctctccacaggaacgaaatgtgtgacacagagaaaataacctcccttattaaacagcatattcccgatgctaagctgacgaccgaaagcgaagagaagctggtttatagcttgcccctagagaaaaccaataaatttcctgatctgtacagcgacctggacaaatgttccgatcagggcatccgaaattacgccgtctccgtgacaagccttaacgaggtatttttgaacctggagggaaagtccgctatcgatgagcccgacttcgacattggaaagcaagaaaagatccacgtcactcgtaataccggtgatgagagtgagatggagcaagtactgtgttctctcccagagacccggaaggcagtgtcgtcggcggcgctatggaggaggcaaatttacgccgtggcgactctgcggttcctgaaattgaggcgcgaacggagggctttgctttgtctgcttttggtattaggcatcgcgttcataccgattatattggaaaagattatgtacaaagtcacaagagaaacgcactgttgggagttttcacctagcatgtactttctgtccctggaacagatccccaagacgcctttgaccagcttactcatagtgaataatactggctcgaatatagaggacctcgtccactcacttaagtgccaggatatcgtgcttgagatcgatgattttaggaaccgcaacggcagtgacgaccccagctacaatggcgcaattattgtgagcggcgatcagaaggactacaggtttagtgtagcctgtaataccaaaaagctgaattgtttcccggttctgatggggatagtgagcaatgcactgatgggcatctttaactttacggagctgatccaaatggaatcaacttccttttcacgagacgacatagtgcttgacctcggtttcattgacggctcaatttttctcttgcttatcacaaactgtgtcagtcccttcatcggaatgtccagcatcagtgattacaaaaaaaatgtgcagagtcaactatggatctctggcctgtggccctcagcttattggtgtggccaggcactcgtcgatatacctctttacttcctgatcctgttctctatccacttgatttattactttatcttcctaggatttcagcttagttgggaacttatgttcgttctggtcgtgtgtatcattggatgtgccgtttcccttatttttttgacctatgttctctccttcatcttcaggaagtggcggaagaataacggattttggtcattcggcttctttatcatcttgatctgcgttagtactatcatggtgagcacccaatatgaaaagttgaacttgattctatgcatgatatttatcccttcttttactctgttagggtatgtgatgctgctcatccagttggattttatgagaaatctcgattctctggacaacagaatcaatgaagtgaataagacaattctgttgaccactctcataccctatctgcagtccgtcatatttctctttgtgatcaggtgcttggaaatgaaatatgggaatgagattatgaacaaagatccagtcttccggatatcccccagaagtagggaaactcatcctaatcccgaagagcctgaggaggaggacgaggatgtgcaagcggaaagagttcaagctgctaacgccttgaccgcgccaaatcttgaggaggagccagtgattaccgcatcctgtctacacaaagagtattacgagaccaagaagtcttgtttctcaacccgcaagaagaaaattgctattcgcaatgtctcattttgtgtgaaaaaaggagaggtgttggggttacttggtcataatggcgctgggaagtctacttccataaagatgattacaggctgcacaaagccaacagcaggcgtcgttgttctacagggctctagggcctcggtgcggcaacaacacgataatagtctcaaatttttgggatactgccctcaggagaactctttgtggcccaaactcaccatgaaggagcatcttgaactgtacgccgccgtgaagggactcggcaaagaggatgccgccctcagtatatcgcgcttagttgaagctctgaaactccaggagcaacttaaggccccggtgaagaccctgagcgaaggaattaagagaaagctttgcttcgtcctgtctatcctgggaaacccaagcgtggtgctgcttgacgagccatttacagggatggaccccgaaggacagcagcaaatgtggcagatcctgcaggccacagtgaagaataaggagcgcggaacacttctgacaactcactacatgagtgaagccgaggccgtgtgcgatcggatggctatgatggtctctgggactctgaggtgcattggatctatccagcatttaaaaaataaatttggacgggattacctgttggaaattaagatgaaggagcccacccaggttgaagcgctacacaccgaaatcctgaagcttttcccacaggctgcgtggcaggagcggtactcgtcccttatggcttacaaactacctgtagaagacgttcacccactgagccgtgctttcttcaagctggaggcaatgaaacagacattcaacctggaagagtactctctgagccaggccacactggaacaggtattcctggaattgtgtaaagagcaagaactgggtaacgtagatgataaaatcgacaccactgtggagtggaagctgcttccgcaggaagatccatag

SEQ ID NO: 179942 - DNA, 1401 bp, synthetic construct
  misc_feature 1..1401: note = Description of Artificial Sequence: Synthetic coding sequence
  source 1..1401: mol_type = other DNA
atgaacaagatggccctggccagcttcatgaagggccggaccgtgatcggaacaccagacgaagaaactatggatatcgagctccccaaaaagtaccatgaaatggtgggcgttatcttctccgatacattttcataccgtctaaagttcaattggggttataggattccggtcattaaggagcattcggagtatactgagcactgttgggctatgcacggggagattttctgttatctcgcgaagtattggctgaagggcttcgttgcgttccaggcggcaatcaatgctgccattatcgaggtgacaacgaatcatagcgtaatggaggagctaaccagcgtcatcggaataaacatgaagatacctccttttatttccaagggtgagatcatgaacgaatggttccatttcacctgcttagtgtccttctccagcttcatatatttcgcatctctcaacgtggcccgcgaacgaggtaaattcaagaagttgatgaccgtcatgggccttcgcgagagtgcgttttggctgtcatggggactaacctatatatgctttatttttataatgagcatcttcatggcgttagtcattacttcgatcccgatcgtgtttcacacaggattcatggtgatctttaccctttacagtttgtatggattgtcactaattgcccttgcctttctgatgtcggtgctgattcgcaaacccatgttggcaggactcgccgggtttcttttcaccgttttttgggggtgccttggctttacggtcctctaccgccagctgccactatctctcggttgggtcctctcgcttttaagcccatttgcgttcaccgcgggcatggcccagattactcacctagacaattacctcagcggcgtcatcttccctgatccctccggcgattcttacaagatgatagccacgtttttcattcttgcctttgatacgctgttctacctcatcttcacactatatttcgaacgcgtgctgcctgacaaagatggccacggagatagtcctcttttttttctgaagagcagcttttggagcaaacaccaaaatactcatcacgagatattcgaaaatgagataaaccctgaacactcctcagatgactcatttgagccagtgtcccctgaatttcatggtaaggaagccatccgcattcgaaacgtgattaaggaatacaacggtaagacaggcaaggtggaagccttgcaggggatcttctttgatatctacgagggacaaattacagccattcttgggcacaatggagcaggtaagtctacgctcctgaacatcctgtcaggtctgtcggtaagcactgagggcaaaaaaaactacaacgggatcagacacgccaaacactcaagacactattgctag

SEQ ID NO: 179943 - DNA, 279 bp, synthetic construct
  misc_feature 1..279: note = Description of Artificial Sequence: Synthetic coding sequence
  source 1..279: mol_type = other DNA
atgaacaagatggccctggccagcttcatgaagggccggaccgtgattggaacccccgacgaagagacaatggatatagaacttccaaaaaagtaccacgagatggtcggcgtgatatttagcgacacgttctcttatcgccttaaattcaattggggatataggattccagtgattaaggagcactccgagtacacagggcacaataagtccttctgcaacgggggtgtggatatctcctactggaacaagtatgaggataccacctttcatttttag

SEQ ID NO: 179944 - DNA, 1359 bp, synthetic construct
  misc_feature 1..1359: note = Description of Artificial Sequence: Synthetic coding sequence
  source 1..1359: mol_type = other DNA
atgaacaagatggccctggccagcttcatgaagggccggaccgtgatcggaacacctgatgaggagaccatggacattgaactgccgaaaaaataccatgaaatggtgggcgttatattctcggacaccttttcttatcggctgaagttcaactggggctaccgaatccccgtaattaaggaacacagtgagtataccgaacactgctgggctatgcacggtgaaattttctgttacttggctaagtactggctcaaagggtttgtcgcctttcaggctgcaataaatgctgcaataatcgaggtgacaactaatcattctgtcatggaggagttgacttccgttatcgggattaatatgaaaattcctccattcatctcaaaaggggagattatgaatgagtggtttcactttacatgtctggtttcgtttagctcattcatttatttcgcaagccttaatgtggccagagagagaggcaagtttaaaaaacttatgaccgttatggggctgcgcgaatctgctttctggctgtcatggggacttacatatatttgctttatatttatcatgtccatctttatggccctggtgatcacatcgatcccgattgtgttccacacaggctttatggtgatctttactttatatagtctctacgggctgagcctgatcgcgctagcttttctcatgagcgtcctgatcaggaaaccaatgctcgctggtcttgccggatttttgttcacagttttttggggttgcctgggattcacggtattgtaccggcaactacccttgtccctcggttgggttctgtctctattaagcccattcgccttcaccgctgggatggcccagataacccatttggataattacctcagtggggtgatatttcctgaccctagtggcgattcatataaaatgatcgcaaccttttttatactggccttcgacacgctgttttacctcatcttcacactgtactttgaacgcgtgctccctgataaggacggccatggagatagtccacttttttttctgaagtcatccttctggtcgaagcatcaaaatacgcaccacgagatttttgagaatgagatcaacccagaacattcttctgacgactccttcgaaccagtgagcccagagtttcatggaaaggaggctattaggattaggaatgttatcaaggagtataatgggaaaactgggaaggtggaagctctgcaggggtccgaggaacgcctctgtcctgccgctcatagactgaggtgtggcgagcgactgtgtcccgcagcacaccatcttggttgcgaagagagaccatgccctgctgcaaccccttcaggaaattag

SEQ ID NO: 179945 - DNA, 7788 bp, synthetic construct
  misc_feature 1..7788: note = Description of Artificial Sequence: Synthetic coding sequence
  source 1..7788: mol_type = other DNA
atggccagcctgttccaccagctgcagatcctggtgtggaagaactggctcggcgtcaaacggcagccactgtggactctggtgctaattctttggcccgtgatcatctttattattttggcgattacgcgaaccaagtttccccctacagcaaaaccaacttgttaccttgctcctcggaatctgccaagcaccggcttttttcccttcctgcagacactcttatgtgatactgactcaaagtgtaaggatactccatacggccctcaggacctcctgcgccgcaagggcatcgatgacgcactatttaaggacagtgaaatcttgcgcaaaagctccaacctggataaggactctagcctgagctttcagagtacccaagtgccagagagaagacacgcctccctcgctaccgtgttcccctctccatcatcagatctggaaatcccgggcacctatacctttaatggcagtcaggttctggcaagaatcttaggcctagagaagttgctgaaacagaatagtaccagcgaagatatccggagggagctgtgcgattcttatagtggttacattgtggacgatgccttctcctggacctttctggggcgcaatgtgttcaataagttttgcttgagtaacatgacgctgttggaaagcagccttcaggagctcaataagcagttttctcagctgtcaagcgacccaaataatcagaaaattgtattccaggagatcgtgagaatgctcagtttcttttcccaagtgcaggaacagaaggccgtatggcagctgttgagctccttcccgaatgtctttcagaatgatacctcattgtcaaatctgttcgacgttctgaggaaagccaactctgtgcttctcgttgtgcagaaagtttaccccagatttgcaacaaacgaggggtttagaactctgcaaaagtctgtgaagcacctgctgtacacgctcgatagccccgcacaaggtgactcggataacataactcatgtgtggaacgaagatgacgggcagactctaagcccaagttcattggcagcacagctcctgattttggagaatttcgaggatgctttgctgaacataagtgccaatagtccttacataccatacctggcatgcgtgaggaacgttaccgacagcttggcaagaggaagtccagagaacctccggctgctccagtcgactatccgcttcaaaaagtccttcctgcgcaacggcagctacgaagattatttcccgcctgtacccgaggtcctgaagagtaagctatctcaactacgaaacctgacagagctcctgtgcgagtccgaaacatttagcctgattgaaaaaagctgtcaactcagtgacatgagctttggaagtctgtgtgaggagagcgaattcgacctgcaactgttggaagctgcggaacttggaaccgagatcgctgccagcctgctgtatcacgataatgttatctccaagaaggtgcgggatctcttgacaggagatcccagcaagattaacctgaatatggaccaattcctcgagcaggctcttcagatgaattacctcgaaaatattacccagctgatcccgattattgaggctatgttgcatgtgaacaatagtgccgacgctagtgagaagcccggccaactgctcgaaatgttcaaaaatgtggaagagctgaaagaggacctgaggcggacaactggaatgagtaaccgcacaattgacaagttattggctatacccataccagacaatcgcgcagaaattatttcccaagttttctggctgcattcctgcgatacaaacataaccacccctaagttagaagatgccatgaaggaattctgcaacttatcccttagcgagaggtccaggcaaagttatctaattgggctgaccctcctacattacctcaatatctacaattttacatacaaggtcttcttcccgcggaaagatcagaagccggtggagaaaatgatggagctgttcatcaggctcaaggagatcttgaatcagatggccagcgggactcatcctctgctggacaagatgcgctccctcaaacagatgcacctgcccaggagcgtgcccctgacccaggcaatgtacaggagcaaccggatgaacacgccacaaggttccttctctaccatcagccaagctctctgcagccaaggtattaccactgagtacttgacggcaatgcttccttcatcacagcgccctaaaggcaaccataccaaggactttctgacctataaactgaccaaggagcagattgctagcaagtatggcattcccatcaactccacacccttctgcttctccctgtataaggatatcataaacatgcctgctggcccggtgatctgggcattcttgaagccaatgctgctcggaaggattctgtatgccccttataatccagtgacaaaggctattatggagaagagtaatgttaccctgcgccagctcgcagagctgcgagaaaagagtcaggagtggatggacaagtcccccctgttcatgaattcctttcatctgcttaaccaagcgatccccatgctccagaacacactccgaaatccctttgtccaggtgttcgtgaagttctccgtcggtctggatgccgtggaattacttaaacagatcgatgagttggacatcttgagactcaagctggaaaacaacattgacataatcgaccagctgaacacactcagctcactgacggtgaatattagcagctgcgttctgtacgaccgcatacaggcggctaaaactatcgacgagatggaacgggaggccaaacgactgtataagtcaaatgagctgttcggcagcgtaatcttcaaactaccttccaatcgctcctggcatcgggggtacgatagtggcaatgttttcctcccccccgtgatcaagtacacaatccgcatgtccctgaagaccgcccagaccaccagaagtttaagaaccaagatttgggcacctggtcctcacaactccccaagccataatcaaatctatgggcgcgcattcatctacctgcaggacagtatcgaacgggcaattattgagctccagacagggaggaacagccaggaaatagctgtgcaagtacaggcaattccatatccctgcttcatgaaagacaatttcctcacgagcgtgtcgtacagtctgcctatcgtgcttatggtcgcctgggttgtgtttatagcggcttttgtgaaaaagcttgtgtacgaaaaggatttgaggttacacgagtacatgaagatgatgggtgtgaacagctgttcacatttttttgcctggctgatcgagtccgtaggtttcctacttgtgaccattgtgattctcatcattatccttaagtttggtaacatccttccgaaaacgaacggctttatccttttcctgtacttttccgactattccttcagcgtgatcgctatgagctacttgatctctgtgtttttcaataacactaatatcgccgcgcttatcggttccctgatttacatcatcgcattttttccttttattgtactcgtgacagtcgagaacgaactctcttatgtccttaaagtttttatgagcctcctgtcgcccacagctttctcatacgcctcacaatatatcgctagatatgaagagcaggggatagggttacagtgggagaatatgtacaccagcccagttcaggatgacacaacatccttcgggtggctgtgctgtcttatccttgctgacagctttatatatttcttgatcgcctggtatgtgcggaacgtcttccctggcacctacggcatggccgcgccctggtactttccgatcctgccaagttattggaaggagaggtttggatgtgcagaagtgaaacctgaaaaaagtaatggtctcatgtttactaatatcatgatgcagaatacaaacccatctgccagccctgagtacatgttctcctctaatattgaacccgagcccaaggatttgacggtcggagtagccttacatggcgtcacaaagatatacggaagtaaagtcgctgtggacaatctaaacctgaatttctacgaggggcatatcacttctctactggggcctaacggggcaggaaagacaactaccattagcatgctcactggactgtttggtgcaagcgccggaacaatctttgtgtacgggaaggacattaagacagatttacacactgtcagaaagaatatgggtgtttgtatgcagcacgatgtcctattctcttatctgacaactaaagaacacctgctactctatggctctataaaggtgccgcactggactaagaaacaactgcacgaggaagtaaagcgtaccctaaaagataccgggctgtattctcatcggcataaacgggtcggcactcttagcggaggtatgaaacggaagctgtctatctccattgctctcatcggcggtagtagggtcgtgatactcgacgagcctagtaccggggtggacccctgttccagacgttcgatctgggacgtaatctctaaaaataaaactgcccgcactataattctgagtacccaccacctcgatgaggccgaggttctctccgaccggatcgctttcctcgaacagggcggccttcggtgttgtggaagccccttttaccttaaagaagccttcggcgacgggtatcacctcacattgacaaaaaagaaatctccgaacctgaacgcaaacgccgtttgcgacaccatggcggtgaccgctatgatccagagtcacctgccggaggcatacctaaaggaagacatagggggggagcttgtgtatgtactgccccctttctccaccaaggtgtccggagcctacctcagtctccttcgagcattggacaatggcatgggagaccttaacattggctgttacggtatatccgacaccaccgtggaggaggtttttttgaaccttaccaaggaatctcagaagaactccgccatgagtctcgaacacctgactcagaagaaaatcggcaattctaatgccaacggaatttctacacccgatgatttgagcgtttcatcctctaatttcaccgatagagacgataaaatattgactcggggagaaagactcgacggcttcgggttattgcttaagaaaattatggcaatcctgataaagagatttcaccatacccgcagaaattggaaaggtctcattgctcaggtgatccttcccatagtgttcgttacaacagcaatgggactgggtacccttcgaaacagcagtaactcgtaccccgaaatacagatttcacctagcctctacggaacttccgagcaaactgctttttatgcaaactatcacccatcaactgaagccctggtcagtgcaatgtgggacttccctggcatcgacaacatgtgtctcaacacatcagacttgcagtgtctgaataaagattccctggagaaatggaatacttccggagaacctataactaacttcggggtgtgctcctgcagcgagaacgtacaagagtgccccaaattcaattattcgccaccacaccggcggacttattcctctcaagtaatctataatttgactggccaaagagtcgagaactaccttatctccaccgcaaatgaattcgtacaaaagcggtacggagggtggagcttcggtcttcctctcacaaaggatcttcgcttcgatataacaggtgtgccggctaaccgcacgttggccaaagtatggtatgatccagaggggtaccattcacttcccgcatacctcaattccttaaacaatttcctgctcagagtgaacatgagcaagtatgacgctgcgaggcacggtatcattatgtattcacatccttaccctggcgtacaggatcaggagcaggccactatatcaagcctcattgacattctggtggccctctccatcctgatgggctatagtgtgacgaccgccagttttgtaacatacgtggtgagggaacatcagaccaaagcaaagcagctacaacacatctcagggatcggcgttacttgctactgggtaacgaatttcatctacgacatggttttttacctggtacctgtcgccttttctattgggatcattgccatttttaagctgcctgccttttacagtgagaataatcttggtgctgttagtctgctcctgttgctcttcgggtacgccaccttcagctggatgtatttgctggctgggcttttccacgagacaggaatggcctttatcacatatgtctgtgtaaatctcttttttggtatcaactccatcgtaagcctgtccgtggtgtacttcctatccaaggaaaaaccaaacgacccaactttagagctgattagcgagacccttaagcgcatctttctgatctttcctcagttctgtttcggctacgggttgatagaactttcacagcagcagagtgtgctggattttctcaaggcttacggcgtggagtatcccaatgaaacatttgaaatgaataagctgggggccatgttcgtggccctggtgtcccagggcacgatgtttttctcactcaggcttctcatcaacgaatccctcattaagaagttgaggctattctttcgcaaattcaactcttcccacgtgagagagacaattgatgaggatgaggacgtcagggccgagagactgcgagtcgagagcggcgccgccgagttcgacctggtgcaactttactgcctcaccaagacgtaccagcttatccacaaaaagatcattgccgtcaacaatatttcaattggaataccagcgggggaatgcttcggtctcctgggggtgaacggggcaggcaagactactattttcaagatgctgacgggcgatataatcccctcgtcaggaaacattttgatccggaataagacggggagtttgggccacgttgatagtcacagctcgttggttggttactgcccacaggaggatgccctggacgatctcgtgacagttgaggagcacctgtatttttatgctagggtgcatggcatccccgaaaaggatatcaaggagaccgtccacaagttgttacgtaggctccacctcatgcctttcaaagaccgcgcaacctccatgtgcagctacgggacaaaacggaagctgtctacagctttagctctgattggcaaacctagcatcctgcttctggacgagccgtccagcggaatggaccccaaatcaaagcggcatctttggaagatcatatccgaggaggtgcagaataagtgtagcgtgatcctgacctcacacagtatggaggagtgtgaagcgttatgtaccagactggcaataatggtcaacggaaagtttcaatgtattggctctttgcaacatattaagtccaggttcgggcggggcttcacggtgaaggtacaccttaaaaataataaggtgacaatggaaacacttaccaaattcatgcagctccactttccaaagacttacctgaaggatcaacacctgtcaatgctcgagtaccacgtgccggtcacagctggaggcgttgcaaacatcttcgacttgttagagaccaataaaactgcacttaacattacaaacttcctcgttagtcagaccaccctagaggaggtgtttattaattttgctaaagaccagaaaagctacgagactgcagatacttccagccaggggtccacaatttccgtagactcgcaagatgaccagatggagtcatag

SEQ ID NO: 179946 - DNA, 6834 bp, synthetic construct
  misc_feature 1..6834: note = Description of Artificial Sequence: Synthetic coding sequence
  source 1..6834: mol_type = other DNA
atgttcacctacatcaagatcatcaccagcggcgacagcgacaacatcacccatgtctggaatgaagacgacggacagactctgagtccctccagccttgctgcgcagctgctgatcctggaaaattttgaggatgccttactcaacatatctgccaacagcccttatatcccgtaccttgcatgcgttaggaatgtcaccgattccctggctcgaggcagccccgagaatctgcggctgctgcaatcaaccattaggttcaaaaagagctttctgagaaacggatcctacgaagactacttccctccggtgccggaggtgcttaaaagtaagttgtctcagttaaggaatcttacagaattgctttgcgagtctgagacatttagcctgattgaaaaatcttgtcagttgagcgacatgtcgtttgggtcactgtgcgaggagagtgaatttgacttgcagctcctggaggcagctgaactcgggaccgagattgccgcctccctcctttatcacgataatgtcatttccaaaaaagtacgggacctgctaactggtgacccatccaagattaatttgaatatggatcagtttctggagcaggctctccaaatgaactatctcgagaacatcacccaattgatacctatcattgaagccatgctgcacgttaacaactcagccgacgcaagcgagaagcccggtcagctccttgagatgtttaagaacgtagaggaactgaaggaggatctcaggcggacaacagggatgagcaaccgaacgattgacaagttactggccattccaattccagacaaccgggcagagatcatatcccaagtgttttggctgcactcttgcgacacaaatattacaacacccaagctggaggacgcaatgaaggaattttgcaacctttctctgtctgaaaggtccaggcagagctatcttattggcctgacactcctgcattacttgaatatctataactttacctataaggttttctttccgcgcaaggatcagaaacccgtggagaagatgatggaactttttattcgcctcaaagagatcctgaaccagatggcgagcgggacccatccactgctcgacaaaatgcgctccttaaaacaaatgcacttaccacggtcagtcccccttacacaagccatgtacagatccaatagaatgaataccccgcagggatccttctcaacaatcagccaggctctctgttcacagggaatcacaaccgagtatctcaccgcgatgttgcccagttcccagaggccgaagggcaaccatacaaaagacttccttacatacaagttgaccaaagaacaaattgccagtaagtatgggattccaatcaacagcactccgttttgcttcagcctgtacaaagatatcatcaatatgccagcgggccctgtcatttgggcatttctgaaacccatgcttttggggaggattctttatgctccctataatcccgtaaccaaggccattatggaaaagtccaacgttacactacgacaactggccgaactgcgagagaagagccaggagtggatggataagtctccactgttcatgaactcatttcatcttctgaaccaggccatccccatgctgcagaataccttacgaaaccctttcgtgcaggtattcgtcaaattcagtgtgggattggatgcagtggaactgctcaaacagatagatgagctggatatcctgaggctgaagctagagaacaacatcgacattatcgatcagttaaacactttgagttcactaacagtcaacatcagcagctgcgtgttgtacgatcgtatccaggcggccaagactattgacgagatggagagagaagcaaagaggctgtacaaatctaacgagctgttcggaagcgtgatcttcaagctaccttcaaaccgctcatggcacaggggctatgactccggcaacgtcttcctgccccctgtcatcaaatacaccatcaggatgtccttgaagaccgcccaaacaacgaggtcgctaaggacaaagatctgggcccccggtccacacaatagcccttctcataaccaaatttatggacgggccttcatctacctgcaagatagcatcgaaagagctattatcgagttacagacagggcgtaacagccaggagatcgccgtgcaggtccaggccattccttatccctgctttatgaaagacaacttcctgactagcgtttcttattccctgccaatcgtactgatggtggcatgggtcgtattcattgcggctttcgtgaagaaactcgtctacgagaaggacctgaggctgcatgagtatatgaagatgatgggcgtcaattcttgctctcacttcttcgcctggctgatcgaatctgtgggtttcctattggtcaccattgtcatactcataatcatcctgaagtttggcaatatccttcctaaaaccaatggcttcattctgtttctttatttctcagactattctttcagcgtgatcgctatgagttaccttattagcgtcttcttcaataacacaaatatcgccgccctgatcggcagcttgatctacataattgctttcttccctttcattgtgttagtcacggtggagaatgagttgtcatacgtactcaaggtttttatgagcctattgagtcctacagcctttagctatgcttctcaatatatagctaggtacgaagagcaaggcatcggattacagtgggaaaacatgtacactagcccagtccaggatgataccactagctttggctggctgtgctgcctaattctcgccgacagctttatatatttcctgattgcttggtatgtgcgaaacgtgtttcccgggacttacgggatggctgccccatggtattttccaatcctgcccagctattggaaagaaagattcggttgcgccgaagtgaagccagaaaagagcaacgggcttatgtttacaaatatcatgatgcagaacacaaaccccagtgcatcacctgagtacatgttttctagcaatatcgaacctgaacccaaggacctgactgtgggcgtggccctgcatggcgttactaagatctacggcagcaaggttgctgtcgacaatctgaatttaaatttttacgagggccacatcacctctcttctcgggcccaacggggcaggaaaaaccactacaatctccatgctcaccggactcttcggcgcctccgcgggcaccatttttgtttacggcaaagatatcaagacagatctgcacacagtgcgtaagaatatgggcgtctgcatgcaacacgatgtgttgtttagctatctcacaaccaaggagcatctgttgctttacgggtcaattaaggtcccacactggaccaagaagcagctgcacgaagaagtgaagaggacattaaaagacactggcctgtacagtcataggcacaaaagggtggggaccctctcaggtggcatgaagcggaaactgagcatctccatcgccctcattggtggctcacgtgtcgtcattctggatgagccttcaaccggcgtcgatccatgctcacggcggtccatttgggatgtcatctccaagaataagacagccagaacgatcatcttgagcacacaccacttggatgaagccgaagtactctcagatagaattgcatttctcgaacagggtggtctgcgctgctgcggttcccctttctacctcaaggaagctttcggcgatggctatcacttgactctcaccaaaaagaaatcccccaatctgaacgccaacgcagtctgcgacaccatggcagtgaccgcgatgatccagagccacctgccagaggcctatctaaaggaggacatcggaggagaactggtctacgtgctcccacccttcagtacaaaggtttctggagcttatctgtcactcctccgggctcttgataatgggatgggggatttgaatatcggatgttacggtatctctgatacaacagtcgaggaggtgtttttgaacctcacgaaggagtctcagaagaactctgccatgagcctcgagcatcttactcagaaaaaaattggaaactccaatgctaacggcatcagcactcccgatgacttgtctgtttccagctccaattttaccgatagggacgataaaatcctgacaagaggagagaggctcgacggttttggcctcttattaaagaagatcatggccatcctcattaaaagattccatcacaccagacgtaattggaagggtctcattgcccaggtgatcctgccaattgtgttcgtgactacggcaatggggctgggtaccctgagaaactcaagcaatagctatcccgagatccagatctcccccagcctgtatggcacaagtgagcagacagcattttatgcaaactaccacccttctaccgaggcgttagtgagcgctatgtgggattttcctggaattgataatatgtgtctgaacactagcgacctgcaatgtcttaataaagacagtttggagaagtggaacacttctggagagccgattaccaatttcggggtgtgcagttgctctgaaaatgtccaggaatgtcccaaattcaattatagccctcctcataggcggacatattctagccaggtgatctataaccttacaggccagcgagtggaaaattacctgatttcaaccgcaaatgaattcgtgcagaaacgatatggaggctggtcttttggtctacctttgactaaggacttgaggttcgatataaccggcgtccctgccaaccgcactcttgcgaaggtgtggtatgacccggaggggtaccactctctgccagcatacctcaactcgctgaataactttttgcttcgagtcaatatgtcaaagtacgatgccgcccggcatggtattattatgtactcacatccataccctggcgtccaagaccaggaacaggcaacgatctctagcctcattgatatcttggtggctctcagcatcctgatggggtattcggtcacaacagcttcgttcgtgacgtatgtggtgagggagcatcagaccaaggctaaacaattacaacacatcagcggcatcggcgtaacatgctattgggttaccaactttatctatgatatggtattttacctggtgcccgttgcattttctatcggcatcatcgctatcttcaaactccccgcgttttattctgaaaataacctgggagccgtgtcgctgctgctgttgttgttcggatacgctacattttcatggatgtacttgctggcagggctgttccatgaaacaggtatggcgtttattacgtatgtatgcgttaaccttttttttggcataaactcgatagtctcgctatccgtggtgtacttcttgtctaaagaaaagcctaacgatccaacgctggaacttattagtgagaccctgaagagaatattcttgatcttccctcagttttgcttcggatatggattgattgaactaagccagcagcagtcggtcctcgactttctcaaggcatatggagtggagtatcctaatgagacctttgaaatgaacaagctcggtgcaatgttcgtggcactggtcagccagggaactatgttcttctctcttcggctgctgatcaacgagagcctgataaagaaacttcgactgttctttcggaagttcaacagtagccacgtacgggagaccatcgatgaagatgaggacgtcagagcggaaagattgcgagtagaaagtggggcggctgagttcgacttggtccagctttattgcctcacaaagacctaccagttaatccacaagaaaatcattgctgtgaacaacattagcatcggaattcctgcaggggaatgcttcgggctgctaggtgtcaacggtgcagggaagactaccattttcaaaatgttgaccggcgacatcatcccgagcagcgggaatatcctgatccggaataagaccggtagcctggggcacgtagacagccattcctctctggttggctactgccctcaggaggacgctttggatgacctcgtgacagtcgaggaacacctatatttctatgctagagttcatggcatcccagagaaggacatcaaggaaactgtgcataaactgctgaggcgcctgcatttaatgcccttcaaagatcgcgcaacgagtatgtgcagctacggcactaaaagaaagttgtcgaccgccctggctctgatcggaaagccatctatcttacttttggatgagccatcaagcggtatggacccaaagtcaaaaaggcacctgtggaagattatttctgaagaagtgcaaaacaaatgctctgtgattctcacatcacattcgatggaagaatgtgaggccctttgtactagacttgcaattatggtgaatggcaagttccagtgcataggctccctacaacatattaagagccgcttcgggaggggctttacagtgaaggttcaccttaagaataataaggtcactatggaaaccctgaccaagtttatgcaactgcacttccccaagacctatctcaaggatcaacacctgtctatgctggagtaccatgttccagtcacagctggaggtgtcgcaaatatttttgatcttctggaaacaaacaaaactgctttgaacatcacaaactttctagtcagtcaaacaaccctcgaggaagtcttcatcaattttgctaaggatcagaaatcttatgagactgcagatacttcctcccagggatctacaatttcagtggactcccaggacgaccagatggaaagctag

SEQ ID NO: 179947 - DNA, 15177 bp, synthetic construct
  misc_feature 1..15177: note = Description of Artificial Sequence: Synthetic coding sequence
  source 1..15177: mol_type = other DNA
atgggccacgccggctgccagttcaaggccctgctgtggaagaactggttgtgccgcctaaggaaccccgttctttttttggccgagttcttctggccatgtattctgttcgtcattctaactgtcttacggtttcaggagcccccgagataccgggatatctgctatctccagcctagagatctgccaagctgcggtgtcataccctttgtgcagtctttactctgcaatactggttctagatgtcgcaacttctcttatgagggatctatggaacatcattttagactttcccgtttccaaaccgctgccgacccaaagaaggtcaataatctcgcctttctcaaggagatccaagatctagcggaggaaattcacggcatgatggacaaggctaagaatctgaaaagactgtgggtcgagcgctccaacacccctgacagcagctatggcagctctttcttcaccatggacctgaataaaaccgaagaggtgattctgaaactcgaatctctccatcaacagccacatatttgggactttttgttgctacttccgaggctgcatacaagccatgaccacgtggaagatggcatggatgtcgccgtgaatttgctgcagacgatcctgaactctctcatttcgttggaagacctagattggcttcctttgaaccagacgttttcccaggtctccgagctggtgttaaatgtgaccatctcgaccttgactttcctgcaacaacatggcgttgcggtgacggagccagtttaccaccttagcatgcagaacatcgtctgggatcctcagaaggtccagtacgatctgaagtcccagttcgggttcgatgatcttcacaccgagcagatactgaattcttccgccgagttgaaggaaatcccgaccgatacctctttagagaagatggtgtgctccgtcctctcatctaccagcgaagacgaagccgaaaagtggggtcatgtcgggggatgccatcctaaatggagtgaggccaaaaactaccttgtgcacgcagtcagttggctccgggtttaccagcaggtctttgtgcagtggcaacagggctcactccttcagaaaactctgacaggtatggggcactctcttgaggcactccgcaaccagttcgaggaagagtccaaaccttggaaggtggtggaggctctgcacaccgctctgctgctactgaacgacagtttgagcgccgacggaccaaaggataaccacacctttcccaagattctgcaacatctctggaaattgcagtctcttctccagaacctccctcaatggccggcactgaaaaggtttctgcagttggacggagccctgcgcaacgctatcgcccaaaacctgcactttgtacaggaagtcctcatttgtctcgagactagtgcaaacgacttcaaatggttcgaattgaatcagctcaagctggagaaggatgtcttcttctgggagctgaaacaaatgctagcaaaaaacgcagtgtgccccaacggccgatttagcgagaaagaagtcttcctcccgcctggaaacagctccatctggggcggactacaagggctgctgtgctattgtaattcttcggagacttctgtgctgaataagttactcggctccgttgaagacgccgacaggatcctgcaggaagttatcacctggcacaaaaatatgtccgtgctaatccctgaggagtatctggactggcaagagctggaaatgcagctgagtgaggcctcgctgagctgtacacgcttattcctattgctgggagccgacccaagcccagagaacgatgtcttttcctcagactgtaaacaccagctcgtgtcaaccgttatattccacacccttgaaaagacacaatttttcctggagcaggcttactactggaaggcctttaagaaattcatccggaagacctgcgaggtcgcacagtacgtcaacatgcaggagagcttccagaataggctcttagccttccccgaagaatccccctgttttgaagaaaacatggattggaagatgatctctgacaattactttcagttccttaacaacttattaaagtcaccaacggcctcaattagcagggctcttaatttcacaaaacacctgcttatgatggaaaaaaaactccacacccttgaggatgagcagatgaactttctgctttcctttgttgagttcttcgaaaagctgctcctacctaacctctttgactcttccatcgttccaagctttcattccttgccatccctaaccgaggatatcttgaacatcagcagcctgtggacaaatcacctgaaatctcttaaacgcgatcccagcgccaccgatgcccagaaactgcttgagttcggcaacgaagtgatttggaagatgcagacattagggtcccactggatcaggaaggaacctaagaacttactgcggttcatagagctgatactgtttgaaattaatcctaaactgcttgagctgtgggcctacgggatttctaagggaaaaagagccaaactcgaaaacttcttcactcttctaaattttagtgtgccagagaacgagatcctgagtacaagcttcaactttagccagctcttccactcagactggccaaaaagtccggccatgaatatcgacttcgtgcgacttagtgaggccattattaccagcttacatgaatttgggttcctcgaacaggagcagatttctgaggctctgaacaccgtgtacgcaattcgaaacgcttcagacctgttctctgcgctctcggagcctcagaagcaggaggtggacaaaatcttgacccacattcacttgaacgttttccaagataaagactccgcactcctcctgcaaatttattcgagcttttataggtacatttacgaactgttgaatatccagtccaggggcagtagtctgacatttctgacgcagatttcaaagcacatcctggacataataaagcaattcaattttcaaaatatctcaaaggcttttgccttcctgttcaaaaccgctgaagtcctgggggggatcagcaacgtatcatactgtcagcagctgctaagcatctttaacttcctagaactgcaagctcagagtttcatgagcactgaaggccaagagctcgaggtaatccataccaccctgactgggctcaagcagctcttgatcatcgatgaggactttagaatctctctgtttcagtacatgtcacaatttttcaactctagcgtggaagatctccttgacaataaatgtcttatcagcgacaacaagcacatcagtagcgtgaattattcaacaagcgaggaatcttcctttgtttttccattggctcagatctttagcaatcttagcgccaatgtttccgtgttcaacaagtttatgtcaatccactgcactgtctcctggttacaaatgtggaccgaaatctgggagaccatctcccaattgtttaaattcgacatgaatgttttcacttccctgcaccatggctttacacaactgctggacgagctcgaagacgacgttaaggtaagcaaaagttgccagggaattcttcccactcataatgtagctagactcatcttaaatttgtttaaaaacgttactcaggccaacgattttcacaactgggaggattttcttgatctgcgagattttctggttgccttgggtaacgcgctggtttcagttaagaaactgaacctggaacaggtcgaaaagagcctgtttaccatggaggccgcgctgcatcagctgaaaaccttcccttttaacgagtctacctctagggaattcttgaatagcctgctggaggtcttcatcgagttcagtagcacatccgaatacatagtccggaatcttgactcaattaacgatttcctcagcaacaatctaactaactatggtgaaaagtttgaaaacattataacagagttgcgcgaagcaatcgtttttctccgcaatgtgtcacatgacagagatcttttttcgtgtgctgatatctttcagaatgtcacggagtgtatcctagaagacggatttctgtatgttaatacgagccagaggatgttgcgcatactggatacactcaattctacctttagctcagaaaacacaatcagctctttgaagggatgcattgtgtggcttgatgtgattaatcacctatatcttctgtcaaactcttctttctcccaagggcacctccagaacattctgggaaattttcgcgacatcgagaataaaatgaactctattctcaagatcgtaacatgggtgcttaacataaagaaacccctctgctcatcgaacggttctcatattaattgcgtgaatatttatctcaaagatgtgactgacttcctgaatatcgttttgactactgtcttcgaaaaggagaagaagccaaagtttgagatcctccttgctctgcttaacgactccaccaagcaggtccggatgtctatcaataacctgactacagacttcgactttgcgtctcagtccaactggcggtactttacagagctgatattacgacctatcgagatgtctgatgagattcctaatcaatttcagaacatttggttacatctgataacactggggaaggaatttcagaaactagtaaagggcatttactttaatattctcgagaacaattccagctcgaagacggaaaatctactgaatatcttcgctacgtcccctaaggaaaaagacgtcaattcggtcggaaacagcatctatcacctcgcatcctacctggcattttccctgtcacacgatctgcaaaatagtccaaaaatcatcatctctcccgagattatgaaagccactggccttggaattcagctcatccgggacgtgtttaactctttgatgccagtggtccaccacacgtccccacagaacgctggctacatgcaagcactcaagaaagtgacatctgttatgagaactctgaagaaagcagatatcgacctgcttgtggatcagcttgaacaagtctccgtcaacctcatggacttctttaagaacatcagcagcgtcggcacgggtaatctggtggtcaaccttctcgtgggccttatggaaaagttcgcggactcctctcattcttggaacgtgaatcaccttctgcagcttagccgtctcttccctaaagacgtcgtggatgctgtgatcgacgtgtactacgtactcccccacgccgttagattactgcagggggttcctggcaaaaatatcacggagggtctgaaagatgtgtatagtttcaccctgttgcacggtatcacaatcagtaacatcaccaaagaagacttcgctatagttataaagatcctgcttgacactattgagttagtgtctgacaaaccggacattatttctgaggcactcgcttgtttccctgtcgtgtggtgctggaaccatactaatagcggatttagacaaaactctaagatagacccgtgtaatgtccatggactgatgtcttcgtcattttatggaaaggtggcatcaatcttagaccacttccacttgtccccccagggtgaggattctccctgttcaaatgagtccagtcgcatggagatcactaggaaagtcgtgtgtatcattcatgagttggtagactggaacagcatcctcttagagctctcagaagtgtttcacgtgaacatctcgttggttaaaaccgtgcagaagttttggcacaaaattctcccatttgtaccgccctctattaaccagaccagagactctatttccgagctctgcccgtccggtagcatcaaacaggttgctctgcaaataatcgagaaactaaagaatgtgaacttcacgaaagtcacaagtggtgagaatatcctcgataaacttagctccttgaacaaaattctgaatattaatgaagataccgagaccagtgtgcaaaatatcatttctagcaacctcgaacggaccgtccaattaatctccgaagactggagtctggagaaatccactcataacctgctgtctctctttatgatgctgcaaaatgcgaacgtgactgggagcagtctggaagcactatctagcttcatcgagaagtctgaaaccccctacaacttcgaagagctttggcccaagtttcaacagataatgaaggatctcactcaggacttccgcattcgacatctgctgtcagagatgaataagggcattaagtccatcaactccatggccttacaaaaaattacgttgcagttcgcccactttctcgaaattttggacagcccctccctgaagaccctcgaaatcatcgaggactttctgcttgtcacaaaaaactggcttcaggagtatgccaatgaggactattcccgcatgatcgagactttgtttatccccgtgacaaacgaatcttccacagaggatattgccctattagctaaagccatcgctaccttctggggctctctgaagaatatatcccgtgcaggaaactttgatgtagctttcctgactcacctgctgaaccaagaacagttgaccaacttctctgtggtccagctgctcttcgagaatatcctgattaacttaataaacaatctggcgggtaattcacaagaggccgcatggaatctgaacgacaccgatctgcagatcatgaattttatcaatctcattctaaaccacatgcaatctgagaccagccggaaaaccgtcctaagcctgcgaagtatcgtggatttcactgaacagttcctgaaaacgttcttcagtttgtttctgaaggaagactcggagaataagatctccctgctgcttaaatactttcacaaggacgtcatagccgagatgagcttcgtgcctaaggacaaaatcttggaaatcctgaagctggatcagtttctcacactcatgattcaggataggctgatgaacatcttctcttctttgaaggagactatttaccatctaatgaaatcttcctttattctggacaacggggaattttattttgacacccatcaggggctgaagttcatgcaggatctctttaatgccctgttgcgcgaaacctcaatgaagaacaagactgagaacaatatcgatttttttaccgttgtgtcacagctgtttttccacgtgaacaagagcgaagatcttttcaagttgaaccaggatctggggagcgcgcttcacctggttcgcgagtgttctaccgagatggcgagactgctcgatacaatattgcacagccccaataaagacttctatgcactgtaccctactctgcaggaggttattctggccaacttaacagacctcttgttcttcataaataattcgtttccccttaggaatagagcgaccctggagatcaccaagcgactggtgggggcaattagccgtgcctccgaggagtctcacgtcctgaagcctttgttggagatgagtgggacactggttatgctcttaaacgatagtgctgatctacgggatttagccacatcaatggattccatagtgaaattactaaagctggtcaaaaaagtcagcggcaagatgagtactgtgtttaagacacacttcattagtaacacaaaagatagcgttaaattcttcgatacactatacagcatcatgcagcagtctgtacaaaacttagtaaaagagatcgctactctcaagaagattgatcactttacttttgagaaaattaatgatctactagtcccatttctggatttagcttttgagatgatcggcgtcgaaccttacatcagtagtaacagcgacatcttcagtatgtcaccctcgattctgagttatatgaatcagtccaaagacttctcagatatcctggaggagatcgcagagtttcttacatcggtcaaaatgaaccttgaggacatgaggagcctcgctgtggcttttaacaatgagacgcagaccttctctatggatagtgtgaatttgagagaagagattctcgggtgcctggtacccattaacaacataacaaaccaaatggactttctgtacccgaacccaataagcacccacagcgggccacaggacataaagtgggagatcatccacgaggttatccccttccttgataaaatcttgagccaaaactcgacggaaatcggctccttcttgaagatggtaatatgcctcacattagaggcgctctggaaaaatctcaagaaggataactggaatgtgtccaatgtgctcatgacctttacacagcatccaaacaacttactgaaaacgatcgaaacagtcttggaagcctccagcggtatcaagtctgactatgaaggcgacctcaacaaaagcctgtactttgacactccactctcccaaaatattacacaccaccagttggagaaagcgatccataacgtgctcagccggattgctttgtggagaaaaggcttgctgtttaataattcggaatggatcacctcaacccgcactctgttccagcctctctttgagatattcatcaaagccaccacaggaaagaatgtgacctcagaaaaagaggagcgcaccaagaaagaaatgatagactttccgtacagctttaagccattcttctgcctcgaaaaatatctgggggggctctttgtgctgaccaaatactggcaacaaatccccctgaccgaccagagcgtggtcgagatttgcgaggtcttccagcagactgtgaagccatctgaggcaatggaaatgttgcagaaggttaaaatgatggtggtccgcgtgctgacaattgtggctgagaatccatcatggacgaaggatatcctgtgtgctacattgtcttgtaaacagaatgggatcaggcacctgatcctctccgcaattcagggagtgacattagcacaggatcatttccaggaaatcgagaaaatctggtcaagtcctaatcagttaaattgtgagtctttgtcaaaaaacttaagtagcactcttgagtctttcaagtcctctttggagaacgccacagggcaggactgtaccagccagccccgcctggaaacagtgcagcagcacctctatatgttggctaagagcctggaagaaacctggagctccgggaatcccattatgacatttttgtctaattttacggtcacggaggatgtcaaaattaaggaccttatgaaaaacattaccaagttgaccgaggagctgaggagctccatacagataagtaacgagactatacactctattctggaagcaaatatcagtcactcaaaggtgttattcagcgcattgacagtcgcgctatctggaaaatgtgaccaggaaattctccatctgctgttaacgttccccaaaggagagaagtcttggattgctgctgaggagctttgctcattaccgggctctaaagtgtatagcctcatcgtccttttgtctcggaacttggatgtgcgcgcattcatctacaagaccttgatgccctcagaggcaaatgggctgctcaattcgttgctcgacatagtctctagcctgagcgctctgctggctaaggctcagcacgtttttgagtacttacctgagtttctccatacatttaaaatcaccgctctgctggagaccctggacttccagcaggtctcccaaaacgtgcaggcacgttcgtcagcttttggctcttttcaatttgtaatgaagatggtatgtaaggaccaggcttcctttctctccgactctaacatgtttataaatttgccaagggtgaaggaacttctcgaagacgataaggaaaaatttaacatccctgaagactctacccctttttgtctgaaactttatcaggagatcttgcaactcccaaatggagctctggtgtggacatttctcaagccaattttacacggaaagatcctgtatacccccaacacgcccgaaatcaacaaggtaatccagaaagccaactatactttctacattgttgacaaattgaagactctctctgagacgttattggagatgtcctcactgtttcagagaagcggctcgggccagatgttcaaccagctccaggaggccctgagaaataaatttgtgagaaatttcgtcgagaaccaactgcacatagatgtggacaagctgactgagaaactgcagacctacggaggtcttctcgacgagatgttcaaccacgctggcgcgggccgcttcaggtttctcggcagcatcctcgtcaatctgtcaagttgtgtggcactgaaccgctttcaagcactgcagtctgtcgacatcctggagactaaagctcacgagctgctacagcagaactcttttctggcatccattatattttctaactccttgtttgataaaaactttcgtagcgaatctgttaagttgccgcctcatgtatcctatacaattaggaccaacgtgctctattcagttcgaactgatgtggtgaagaacccgtcttggaagttccacccacagaatctgccagcagatggcttcaaatacaactacgtgtttgcacctctgcaggacatgatcgaacgggcaatcattctagtgcaaacaggacaagaggcactggaacctgcagcccagacccaagccgctccatatccctgccacacatcagaccttttccttaacaacgtggggtttttttttccactgattatgatgcttacgtggatggttagtgttgcaagcatggtcagaaaacttgtttatgaacaggagatccaaatcgaggagtacatgagaatgatgggggtccaccccgtgattcactttttggcctggtttcttgagaatatggcagttctcactatatcaagtgccactctcgctattgtcctgaaaacgtccggcatcttcgctcacagtaacacctttatcgtcttcttatttttattagactttggcatgtcagtggtgatgttgagctatctgctgagcgcctttttctcccaggccaatactgcagctctctgcacctccttagtgtacatgatcagcttcctgccatacatcgtgctcctcgtcttgcataatcagctgtccttcgtgaatcagaccttcctgtgcctgttatccactactgcattcggccagggcgtgtttttcatcacattcctggagggacaagagaccggtatccagtggaacaacatgtatcaagccctggaacaaggcggcatgacattcgggtgggtttgctggatgatcctctttgactcaagtctgtactttctatgcggctggtatctgtccaacctaatacctggcacctttggcttgaggaaaccatggtactttccttttactgcaagttactggaaatctgttgggttcctggtggaaaaaaggcaatactttctcagcagctccctgttctttttcaacgagaacttcgacaataaaggaagctccctgcaaaatagggagggagaactggagggttccgcacccggcgtcacactggtgagcgtcaccaaagagtatgagggccacaaggccgttgtgcaagacctatccctgacattttatcgagaccagattaccgcattgctgggaacgaatggcgcaggcaagactacgattattagcatgctgaccggattgcaccccccaaccagtggtactattatcatcaacggaaaaaacctccagacagacctgtcgcgcgtgcgcatggaactaggagtatgtccccagcaggacattttacttgacaatctgactgtgagagaacaccttttattgtttgcctccattaaagctcctcagtggacaaagaaggagctccaccagcaggtgaaccagaccctgcaggatgtggacctgacccaacaccagcacaaacagacccgcgccctgtccggtggactgaagcgtaagctgagcctgggtatcgcctttatgggtatgtcgagaacagtggtattggatgagccaacctcgggcgtcgacccttgttcaaggcacagcctgtgggacatattgctaaaataccgagagggccgtactattattttcaccacccatcatctcgacgaggctgaggccctctctgatagagtagcagtgttacagcacggcaggctacgctgttgtgggcccccattctgtctcaaggaggcttatgggcaggggctgcggctgaccctcactcgtcagccctccgttctggaggcccacgacttgaaggacatggcctgcgttaccagcctgatcaagatttatatcccgcaggcttttctgaaggacagcagcggttctgagctcacctataccatcccaaaggacacagacaaggcctgtctcaagggattattccaggctctagacgaaaacctgcaccaactgcatctcactgggtatgggatatcagacacgacattggaggaagtgttcttgatgctgctgcaggatagcaataagaaatcccacatcgccctgggtaccgaatctgagctgcagaaccacaggcccacaggacacctatcaggctattgtggcagtttggcgcgacccgcgacagtccagggagtgcagttactcagggcccaggtggctgcaatacttgctagacggcttagacgaacacttagagcgggcaaaagtacactagctgacctcttactccctgtgttatttgttgccctggctatgggcctcttcatggtcaggcctcttgccacagaatacccacccctccggcttacccccgggcactaccagagagcggaaacttacttcttttccagcggcggtgacaatctagatttgacgcgggtactgctccgcaagttccgtgaccaggatctgccttgtgccgacctgaaccctcgacagaaaaattcttcctgttggcggacggacccattttctcacccagagtttcaggacagttgcggttgcctaaagtgtcccaataggtcagctagcgctccatatttgaccaatcatctcggccacaccctgctcaacctttcagggttcaacatggaggagtacctcctcgctcctagcgaaaagcctcgtctcggaggctggtcctttgggcttaagattccttctgaggccggcggggcaaatggaaacatatcaaaacccccaacactggcaaaagtttggtataatcagaagggatttcattccctgcctagttatttaaatcatttgaacaaccttatcctgtggcagcatcttcccccaaccgtcgattggcggcagtatggcataacactgtacagtcacccatacgggggagctttgctgaacaaggataagatattagaaagcatacgacagtgcggcgtggctctgtgcatagtattgggtttcagcattctgagtgcaagcattgggagcagtgtagtgcgagatcgggtgatcggggcaaagcggctccaacatattagtgggttgggttacagaatgtattggtttaccaacttcttatacgacatgcttttctacctcgtgtctgtgtgtctatgtgtggctgttattgtcgcttttcagctgacggcttttacatttcgaaagaatttggctgccacagctctgctgttgtctctgttcggctatgccacgttgccatggatgtatcttatgtcgaggattttcagcagctcagacgtagcctttatttcttacgtgagcctaaattttatttttggcctgtgcacaatgttgatcactattatgccacgactgctggccataatcagcaaagcaaaaaacttacaaaacatctacgacgtgctgaagtgggtgttcacgatctttccacagttttgtttgggccagggcctggtggaattatgctataatcagatcaagtatgacctgacccacaacttcggcatcgacagctatgtcagcccattcgagatgaatttccttgggtggatctttgttcaactcgcctcacagggcacagtcctgctgcttcttcgcgtcctattgcactgggatttgctgaggtggccacgcggacattcaacactgcagggcactgtgaagtcttctaaggacacagatgtggaaaaggaggagaagcgggtgttcgagggacgaaccaatggcgatattctggttctttataatctttcaaagcactacaggcgattttttcagaatataatcgcggtgcaggatattagtctgggcattcctaaaggggagtgctttgggctcctaggggtgaatggcgccggcaaatctactacttttaagatgctaaacggagaggtgtccctgaccagcggccatgccatcattaggacgcctatgggcgacgcggtggatttgagtagtgccggcactgcaggagtattgataggctactgcccacagcaggacgcactggacgagcttctgacgggctgggaacacctctattactactgctcacttcgggggatccctagacaatgtatccctgaagtggctggcgaccttatacgtcgactgcatctcgaggcacatgcagataaacctgttgcgacctactccggcgggaccaaacgcaagctgtccacagctctcgcactggtaggcaaaccggatattctgttgctggacgagcccagtagcggcatggacccttgttctaaacggtacctgtggcagactatcatgaaagaagtcagggagggatgtgcggccgtgcttacctcccatagcatggaagagtgtgaggcgttgtgtacccggctcgctattatggtgaatgggtcgtttaagtgcctcggtagtcctcaacacataaaaaatcgcttcggggatggctacacggtgaaggtgtggctttgcaaggaagcaaaccagcactgtaccgtctctgatcacctgaagctctacttcccaggaattcaattcaaggggcaacatctgaacctgctggaataccacgtgcccaaacgttggggttgtttagctgacttgttcaaggtcatcgagaataacaagacatttttgaacatcaagcactattctattaaccagacaacactggaacaggttttcattaacttcgcctccgaacagcagcagaccctgcagtctaccctcgatccatccacggactcccatcacacgcatcaccttccaatatag

SEQ ID NO: 179948 - DNA, 2367 bp, synthetic construct
  misc_feature 1..2367: note = Description of Artificial Sequence: Synthetic coding sequence
  source 1..2367: mol_type = other DNA
atgggcctgttcatggtgcggcccctggccaccgagtacccccccctgcggctgacacccggtcactatcagagagccgagacatatttcttccggaagaattcaagttgctggcgcactgatcctttctctcaccctgagttccaggatagttgcggctgcctgaaatgtcccaaccgatcggcctcagctccatacctcaccaatcacctaggccataccttgttgaacctgtccggcttcaacatggaggaatatctcctggcccccagtgagaagccccgactcgggggatggagtttcgggctaaagatcccttccgaggctggcggtgctaatggaaatatcagtaaacctccaaccctagcgaaagtgtggtataatcagaaggggttccattctctgccttcttatttaaatcatctcaataacctgatcctctggcagcacctcccccctaccgtcgactggcgccaatatggcattacattgtacagtcatccttacgggggagcgttattaaacaaggataaaattttggagtctattcgacagtgtggagttgctctgtgtattgtgttgggatttagcatcttatccgcctcaattggttccagtgtcgttagagacagagtgattggagccaagaggctgcagcacatttctggactggggtacaggatgtactggtttacaaatttcctctatgatatgctgttttacctggtgtcagtgtgcctgtgcgtcgcagtcattgtagcattccagctcaccgctttcacctttcggaaaaacctcgccgccacagccttgctcctttctcttttcggctacgcaaccctgccatggatgtaccttatgagccgcatctttagttcctccgacgtcgcctttatatcctacgtgagtttaaatttcatatttggcctgtgtacaatgttaataaccatcatgcctcgtctactggccataatttctaaagcaaagaaccttcagaacatttacgatgtcttaaaatgggtatttactatcttccctcaattttgcctgggtcagggcctggtggagctctgttataaccagataaagtacgatttaacacataactttgggatagattcgtacgtgtccccatttgaaatgaactttctgggatggatcttcgtccagctcgcctcacagggtacagtcttgctgctgctgcgtgttctcctccattgggacctgctccgatggcccagagggcatagtactctgcagggaactgtcaagagcagtaaagataccgacgtggagaaggaggagaaacgggtgtttgaggggaggacaaatggggatatcctggtgctgtacaatctgtcaaaacactaccgaaggttctttcaaaacatcattgcggttcaggacatctcactcggcatccccaagggtgaatgttttggacttctcggagtgaatggcgctgggaaatctacaacatttaagatgcttaacggtgaagtatcactaacatctggacacgccatcattaggacccccatgggtgacgccgttgacctgtcctctgcaggcaccgctggagttctgattggatattgcccacaacaggacgctttagatgagttgctgacagggtgggaacatctgtactactactgctctttaagaggaatcccccgacaatgtatacctgaagtggcgggagacttgattcgccggttgcatttggaagcacatgccgacaaaccggtcgcgacctactccgggggaacaaaaaggaagttatccacagccctggctctagtgggaaagccagacattctgctcctggacgaaccttcctcagggatggacccctgttcaaagcggtacttgtggcagaccatcatgaaggaggtgcgcgaaggttgtgccgctgtgctaacttctcactccatggaggaatgtgaagcattgtgtacccgccttgcgattatggtgaacggttctttcaagtgcttaggctcaccccagcacatcaagaacaggttcggcgacggatacacagttaaggtgtggctatgcaaagaggccaatcagcactgtacggtatccgatcacttgaagctctacttcccagggatacagttcaagggccaacacctgaatctgctggagtatcatgtgccgaagcgctggggctgccttgctgatctgtttaaagtaatcgaaaacaataagacattccttaacatcaagcattactccataaatcagaccaccctcgagcaggtgttcattaactttgcaagcgagcaacagcaaactttgcagagtacactggaccctagcacagactcacatcatacgcatcacctcccgatctag

SEQ ID NO: 179949 - DNA, 7311 bp, synthetic construct
  misc_feature 1..7311: note = Description of Artificial Sequence: Synthetic coding sequence
  source 1..7311: mol_type = other DNA
atgggcttcctgcaccagctgcagctgctgctgtggaagaacgtgactttgaaacggaggtcaccttgggtgctggcctttgagatttttattcccttggtgctgtttttcatcctgctgggcctgaggcagaagaaacccaccattagcgtaaaggaagtcgccttctatacagcagcccccctgacctccgcagggatacttccggtaatgcaaagtctgtgcccggacggccagcgggatgagtttgggttcctgcagtacgccaacagcacagttacccagttgctggagaggctcgatagagttgtggaggaagggaacctatttgatcccgcaaggccttccctgggctccgagttggaagctctgagacagcacctcgaagccctatccgccggtcccggcacgtcaggaagtcatttggacaggtctaccgtgtcctccttttccctggatagcgtagctaggaacccccaggagctgtggagattcttgacccagaatctcagccttccaaactcgacggcccaggccctgctggccgccagagtggatcccccagaggtataccacctgcttttcgggcctagctctgcactagatagccagtctggactgcataagggccaagagccttggtcacggcttgggggcaaccctctgtttcgtatggaagaactgctgctcgcccccgccttacttgaacagttaacgtgtacacccggctccggagagcttggcaggatactcaccgtccccgaatcccagaagggcgcgctgcagggatatcgggatgccgtgtgttctgggcaggctgctgcacgcgcccggaggtttagcggccttagcgcagagctccggaatcagctggatgtggctaaagtctctcaacaactggggctggatgcccctaatggctccgactctagccctcaggccccgcctccaagacgtttgcaggccctacttggcgacctcttggatgcgcagaaggttttgcaggatgtagatgttctgagcgcattggctctgctgctgcctcagggagcatgtactggacggacacctggtccccctgcctctggggccggtggcgccgccaacggcactggcgctggcgccgtcatgggccctaacgcgactgcggaagagggggccccgtctgctgccgcactggctaccccagacacccttcagggccagtgctcagcgttcgtgcaattgtgggcagggctacagccaatcctctgtggaaataataggaccatagagcccgaagctcttagaagggggaacatgagcagtctgggctttactagcaaagagcagaggaatctaggattgctcgtgcacctgatgaccagcaacccgaagatactgtatgcacccgccggctccgaggttgaccgggtcatactgaaggcaaatgaaacatttgcctttgtggggaacgtgacgcattacgctcaggtttggttaaatatttctgcagagattcgctctttcttggaacagggccgtttgcagcagcatcttagatggcttcagcagtacgtcgccgagctgcgtctgcatcctgaagcactaaatctcagcttagacgaattgccccctgctctgcgccaggacaatttttccctcccctccggaatggcactgttacagcagctggacactatagataatgcggcgtgtgggtggatacagtttatgagtaaggtttctgttgatatattcaagggctttcacgatgaggagtctattgtcaactatacattgaaccaggcctatcaagacaacgtcacggttttcgcttccgtcatcttccagactcgcaaagatgggtcgttgcccccacacgtgcattacaaaatccgtcagaactcatccttcacggaaaagactaacgaaataaggagggcctactggaggcctggtcccaacactggaggacggttctactttctgtatgggtttgtgtggattcaggacatgatggaaagggctatcattgatacatttgtaggtcacgacgtggtagagccaggatcctatgtccagatgtttccctatccctgctacacgcgtgatgattttcttttcgtaatcgagcatatgatgccgctgtgcatggtcatatcttgggtgtacagcgtggcgatgaccattcagcatattgtcgctgagaaggaacaccgactaaaagaagtgatgaaaactatggggttaaacaacgctgtgcattgggtggcgtggtttatcaccgggtttgtacagctcagtattagtgttaccgccctgaccgccatcctcaagtatggacaggtgctgatgcattcccacgtcgtaataatttggctgttccttgccgtgtatgcagtagctactattatgttctgctttctagtctctgttctctactctaaggccaaactagccagcgcatgtggaggcattatttactttctctcatatgttccatacatgtacgtagccatcagggaggaggtggcccatgacaagattactgcctttgagaaatgcatcgctagtctgatgtcaacgactgccttcgggctgggctctaaatacttcgctctatacgaggtggctggtgtgggcatccagtggcacaccttctcccagtcacccgtagaaggcgacgactttaatttgttgctggcagtgacaatgttgatggtcgatgctgtggtttatgggattctaacctggtatatcgaggccgtccaccctggcatgtacgggctgcctcgcccatggtacttcccgcttcagaaaagctactggttaggatctgggagaaccgaagcctgggaatggtcttggccttgggcaaggacgcccaggctgagcgtaatggaggaggaccaagcgtgtgcaatggagagcaggaggttcgaagagactcgaggtatggaggaagagccaacgcatcttcccctcgtggtttgtgtcgataaactgactaaagtttacaaggatgacaaaaagctggctctcaacaagctctccttgaacctttatgagaatcaagtggtaagtttcttaggccacaacggcgccggtaagactactacaatgtcaatcctaacaggtctctttcctcccacatcaggttccgccacaatatatgggcatgatatccggacggaaatggatgagatcaggaagaatctggggatgtgccctcagcacaatgttctgtttgatcgcctaacagtggaagaacatttgtggttctactcccggttgaagtctatggcccaggaggagatccgccgcgagatggacaagatgatcgaagatctggagctgtctaataagcgccacagcctggtgcagacactgagtgggggcatgaaaagaaaattatcggtggccatcgcttttgtcggaggcagccgcgctatcatactcgatgaacccaccgcgggcgtcgacccttacgccaggcgcgcaatctgggacttaatactcaagtataagcctgggagaaccattctgttatcaactcatcatatggatgaggccgacctgctcggcgaccggatcgccatcatttcccatggcaaactaaagtgttgtgggtctccactgtttctaaagggtacatatggggatggctacagactgaccttggtcaagcgacccgccgaacccggagggccacaggagccaggcctggcatccagtccgccaggtcgagctccactttccagttgttccgagctgcaagtctctcagttcattcggaaacatgtggcaagctgtctgctcgtttccgataccagcaccgagctcagctacatcctgccaagcgaggccgcaaaaaaaggagcatttgaaaggctgttccagcatttggaacgctccttggacgccttacacctgtccagctttggtctgatggataccacactggaggaggttttccttaaggtctccgaagaggatcaatccctggagaattcagaggccgacgtgaaagaatctcgcaaagacgtgttgcccggtgccgagggccccgcttccggagaagggcatgctggaaatttagctcggtgctccgagctgactcagagtcaagccagcctgcagagcgcgagttcggtgggatcagctagaggcgatgagggcgcagggtacactgacgtgtatggggactatagaccactgtttgacaatcctcaagacccagacaatgtatcactgcaggaagtggaggcagaggcattatcacgggttggacaggggagcaggaaattggacggtggatggctaaaggtcagacaatttcatggcctcctggttaagaggtttcattgcgctcgcaggaattcaaaggccctgttttcccaaatcctgctaccagccttctttgtgtgtgtggccatgacagtagcactttccgtccctgaaattggggacctgcctcctctggtgctcagcccgtctcaatatcacaattatactcaacctcgtggcaattttataccctacgccaatgaggaacgacgggaatataggttgaggttaagccccgatgcttctccccagcagctggtgtcgacattcagactgccatccggagtaggggccacctgcgttctgaaaagccctgcgaatggttccctggggccaaccttgaacttgtcctctggagagtcaagacttctcgcggctcgcttttttgattccatgtgcttagaaagctttacacagggcctgcctttgagtaactttgtgcctccccctcctagtccagcacctagcgactcacccgcatccccagatgaagatctccaggcctggaacgtcagccttcctcctaccgcagggcccgaaatgtggacctccgcccctagcctgcccagattagtgcgcgagcctgttaggtgcacatgctccgctcagggcactggctttagctgccctagcagcgtcgggggccatccgccccagatgcgggtcgtgactggggatatcctgaccgacatcaccggacataacgtgagcgagtatttgcttttcacttctgatcgcttcagacttcaccggtatggagccatcaccttcggcaacgtgctaaagtctattccagcaagctttggcacgcgcgccccccccatggttcggaagattgccgtgaggagagcagcacaagtcttctataataataagggataccatagcatgcctacctacctaaattctctgaataatgctatcctcagagccaacctacctaagagcaaggggaaccctgccgcttatggaataacagtgacaaaccatcctatgaataaaacatccgcttctctgtcgctggactacctgctccagggaactgatgtcgttatcgctatctttataatagtggcaatgtcctttgtcccagcaagcttcgtggtattcctggtggcggaaaaaagtaccaaggccaagcatctgcagttcgtgagcggatgtaatccaattatctactggttagctaactacgtttgggacatgctgaactacttggtgcccgctacatgctgtgtgatcatcttatttgtgttcgacctacctgcgtatacatcacccacgaacttcccggccgtcctgtctctctttctcctgtacggatggagcatcacacccattatgtatcctgccagtttctggtttgaggtaccctctagcgcgtatgtgtttctgatcgtaattaatttatttattggaataacagccactgtcgcgacattcttactgcagctgttcgagcatgacaaagacctcaaggtggtgaacagttatctcaagagctgtttccttatttttccaaactacaacctgggccacggattgatggagatggcatataatgaatatattaacgaatactatgcaaagatcgggcaattcgacaaaatgaaaagtccttttgagtgggatatagtgacccgcggcctcgtggcgatggccgtggagggcgttgttggattcttattgactattatgtgtcagtacaattttctccggcgccctcagcggatgcccgtctcgactaaaccagtagaggatgatgtggatgtagcttctgaaagacaaagagtgctgagaggcgacgccgacaatgacatggtgaaaatagagaaccttactaaagtttacaagtcaagaaagattggtcggatcctggcggtggaccgcctttgcctgggtgtacgccctggtgaatgtttcggtctgttgggagttaatggtgccggcaagacatctacgttcaagatgctgacaggggacgagtctactactggcggggaggcatttgtaaacggccactctgttttaaaggagctgttgcaagtgcagcagtctttggggtactgcccccagtgcgatgccctttttgacgagctaacagctagagagcatctgcagctatacactcggctgagggggatctcatggaaggatgaggcccgagtggtgaaatgggccttggagaagctggaactgacaaagtacgctgacaagccagccggcacctacagcggtgggaataagagaaaattgagtactgcaattgcactgattggttacccggcatttatcttcctcgacgaaccaacaacaggaatggacccgaaagctcgacgtttcctctggaatctgatactggacttaatcaagaccggacggagcgtagtgctcacctcgcattctatggaggagtgtgaagctctatgcacccgcctggccatcatggttaatggtagactgcgctgtttgggaagcatacagcatctgaaaaacaggttcggagatgggtacatgattaccgtccgaaccaaatcctcccagagtgttaaagacgtggttaggtttttcaacagaaattttcctgaggcaatgctaaaagagaggcatcacacaaaagtgcaataccagctaaagagcgagcacatttcgctggcacaagtcttctctaagatggaacaggtatccggcgtgctgggtatcgaagactattcggtgagccagaccaccctagataacgtctttgtgaacttcgctaaaaaacagtcagacaacttggaacagcaggagaccgagcccccatccgccctgcagtcccctctaggctgtttactgtcactcctgcggccaaggagcgctcctacagagctccgggcacttgttgccgacgaacccgaggatctggacacagaagatgagggcctcatatcgttcgaagaagagcgagcccagctttcattcaacacagacacactgtgttag

SEQ ID NO: 179950 - DNA, 7311 bp, synthetic construct
  misc_feature 1..7311: note = Description of Artificial Sequence: Synthetic coding sequence
  source 1..7311: mol_type = other DNA
atgggcttcctgcaccagctgcagctgctgctgtggaagaacgtgacactcaagaggcggagtccttgggtccttgcctttgagatttttatcccgctggtactgttttttatcctgctggggctacgccagaagaagcccacaataagcgttaaggaagtaagtttctacaccgccgctccgctgacctctgcagggatactgcccgtgatgcagagcctgtgcccagacggccagcgagatgaatttgggttcctacagtatgccaactctacagtcactcaactgctggaaagactcgaccgcgttgtggaagaggggaacttatttgacccagctcggccttccctggggtcggagctggaggcactacgtcagcatcttgaagctctgagcgcgggaccagggacatctggcagtcatctagaccggagtactgttagctcctttagtctagatagtgtcgcgcgaaacccacaagagctgtggagattcttaacacagaacctgtcccttcccaattcaaccgcccaggctttgctcgccgcaagggttgatccacccgaagtttaccacctgctcttcgggcccagctccgctctcgactcgcagtccggacttcataagggtcaggagccatggtcgagattagggggcaaccctctattccggatggaggaactcctattagcccctgccctccttgagcaacttacttgcacaccaggctctggcgagctgggacggatacttacagtacctgagtcccagaagggggccctacaaggatacagagacgcagtttgcagcggtcaggcagcagcccgtgctaggcgattctctggcttaagcgccgagctaaggaatcaactcgacgttgcaaaggtcagtcagcaacttggtcttgatgccccaaacgggagtgactcttccccccaggcccctcctccccgacgactgcaagccttactgggggacctgctggatgcccaaaaagttctccaggacgtggacgtcctgtccgctcttgctctgctgctcccgcagggggcatgtaccgggcggacccctggcccacccgccagcggagccggtggggccgccaatggcacgggagccggtgcggtcatgggccccaacgccaccgccgaagaaggagccccttccgccgccgctctggcgacaccagatactctacagggacagtgttctgcttttgtccagttatgggcgggtctgcagcccatcctgtgtggcaacaaccgcactattgagcctgaagccttgagacgtggcaacatgtccagcctcggatttacctctaaggagcagcgtaatctcggactcctcgtccatcttatgacctctaacccaaaaattttgtacgcacctgccggctcagaagttgaccgcgtgatcctgaaggccaatgagaccttcgctttcgtagggaacgtcacacattatgcccaagtttggctgaacattagcgctgagattagatcctttttggaacagggaagacttcagcagcatctacgctggctgcagcagtatgttgctgagctccgcctgcatccggaggccctcaacctttctctggatgagctgccacctgccttgcgacaggacaactttagtctgccttcagggatggccttgctacaacagctcgacactatcgataatgccgcttgcggttggattcaattcatgagtaaggtgagcgtagacatcttcaagggatttcacgacgaggagtcaattgtgaattacacgctaaatcaggcctaccaggataacgtcaccgtcttcgcttccgttattttccagactagaaaggacggatcattacccccgcatgttcattacaagataaggcaaaactcttccttcaccgagaagactaatgagatccgcagggcctattggcgtcctggcccaaacactggaggtcgcttctactttctatacgggtttgtgtggatacaggacatgatggaaagagccatcatcgatacatttgtgggacacgacgtcgtcgagcccgggtcatacgtgcagatgtttccctatccatgttacactcgggatgatttcctgtttgtcatcgaacacatgatgcctctttgtatggtgatttcctgggtgtatagtgtcgcgatgacaatccagcatatcgtggccgaaaaagagcaccgcctgaaagaggtcatgaagactatgggactgaataatgcggtgcactgggtggcttggtttattaccggcttcgtccagttgagcatttctgtcacagctcttaccgcaatcctgaaatacgggcaagttctgatgcatagccatgttgtgataatctggctgttcttggctgtgtatgccgtggcgactatcatgttctgcttcctggtctccgtgctctatagcaaggccaaattggcctccgcctgcggaggtatcatttactttctctcttatgtaccttacatgtatgtggcaattcgagaggaggttgcccatgataagatcacagctttcgagaagtgcattgcaagtctcatgtctactaccgcttttggcttgggaagtaagtacttcgcactttacgaggtggctggcgtggggattcagtggcatactttctctcagagtcctgtcgaaggcgacgacttcaatctattgctggccgtgactatgctgatggtggatgctgtcgtgtacggtatacttacatggtacatcgaagccgtccatccgggtatgtacgggctgccccgtccatggtatttccccctgcagaaatcttattggctgggcagtgggcgtaccgaggcttgggaatggtcatggccatgggctcgcaccccccgcctgtcggtgatggaggaagaccaagcttgcgcgatggaatcaaggcggtttgaagagacacgtggcatggaggaggagcctactcaccttcccctcgtggtgtgcgtagacaagctgacaaaagtctataaagacgataaaaaactggcccttaataaactgtctcttaatctctatgagaaccaggtagtctcatttctgggccacaatggcgctggcaagaccaccaccatgagcatcttgaccggtctcttccctcccacatctggatccgccaccatttatggtcacgacattcgcaccgagatggacgaaattcgcaagaacttgggaatgtgtcctcagcacaacgtcctttttgaccgattgaccgtggaggagcacctgtggttctactcccggctgaagagcatggctcaagaggagatacgcagggagatggataaaatgattgaggatctcgaattatcaaacaaaaggcactcattggtgcaaacactgtcaggaggaatgaagaggaagctgtccgtggcgatagcgttcgtcggagggagcagggctattatcctggacgaaccaacagctggggtggacccctatgcccgacgcgctatctgggatctgattctgaagtacaagcccggcagaacaatattgctatcaacccaccacatggatgaggccgacctccttggcgatagaattgccatcatttctcatggaaagttgaagtgctgtggttctcctctatttctgaaaggcacatacggggatggatatcggctgacactcgtaaaacgtccagccgaacctgggggaccccaagaacccggtttagccagcagtccccccggtcgtgcacctctcagctcatgtagcgaattgcaagtttcccagttcattcggaagcacgtcgccagctgtcttcttgtatctgatacatctactgagttgtcatacatactcccatccgaggccgccaaaaagggtgctttcgagaggctttttcagcacctcgaacgaagtctcgacgctttacatctctcatccttcggtctcatggatacaactttggaagaagtctttcttaaagtctccgaagaagaccagtctctggaaaactcggaggcagatgttaaggagtcacggaaggacgtcctgcctggcgcagaaggaccggcatctggcgaggggcacgctggcaatctggcgcgttgctctgagctgacgcagagccaggcgtctttacagtccgcttcctctgtcggctctgctaggggtgatgagggggctggatatactgacgtgtatggagattaccggccattgttcgacaacccacaggaccccgacaacgtgtcactccaagaggttgaggccgaggcactctcccgggtcggccaaggaagtagaaagctggatggggggtggctgaaagtgcggcagtttcatggattactggtgaagagattccattgtgcccggcgcaactctaaagcacttttctcccagatccttcttcccgcattctttgtgtgcgtggcaatgaccgtggccctcagtgtgccagagattggtgatctgccacccctggtcctcagtccaagccagtatcataactacacccagccccgtgggaattttattccctacgcaaacgaggaacgccgggaatatcgtctgagattgagccctgacgcctcgccgcagcagctggtcagcacctttcgactgcccagcggggtcggcgcaacgtgcgtgctcaaatcccctgcgaatggctccttgggaccgaccttgaatctgtcatccggcgagagcaggctgctcgctgcgcgcttctttgatagtatgtgtctcgaatcatttacacaaggcctcccactcagcaattttgtgccgcctcccccctcccccgcaccaagtgacagccctgcttcacctgacgaggacctgcaggcatggaatgtgtctttaccacctaccgccggcccagaaatgtggacttccgccccttccctgcctcgattagtgcgtgaacctgtgcgctgtacttgcagcgcccagggcaccggatttagctgcccatcttccgtcggtggtcaccctccacagatgagagtagtgacaggcgatattttaacagatatcaccggacacaatgtctctgaatatctgctcttcacctctgacagattccgcctgcaccgatacggtgctattacatttggtaatgtcctgaagagcatacctgcctcattcggcacccgtgcacctcctatggttagaaagatcgcggtcaggagggccgcacaggttttctataacaataaaggttaccactcgatgccaacctatttaaacagcttgaataacgcaatactcagggctaatcttcctaagtctaagggcaatccggcagcatatggcattaccgttaccaaccaccctatgaacaaaacctctgcttccctcagtctcgactatctactacaggggactgacgttgttattgctattttcataatcgttgctatgtcttttgtaccggccagcttcgtcgtgttcctcgtggccgaaaagtccaccaaggccaagcacctacagttcgtatccgggtgcaatccaattatttattggctggcaaactacgtgtgggacatgttgaactacctggttcctgccacatgttgtgtcatcatacttttcgtcttcgatcttccagcttatacttctccgactaattttccggctgttctatcacttttcctcctttacggatggagcatcacacccatcatgtatcccgcctctttctggttcgaggtgcccagttccgcctatgtgtttctgattgtgattaatctcttcatcgggataacagcgacagttgctacttttttgttacagctgttcgagcatgacaaagacctgaaagtggttaattcttatctcaagtcatgctttctaattttccctaactacaacctgggtcatggcctaatggagatggcatacaacgaatacataaacgagtattatgcgaaaataggacaattcgataaaatgaagtcccccttcgaatgggacatcgtcactcgaggccttgtcgccatggcggtggagggcgtggtgggcttcctgctaaccatcatgtgccagtacaattttcttcgcaggccacagcgaatgcctgttagcacgaaacccgttgaagacgatgtggacgtggcatcggagcgtcagagggtgctgcgcggtgacgcagacaacgacatggtcaagattgagaatcttactaaagtctataagagtaggaaaatagggcggattctggcagtagacagactgtgcctcggagttaggcctggggaatgtttcggcttactcggggtgaacggggctggaaagacgagcacgttcaaaatgctgactggggatgagtcgacaacgggaggtgaggctttcgtgaatggacacagcgtactcaaagagctgcttcaggttcagcagtccctgggatactgtccacagtgtgacgccctattcgatgaactcacagctcgggagcacctgcaactatacacacgcctgcgtggaatctcttggaaggatgaggccagagtcgttaagtgggcactagaaaagctggaactgacaaaatatgcagacaagcctgcaggtacgtattctggaggcaataagcggaagctgtcaactgccattgcactcattgggtatcccgccttcatcttccttgacgagccaacgaccggcatggatcctaaggcccgcaggtttctttggaacttgatcctcgacctgattaaaacaggccggtccgttgttttgaccagtcatagcatggaggagtgcgaggcactgtgtacaagactagctatcatggttaacggcaggttacgctgtttaggcagtattcagcacctgaagaaccggtttggtgacggctacatgatcaccgttcggactaagtcgtcccagtctgtcaaggatgtcgtgcgtttctttaaccgaaacttcccagaagcaatgctcaaagaacgtcatcacactaaggtgcagtaccagctcaagtccgagcatatatccctcgctcaagttttctccaagatggagcaggtgagtggcgtgcttggcatcgaggattactccgtttcccagacaacacttgataatgtattcgttaattttgcaaagaagcaatcagataatctcgagcaacaggagaccgagcccccttccgctcttcaatcacctttgggatgcctcctcagtctattgcggccgcgttccgccccaactgagctgcgagcccttgttgcagatgagccagaggatctcgatacggaggatgaggggcttatcagcttcgaagaggaacgggctcagcttagttttaatactgatactttgtgttag

SEQ ID NO: 179951 - DNA, 7401 bp, synthetic construct
  misc_feature 1..7401: note = Description of Artificial Sequence: Synthetic coding sequence
  source 1..7401: mol_type = other DNA
atgggccggaagaccagccgggtgcagcagggccccccccggagcccagcctgttccgcccatggagaaaggtcttgggggctagagtttccaccgttccggtggctcctgggcatcgcagggaggacacacctcgcagcactgccacccttccagtgggtcttggctttcgaaatcttcattcctctcgtgctgtttttcattctgttaggtctgaggcagaagaagcctactatctctgtaaaagaggttgcattctacaccgcagcccccttgacctcagcagggatcctgcctgtgatgcagagtctgtgccccgacgggcagcgggacgagttcgggttccttcagtatgccaactctactgttacccaattgctggagcgactggacagagttgtcgaagaaggcaatttgtttgatccagctcgaccttctttgggttccgagctggaagcactgaggcagcatctcgaggcgctgtcagcaggccccggaactagtggatctcatctggacaggagtactgtgtcgtccttcagtctggactccgtggcaagaaacccccaagaactctggcgtttcctgacacagaatctgtctctgcctaacagtaccgcccaagccctattagctgcccgggtggatccacctgaggtataccacctcctgtttggtcccagttccgcactggacagtcagtcaggccttcacaaagggcaggaaccctggagtcgcctgggtggcaatccactgttccggatggaagagctgctgctcgcaccagccctgctggaacagcttacttgtacccccgggtctggtgagctaggtcggatactgactgttcccgaatctcagaaaggcgcactccaaggttatcgggatgccgtgtgctcaggccaggcagccgcaagggcacggaggttcagtggattgagcgcagagctgcgtaatcagctcgacgtggctaaggtttcccaacagctgggactcgatgcccctaacgggtcagatagcagtccacaagctccacccccacggaggcttcaggccctcttgggagatctcctggacgcgcagaaggtgctgcaagacgtcgacgttctgagcgccctggccttgctgctgccccagggggcctgtacaggacggacccccggccccccagcttccggtgccggaggagcagccaacggaactggggccggggccgtcatggggcctaatgccactgcagaggagggcgctcccagcgcagccgcgctggctactcccgacacactgcagggccagtgctccgccttcgtgcagttatgggcgggccttcagcccattctgtgcgggaataaccgcaccatcgaaccagaagcccttcgaaggggcaacatgtcatcgctggggtttacatctaaagagcagcgcaacctgggactcctggtccatttgatgacctcaaacccaaaaatattatacgctccggccggaagcgaagtggatcgcgtaatcctgaaagccaatgaaacttttgcgtttgtggggaacgtaacgcactacgctcaagtttggcttaacattagcgcagaaattaggagtttcttggagcaaggtagattgcaacagcatctacgctggctccagcaatacgtggctgaactgcggcttcacccagaggccttgaatctctctcttgacgaacttccccctgctctgcgacaggacaacttcagcttaccatcaggaatggcgctgctccagcagttagacaccattgataatgctgcttgcggctggattcaattcatgagcaaagtctctgtggacatcttcaagggctttcatgacgaggaaagcattgtaaattatactttaaaccaggcgtaccaagataatgttacagtattcgcatcagtgatttttcagaccagaaaggacgggtctctgcctccccacgtgcattataagatccggcagaacagctcgtttactgaaaagacaaatgaaattaggagagcgtattggcggccggggcccaataccggcggcaggttttacttcctgtacggcttcgtgtggattcaggacatgatggaacgtgccatcatcgatacatttgtgggccacgacgttgtggagcctggctcctatgtacagatgttcccctacccttgttacacccgtgacgatttcctgttcgtaattgaacatatgatgccactgtgcatggtaatctcgtgggtgtacagtgtggctatgacgatccagcacatcgtagcagaaaaggaacaccgtctcaaagaggtgatgaaaactatgggtttgaacaatgctgtccactgggtcgcatggtttatcaccgggttcgtgcagttgtctatttccgtcacagcgttgaccgccatcctaaagtacggccaggtgctcatgcacagccacgtggtcatcatatggctttttctggcagtctacgccgttgccacaatcatgttctgcttcttggttagtgtgctgtactcaaaggctaagctcgcttctgcttgtggtggcataatatacttcctatcttacgtgccgtacatgtacgtggccatcagagaggaggtcgctcacgataaaatcacagcatttgaaaaatgtattgcttccctgatgtctaccacagcatttgggctgggttccaaatattttgctttatacgaggtcgccggtgtcggcattcagtggcatacattctcacagagtccagtcgagggcgacgacttcaaccttctcctcgcggttactatgctgatggtcgatgctgttgtttatggaattctgacttggtatattgaagcagttcaccccggtatgtacggcctccctagaccgtggtactttcccctccagaagtcgtattggcttggttctggacgcaccgaagcttgggaatggtcttggccttgggcccgcacaccccggctgtcagtgatggaggaggatcaagcctgcgccatggaatcacgccgcttcgaggagaccagaggaatggaagaggagcccacacacctgcccctcgtagtgtgtgtcgacaagttaactaaggtgtataaagatgataaaaagctcgcgctgaacaagctttctctcaacctctatgaaaatcaagtagtgtcatttctggggcataatggggctggcaagaccaccactatgtccattctgacgggcttgttccctcctacctccggctcggctacaatctacggccacgacattaggacagagatggatgagataagaaaaaacctcggaatgtgcccacagcataatgtgctttttgacagactcactgtggaagagcatttatggttctactctaggctaaagagcatggcccaggaggaaattcggcgagagatggacaagatgatcgaagatctggaactttctaataagaggcattcattagtccaaacactgagtggagggatgaagcgtaagttgtctgtagctatcgcctttgtgggaggaagcagggccattatcctcgatgaacctaccgctggagtggacccatatgcacgcagagctatctgggatctcatcctgaaatataaacctggccgtactattctcctaagcactcatcacatggacgaggctgacctattgggcgacaggattgcgatcatttcccacggtaaacttaagtgctgcgggtcccctctgttcttgaagggcacatatggtgatgggtaccggctcacgttggtgaagagaccagcagagccaggaggaccccaagagccagggctcgctagttccccaccggggagagcgcccctaagctcttgctccgaattgcaagtgtcacagtttatcaggaaacacgtcgcaagttgtttgttagtctctgatacatcgaccgaactcagctatattcttcctagcgaagccgccaaaaaaggcgctttcgagcgcctattccagcacctcgaaagatccctggatgcccttcacctgagctcctttggcctgatggacaccactttggaagaggtctttcttaaggtatcagaggaggaccaatccctggaaaatagcgaggccgatgtgaaggaaagccggaaggacgtcctcccaggtgctgaggggcccgccagtggggaaggccatgcaggaaacttagcaagatgcagtgagctcacgcagtcacaagccagtttacaaagcgcctctagtgttggatcggcgcgcggagatgagggggccggatataccgatgtttatggagattacaggcccctgttcgacaaccctcaggatcccgacaacgtgtcactgcaagaagttgaggcggaggccttgtcccgggttggtcaggggtcccgaaagctcgatggagggtggttgaaagtacggcagttccatggcctattggtgaagcgcttccactgtgccaggcgcaactctaaggcacttttctcccaaattctgctgcccgcattttttgtttgcgtggccatgaccgtagcactgtccgtgcccgagatcggcgatctgccgcctctcgttctatctccatcccagtaccataactatactcagcctagaggtaatttcattccctatgctaacgaagagaggagggaatacagattgcgcctgtctccggatgctagtcctcagcagctagtgagtacatttaggcttccttccggagtaggtgccacatgcgtcctgaaatctccggcaaacggtagcctcggaccaaccctcaatctgtcaagcggtgagagcagattgctcgcagctaggtttttcgactcaatgtgcttggagagtttcacacagggattacctctgtcgaacttcgtaccgcccccaccgagccccgctccttctgattcccccgctagtccagatgaagatctgcaagcctggaacgtgtctctcccaccaactgccggccccgagatgtggacctctgcccctagccttcctcggttggtgagggagcccgtgcgctgcacctgttccgctcaaggaaccggattttcctgcccctccagcgttggcgggcacccccctcaaatgcgcgtggttactggtgacatactgacagatataacaggtcataacgtgtccgagtatctgctgtttacatccgatcgctttagattacacaggtacggcgctataaccttcggcaatgtactgaagtctatcccagcaagtttcggcacccgggccccccccatggtgcgtaagattgctgtcagaagggcggcacaggtgttctataacaacaaaggttaccactcaatgccgacatacctgaattccttaaataacgctatactaagggcaaaccttccaaagagcaagggtaatcctgccgcttacggaatcactgtaactaaccatccgatgaacaagacctcagcgagcctgagtctggactacttattacagggaacagatgttgtcatcgctattttcatcatagtcgcgatgtcttttgtgccagcctctttcgtcgtgttcctggtcgctgaaaagagtacaaaggccaaacacttgcagtttgtttcgggctgcaatccaataatttactggctcgccaactacgtgtgggatatgttgaattatttggttcccgccacatgctgtgtaattatcctgttcgtgttcgacctccccgcttacacaagtcccacaaacttccctgctgtgttatctctgttcttactctatggatggagcatcacccccataatgtaccctgcgagcttttggtttgaagtgccgtcctctgcttatgtttttctgattgtcatcaacctgtttataggcattactgcaaccgtagctactttcctccttcagctgtttgagcacgacaaggatctgaaagtcgtcaatagttatcttaaatcctgctttctcatctttccaaattataatcttggccacgggttaatggagatggcttacaacgaatatattaacgagtattacgctaagattggtcaatttgacaagatgaaaagccccttcgaatgggacatcgtcacccgcggactggtggccatggcagtagagggcgttgtggggtttctattaaccattatgtgccagtataacttcctacggcgcccccaacgaatgccagtcagcactaaacccgtggaggacgatgtggatgtcgcgtccgaaagacagcgcgttctcaggggggacgcggacaacgatatggtgaaaatcgagaatctcactaaagtatataagagccggaaaattgggcggattctggcggtggacaggttgtgcctgggtgtgaggcctggagagtgctttgggctcctgggggtaaatggggccggcaagacctctacgtttaaaatgctcactggcgatgagtctaccacggggggagaggcctttgtgaatggccactcggtcctcaaagagctattacaggtgcagcagtccctgggatactgtcctcagtgtgacgcgcttttcgatgaactcacagccagagaacacctccaactctacactagattgagaggcatttcttggaaagacgaggcacgtgtcgtgaagtgggctctcgagaaactggagctgaccaaatatgccgataaaccggcaggaacctactcagggggaaacaagaggaaactgagtacagctatcgccctgattggctacccagccttcatctttcttgacgagcctactaccggaatggatcccaaagcaagacgatttttgtggaacctgatactagacctcatcaaaaccggtaggtccgtggtgttgaccagtcatagcatggaggagtgcgaagctctgtgtaccagattagccattatggtcaatggccgactgagatgtcttggatcaattcagcacctgaagaaccgctttggcgacggttatatgattactgttaggactaagtcctcacagtctgtcaaggatgtggtcaggttttttaaccgcaactttcctgaggccatgcttaaagaaaggcaccataccaaggtgcagtaccagcttaaatccgaacatattagtctggcccaagtgttctccaagatggagcaggtgagcggggtgctgggtatcgaggattacagtgtgagtcagaccaccttggacaacgtttttgtcaactttgctaagaaacaaagcgacaacttagagcagcaagagacagaaccgccctccgctctacagtcccctcttggctgccttttgagccttctgcggcctcgatctgctcctactgaactgcgagccctagtggcagatgagccagaagatctggacactgaggacgaggggcttatctccttcgaggaggagagagcccagctcagcttcaataccgataccctctgttag

SEQ ID NO: 179952 - DNA, 7308 bp, synthetic construct
  misc_feature 1..7308: note = Description of Artificial Sequence: Synthetic coding sequence
  source 1..7308: mol_type = other DNA
atgggcttcctgcaccagctgcagctgctgctgtggaagaacgtgacactgaaacgaaggtccccgtgggtgctggccttcgagatttttatcccactggtccttttcttcatcctactcggactgaggcaaaaaaagccaacaatttctgtgaaggaggccttttacacagccgccccactgacttctgccggaatactgccggtgatgcagtccctttgtccagacggtcagcgggacgagttcggatttctccagtacgctaatagtactgttacacagctcctggaacggctggaccgcgtggttgaagaaggaaatttattcgatcccgcaagaccatctctgggcagcgagctagaggcactgcgacagcacctggaagcgctgtccgccggtcctggcaccagcgggtcacacttagatagatccaccgtgagttccttttcactcgattctgttgcaagaaacccacaagagctttggcggttcctcacccagaacctctcactgcctaattctaccgctcaggccctactggccgctagagtggacccccctgaggtgtatcatttactgttcggcccaagtagcgccctagacagccagtcagggctgcacaagggccaggagccatggtctaggcttggtggcaaccctttattcaggatggaggagctcctgcttgccccagctttactggagcagcttacctgcacccctgggtctggggagttgggccggatactgactgtgcccgagtctcagaagggggctttgcagggctaccgcgacgcggtgtgttccggccaggctgcagcgcgcgcgcgacgattcagcggattaagtgcggagctgcgaaaccaactcgacgtcgcaaaagtgtcccagcagctggggctcgatgcccctaacggctccgactcctccccccaggcgcctccccctcgcaggctgcaggctctattgggtgacctgttggatgcccagaaggtgctccaggacgttgacgttctatccgcactggctttgttgctgccgcagggcgcctgcaccgggcgcacaccgggcccacccgcgtccggtgccggcggagcagccaacgggactggtgctggggctgtgatgggccctaacgctactgctgaagaaggggccccatctgccgcagcacttgcgacccccgacaccctgcaggggcaatgcagcgcttttgttcagttgtgggctggactgcagccaatcttgtgtggcaacaataggaccatagaacctgaggctctccggcggggcaacatgagcagcctgggatttacctcaaaagagcagcggaacttgggactgctggttcacttgatgacatcaaatcccaagatcttgtatgcccctgccgggagtgaagtggatagggttatcttgaaggccaatgaaacttttgcgttcgtggggaacgtgactcactatgcccaggtatggcttaacatttcagctgagatacgatcatttctcgagcaggggaggcttcagcagcatctgagatggttgcaacagtacgtcgctgaattacgcctacaccccgaagcgctgaacctgtctctggatgaacttcctccagccttacggcaggacaacttttccctcccgagtgggatggcactgctgcagcagctggacacaatcgacaacgctgcttgtgggtggatacaattcatgagcaaagtgagtgttgacatttttaagggatttcacgatgaagaatccatcgtgaattatacactcaaccaagcttaccaggataatgttacagtctttgccagcgtgatattccagaccaggaaggatgggagcctcccccctcatgtgcactataaaatcagacagaactcttctttcaccgagaagaccaacgagattcggagagcttattggagacccggacccaataccggagggcgtttctacttcctctacggatttgtatggatccaggacatgatggagcgggccatcatcgataccttcgtggggcacgacgtcgtggaaccagggtcgtatgtccagatgttcccctacccctgttatacgcgggacgatttcctgttcgttattgagcacatgatgcctctgtgtatggtgattagctgggtgtattcagtcgccatgaccattcagcacatagtggcagagaaagagcataggctcaaggaggtgatgaaaacgatgggtctgaataacgctgtacactgggtcgcctggttcattacaggcttcgtgcaacttagtatcagtgtcacagctcttacagcgattctcaagtatggacaagtcttgatgcacagccacgtagtgatcatttggttgttcctggctgtgtacgccgtcgccacaatcatgttctgtttcctcgtgagtgtgctgtattccaaagcaaaactggcttccgcctgcggaggaatcatttattttctgagctacgtaccttatatgtacgtagccattcgggaggaagtcgctcacgacaagatcacggcttttgaaaagtgtatcgcatccttgatgtcgacgacggctttcggactcggctccaaatacttcgctctatacgaagttgctggagttggcattcagtggcatacgtttagtcagtctcccgtggaaggcgatgactttaacttactgctggccgtgacaatgttgatggtcgacgcagtggtttacggcatcttgacctggtatatcgaagccgtgcacccagggatgtacggcctgcctcgcccatggtactttcctctccagaagtcctattggctcgggagcgggcgcacggaagcatgggaatggagttggccatgggcccggacacctcggctgtcggtgatggaagaagaccaggcatgcgcaatggaatcacgcagatttgaagaaaccagagggatggaggaagaacccacgcaccttccactggttgtatgtgtggataaactcactaaggtttataaagatgataagaaactcgcactcaacaaactcagtctcaatctttatgaaaatcaagtagtgtctttccttggacataatggcgcaggcaagacaactactatgtcgattcttacaggtctttttcctccaaccagcgggtctgccaccatatacggacacgatatcagaaccgagatggatgaaatccgcaagaacctgggaatgtgcccccagcacaacgtcttgtttgacaggctgacagtggaggagcacctgtggttctattctcgtttgaagtcaatggctcaggaggagatccggcgggaaatggacaagatgattgaagatctcgaactgtctaacaagcggcattccctcgtgcagactctgtcggggggtatgaaaagaaagctcagtgttgcaatagcctttgtaggtggctcccgggcaatcatactggacgaaccgactgcaggagtggacccgtatgcgagacgtgccatatgggaccttattctgaaatacaagcctggtaggaccattcttcttagcactcatcatatggacgaagctgatctgctcggcgacaggattgctatcatctcacacgggaagttgaagtgctgcggtagccctctgttcctgaagggaacgtatggagatggataccgactcaccctagtaaaacgacctgcggagcctgggggcccccaggagcccggcctcgcaagctcccctcccggccgggccccactgagctcttgttctgaactgcaagttagccaattcatcagaaagcatgtggcttcatgtctgcttgtatccgacacctcaaccgaattgtcttacatcctgccaagcgaagctgccaagaaaggggcttttgagaggttgtttcaacacctggaacggtcactcgatgctcttcatctatcatcatttgggctgatggataccaccttagaggaggttttcttaaaggtctcggaagaggatcaaagcttggaaaatagcgaagccgatgttaaagagagccggaaggacgttcttcccggggcagagggtccagcatctggtgaaggccacgccgggaacctggccaggtgtagcgagcttacccagagccaggccagcctgcagtcggcctctagtgtgggcagtgcgaggggcgacgagggcgctgggtacacggatgtctatggggactatcgccccttgtttgataaccctcaggatccagataacgttagtctccaagaagtcgaagccgaggccctttccagagtcggccagggctcaagaaaattggacggcggttggttaaaagtgcggcagttccatgggctgcttgtgaagagattccactgtgccaggagaaactccaaagctcttttttctcaaatactactgcccgctttttttgtatgtgtagccatgacagtggccctatctgtgcctgagattggcgacctgccaccgctagtcctttcaccctctcagtaccataattatacacagccacgcgggaattttatcccatatgccaacgaggaacggcgtgagtatcgactgcgcctctctccagacgcctccccacagcagttagtctccacatttcgccttccatctggagtgggggccacatgtgtgcttaaatcgccagccaatgggtcactgggacctactttgaacctaagcagtggagaatctagactcctggccgctcgattttttgatagcatgtgcctcgagagcttcacccagggcctcccattgtccaatttcgttcccccgccacccagcccagcacccagcgatagccctgcttcaccagacgaggatctgcaggcttggaacgtgtcgttaccaccaacagctggccctgaaatgtggactagtgccccgagcctgccacgactggtcagggagcctgttcggtgtacctgctccgctcaggggacaggattctcatgtccatcaagcgttggtggccaccctccccagatgcgcgttgtcacaggagatattcttaccgacatcactggccacaatgtatctgagtatctgctttttacgtccgatcgattcagactgcaccgttacggagccatcacttttggcaacgtgttgaaatctatccctgcatcttttgggactcgcgcgccgccgatggtgcggaagatcgctgttaggagagcagcccaggtcttctataacaataaggggtaccacagtatgccgacttatctaaactctctcaacaacgccatcctgcgagccaatctaccaaaatctaagggaaatccagcagcctatggcattaccgttactaaccatccaatgaacaagacatccgccagcctctctctcgattaccttcttcaagggacagatgtcgtcattgccatctttattatcgtggcaatgagcttcgttccggcgtcattcgtcgtgttcctggtggccgaaaaaagcacaaaagcgaaacatctacagtttgtgtcaggttgtaaccccatcatctactggcttgcgaactacgtgtgggatatgcttaattacctggtgccagctacctgctgtgttattatcctgttcgtctttgacctcccagcttatacatctcctactaatttccctgccgttctgtcccttttcctgctgtacgggtggtccataacacctattatgtatccagcttcgttttggttcgaagtccctagttcagcctatgtcttccttatcgtcatcaatctcttcatcggtatcaccgctaccgtagcgacatttttgttgcagctgtttgaacatgataaggacttgaaggtcgtcaactcatacctgaagtcttgttttctgatcttcccaaattataacctaggccatggactcatggagatggcatataatgaatacatcaacgagtattatgctaagatcggtcagtttgataagatgaaaagcccctttgagtgggacattgtgacgcggggcttggtggcgatggctgtggagggagtggttggattcctgcttacaatcatgtgtcagtacaacttcctgaggaggcctcagcgcatgcctgtgagtaccaaaccggtggaggatgacgtagacgttgcctctgaaaggcagcgcgtccttaggggcgatgcagataacgatatggttaaaatcgaaaatctgactaaggtgtacaagtccagaaaaattggccggattcttgcagtggaccgtctctgtctaggtgtacggccaggcgaatgcttcggactgctcggagtgaatggggccggcaaaactagcaccttcaaaatgctcaccggcgacgagtccactacgggtggagaggcctttgtgaatggacactccgtgttaaaggaacttctgcaggttcaacagagcctcggctactgcccacagtgcgatgccttgtttgacgagcttacagctagggaacacctgcaattgtacacgagattacggggcatctcttggaaagatgaagcaagggtcgtcaaatgggctctggagaaactggaacttactaagtacgcagataaaccggctggaacctactccggagggaacaaacgtaagctgtccacagccattgctttaattggctatcccgcattcatattcctggatgaacctaccactggcatggaccccaaagcccgcaggtttctatggaatttaatcctggatcttattaaaaccgggaggtcagtggttctgacatctcattcgatggaggaatgtgaagccctctgtactagactggccatcatggtgaacggtcggttaagatgcctaggaagcatacaacacctgaagaataggtttggcgacggctacatgatcaccgtgaggacaaaatcctcccagtccgtcaaggatgtggtgcggttctttaatcgaaatttcccagaggctatgctgaaagagaggcatcatactaaggttcaatatcagctgaagtctgagcatatcagcctcgcccaggtgttctccaagatggaacaggtgtctggggtcttagggatcgaagattatagtgtttcacagacaacactcgacaacgttttcgtcaacttcgctaaaaagcaaagcgacaacctcgagcaacaggagacagaacctcctagtgcactacagtctcccctggggtgccttttgagcctgctcaggcctcggagtgctccaacagaattacgggcgttggtggcagacgagcctgaagacctagataccgaggatgaggggctgatatcatttgaggaagagcgcgcccaattgtctttcaacacagatacgctgtgttag

SEQ ID NO: 179953 - DNA, 591 bp, synthetic construct
  misc_feature 1..591: note = Description of Artificial Sequence: Synthetic coding sequence
  source 1..591: mol_type = other DNA
atgctgaccggcgacgagagcaccaccggcggcgaggccttcgtgaacggacactccgtgctaaaggaacttctgcaggtgcagcagagcctggggtactgcccccagtgcgacgccttgttcgatgaactgaccgctagggagcatttacagctctacactcggttgcggggaatctcctggaaggatgaagctcgggtggtgaagtgggcactggaaaagctcgagttaactaaatatgccgacaagcctgctggaacttactctgggggaaataaacgaaaattgagtactgccattgcactcattggctatcctgctttcattttccttgatgagcccaccaccggtatggaccctaaagcacgccgtttcctgtggaacttaattctggacctgatcaaaaccggtaggagcgtcgtcctgacctctcacagtatggaagaatgtgaagcactgtgcactaggctggctattatggaacgatcccctgcagtgccgggtcagcaccccgctcctgaggagcccgtgtggcgttggctacatgatcatggtgcagatcaggagcagcccgaatgtgaaggacgctag

SEQ ID NO: 179954 - DNA, 5115 bp, synthetic construct
  misc_feature 1..5115: note = Description of Artificial Sequence: Synthetic coding sequence
  source 1..5115: mol_type = other DNA
atggccgtgctgcggcagctggccctgctgctgtggaagaactacacactacagaagaggaaggtgcttgtcacagtgttggaacttttcttgcccctcttgttttctgggattttaatctggctccgattgaagatccagagcgagaatgtgccgaacgccacaatttaccctggccagagcatccaagaactacccctatttttcacatttccccccccaggcgacacatgggaactggcatatatccccagccactcggatgcagccaagactgtcacagagacagttcgaagggcgttggtgataaacatgagagtgagaggattccccagcgagaaagacttcgaagactacattcgatacgataactgctcttccagcgtactcgcagcagtggtgttcgagcatcctttcaaccacagtaaggaaccactgcccttggcggtcaaataccacctgcgcttcagttacacaaggagaaactacatgtggacgcagactgggtcattctttctcaaggaaacagagggatggcatacaaccagcttatttcctctatttccgaacccaggtcctagggaacctactagcccagatggaggcgaacctggctatatcagggagggcttcctggcagtgcagcacgcagtggatagagccattatggaatatcatgcggatgcagccacgaggcagctgtttcaacgacttacagttacaatcaagcgctttccatatccccccttcatcgctgaccccttcctagtggcaattcagtaccagctgcccttactgctgctgctttcattcacttatacagccttaactatcgcacgcgctgtggtccaggaaaaggagaggcgtttaaaggaatacatgaggatgatgggtttgtcaagctggctgcactggtcagcatggttcctcctctttttcctgtttctgctgattgcagctagctttatgactctgctgttctgtgtcaaggtaaaacccaacgtagctgtcttgtcccgcagtgacccaagccttgtgttggccttcctgctgtgcttcgctatcagtactatctctttttcttttatggtatcaacctttttttcaaaggcaaacatggccgctgcattcggggggtttttgtatttctttacatacattccctatttctttgtcgctccacggtataattggatgacattgagtcagaaattgtgttcctgcttactatctaacgtggcaatggctatgggggcccaacttattggaaaatttgaggctaagggtatgggtatccagtggcgcgacctgctctcgcctgtgaatgtggacgacgacttctgtttcggccaggtcttggggatgctacttctggattccgttctatacggcctggtcacgtggtatatggaggcggtattcccaggtcaatttggcgttccgcaaccctggtacttttttatcatgccgtcctactggtgcggaaagccaagggcggtagccggaaaggaggaggaggattctgacccggaaaaggctttaagaaatgaatacttcgaggccgaaccagaggatctggtggccggcatcaaaattaaacatttgtcgaaagtgtttagagtgggcaataaggatagagcagcagttcgggacctgaatctgaacctgtatgagggccaaattactgttttgttgggacacaatggcgcagggaagactaccacgttgagcatgctgactggactttttcctcctacttccggccgtgcctatataagtggatatgaaattagccaggacatggttcagatcaggaaaagtctcggattgtgtccccaacacgacatcctgttcgacaacctaactgtggcggagcacctgtacttctatgctcagcttaagggtctctcaagacaaaagtgcccggaagaggtcaaacagatgctccacattatcggactggaggacaagtggaacagcaggagtcgatttctgagcggtgggatgagacgtaagctctctattgggatcgctttgatagccggtagcaaagtgctcattttggacgagccaacctccggcatggatgccatttctaggcgcgccatctgggacctcctgcagagacaaaagtccgatcggactatcgtgctcaccacacacttcatggacgaggccgacttgctcggggacagaatcgctataatggctaaaggggagctgcagtgctgtgggtcttcactcttcctgaagcagaaatacggagctggatatcacatgactctcgttaaagagccgcactgtaatcccgaggacatctcacagctggtgcatcaccatgtgcctaacgctactctcgagagctctgccggcgcagaactgtcatttatactccctcgcgaatcaactcaccggttcgagggcttattcgcaaagttggagaagaagcagaaggagctaggaatcgcatctttcggtgcaagcatcactacaatggaagaagttttcctaagggtcggcaaactggttgactcctccatggacatccaggctatacagttacctgccctgcaataccagcacgagcggagagcctccgactgggcagtggattccaatctatgcggcgccatggacccgagcgatggaattggtgcactaatcgaggaggagagaacagctgtgaaactgaatacgggactggccctacactgccaacagttttgggccatgttcctgaaaaaggcagcatactcctggcgcgagtggaagatggtggcggcacaggtcctggtaccacttacgtgcgtgacactggctctgctggcgatcaactattcttcggagctgttcgacgatcccatgctacgattaacgctaggcgaatatgggagaacagtggtcccttttagtgtgcctggaacatcgcagttgggtcagcagctttctgaacatcttaaagatgctctgcaagccgaggggcaggagccaagggaggtgttgggagatctggaggagttcctcatttttagagccagtgtggagggtgggggattcaatgagaggtgtctggtggccgcatctttccgcgacgtgggagaacgaaccgtggtaaacgctctgttcaacaatcaggcctaccactctcccgccacagcactggccgtcgtagacaacctattgtttaagcttctgtgtgggcctcatgcctctatagttgttagcaatttccctcagccccggagtgcattacaagccgctaaggatcaatttaacgagggtagaaaaggcttcgacatagccctcaacctgttatttgcaatggcctttctggcaagtaccttcagcattctcgctgtcagtgaacgagcagtccaggcaaaacacgttcaattcgttagtggcgtgcacgtggctagtttttggctctctgcacttctgtgggacctgatctcctttctgataccgagcctgttgctgttggtggtcttcaaagcattcgacgttagagccttcactcgcgacggtcatatggctgatactctgctgctcctcctgctgtatgggtgggcaataattcctctgatgtatctgatgaactttttcttcctgggcgctgcaacggcttatacccgcctcaccatattcaatattctctccggcatcgctacctttctgatggtgaccatcatgcgcatcccggcagtgaaactggaagagctgagtaagacactggaccacgtgtttctggtgttgcccaaccattgtctgggaatggccgtgtccagtttctacgaaaattacgagacccgacgatattgcaccagtagcgaagtagctgctcactactgtaagaagtataacatccagtaccaggagaatttttacgcctggtccgctccaggcgtgggtcggtttgttgcaagtatggcagcatcaggctgcgcatacctgattcttctgtttttaatagaaactaacttactacagaggctcagaggcatattgtgtgcccttcgaaggaggaggaccctcaccgaactctatacgagaatgccggtactgcctgaggaccaagatgtagcagacgagagaacccggatcctcgctccgagcccggatagcctgctccataccccactgataataaaggaattgagcaaggtgtatgagcaaagagtgcctctcctcgcagtggataggcttagcctcgccgtccagaaaggcgaatgttttggactcttagggttcaatggcgccggtaagacgacgacgttcaagatgctgactggtgaggagtctctcacttcaggcgacgccttcgttggaggacaccggatcagtagcgacgttggaaaggtgcgacagagaatcggctattgtcctcaatttgatgccttgctagaccatatgaccggccgggaaatgctcgtaatgtacgctcggttgcgcgggattcccgaacggcatatcggtgcatgtgtcgagaacacactaagggggctgctcctggagccacacgccaacaaacttgtgcgcacatacagcggcggtaataagcggaagttaagcactggcattgccctgatcggcgaaccggccgtgatttttctcgatgaaccttccacgggcatggaccccgtcgcacggagactgctgtgggatacagtggcacgggcccgcgagagcggaaaagcaattataataacctcccactcaatggaagagtgcgaggctctgtgtacccggttggctatcatggtccagggtcagtttaagtgcctgggcagtcctcagcatttaaaatcaaagttcgggtcaggttattctttgcgagctaaagttcagtcagagggacagcaggaggctctggaagagtttaaggcgtttgtcgacctgaccttcccaggaagcgtgctggaagatgaacatcagggtatggtgcattatcatcttccaggccgtgatctctcttgggcaaaagtcttcgggatcctcgagaaagccaaggaaaagtatggcgtagatgattattctgtgtcccagatctctttggaacaggtcttcttgagttttgcacaccttcagcccccgaccgcagaggaaggtagatag

SEQ ID NO: 179955 - DNA, 5127 bp, synthetic construct
  misc_feature 1..5127: note = Description of Artificial Sequence: Synthetic coding sequence
  source 1..5127: mol_type = other DNA
accgcccccccccccagccccagcctgcccctgcaggaccgggccgctactagcgcccacctcgccctctttaccctgtcctttcagagcacgttcttgctgtttcccgctggatgctcagcatatctgaatttgttacgcccaccaacttctctggccgccctaggcgtacccttttcaaagacaatggccgtgttacggcagctcgcacttctgttatggaaaaactacacactgcagaagcgtaaggtccttgtgacagtgcttgaactatttcttcctctcctcttttctggtattctaatctggctgcggctcaagatacaatccgagaatgtgcccaacgccaccatctaccccggccaatctattcaagaacttcccctcttttttacattcccaccacccggcgacacctgggaacttgcctacatcccatctcactctgatgccgcgaagaccgtgactgagaccgtacgcagggccttggtcatcaacatgcgtgttaggggattcccgagtgagaaggactttgaagattatattcggtacgataattgtagctcatctgtgttggccgccgttgttttcgagcaccccttcaaccatagcaaagagcccttgcctctcgccgtcaaataccacttgagattcagctatacaaggaggaattatatgtggacccaaaccggaagtttctttctgaaggagacagagggctggcatacgacctccttatttcctctttttcctaaccctgggcctcgggagcccactagtcccgacggcggagagccggggtatatcagagaggggttcctggccgtgcagcacgctgtggatcgtgccatcatggaatatcatgccgatgcagctactcgtcagctgtttcaacggctcactgtaacaataaagcgctttccttatccccccttcatcgcggatccattcctcgtcgccatccagtatcagctgcctctcctgcttcttttaagttttacttacaccgccctgaccattgcaagggcagtggtgcaagaaaaggagcgccgattaaaggagtatatgaggatgatgggcctgagctcgtggctccactggagcgcttggttcctcttatttttcctttttctgctgatcgcagcctcattcatgacgctcctcttctgtgtcaaggtcaaacccaatgttgctgtgctgtccaggtccgacccctcccttgtcttggccttcctcctgtgctttgccatatctactatttccttttccttcatggtcagcacatttttttccaagggcatggggattcagtggagagatctgctatcacctgtcaatgttgatgatgacttctgctttgggcaggtcctgggtatgctactgttggatagcgtcctgtacggactggtcacatggtacatggaagcagtctttcctggtcaattcggcgtgccgcagccttggtatttcttcatcatgccatcctactggtgcggcaagcctcgggccgttgcaggcaaggaggaggaggatagtgatccagaaaaagcactaaggaacgaatatttcgaagccgagcctgaagacttggtggcggggattaagatcaaacacttatccaaggtgtttagagtgggcaataaggaccgcgccgccgtccgcgatctgaaccttaacctgtatgagggtcagatcacagttctcctgggccacaatggagctgggaaaaccacaactctgtccatgctgaccggactgtttcccccgacctccggacgtgcgtacatctccggctacgaaattagccaggacatggtgcagatccgtaaatccctcgggctttgtccacagcatgacatcctctttgataatttaaccgtagctgagcatctgtacttttatgcacagctaaagggcttgagcagacagaaatgccccgaagaggtcaaacagatgctccatatcatcggactggaggataaatggaatagtaggagtagatttttatctggcgggatgcggcgcaaattatcgataggtattgctctgatcgcaggaagcaaagttctcattctagatgaaccaacttccggcatggatgccatcagcagaagggcaatttgggatttgctgcagcggcaaaagagtgatcgcaccattgtcctgaccacacacttcatggacgaagcagacctgctgggcgaccggatcgcaatcatggctaaaggtgaacttcagtgttgtgggagttccctattcctgaagcaaaagtacggggctggctatcacatgactctggttaaggaacctcactgcaaccccgaagacatcagtcagcttgtgcaccaccatgtccctaatgccaccctggaatcttccgccggtgccgagctctctttcatcctcccccgggagtcaactcaccgctttgagggacttttcgctaaactagagaaaaaacagaaggaattaggtattgccagtttcggagcaagtattactacgatggaggaggttttccttagagtggggaagctagtagactcgtcaatggacatccaagctatccagttaccggcactgcagtaccagcacgagcgtcgggctagcgattgggctgttgatagcaacctgtgtggagccatggacccctctgacggtataggggctcttatcgaggaggaaagaaccgcagtcaagttaaacactggcctcgcattacactgtcaacagttttgggcaatgtttctgaagaaggccgcctatagctggcgcgaatggaagatggtggccgctcaggtgctagtaccattgacttgcgtcacactggcactcttagctattaactacagttctgagctgttcgatgatcccatgctgcgcctgaccttaggagagtatggacggaccgtggtgccttttagcgtgccaggaacatctcagttgggtcagcaactgtccgagcacctgaaggacgcactgcaggcagaaggacaggaaccccgggaagtgctgggggatctcgaagagttcctgatcttccgggccagtgtagaaggaggcggatttaacgagcgatgcctagtggccgctagctttagggatgtaggagaacgtactgtggtgaacgccctgttcaataatcaggcataccactctcccgccaccgctttagcggtggtggataacctgctgtttaaactgctgtgtgggccacacgctagtatcgtggttagcaacttccctcagccaagatcagcactgcaggccgcaaaggaccaattcaacgagggtcgcaaaggattcgatattgccctcaatcttctgttcgcaatggcgtttctggcaagcacctttagcatcttggccgtcagcgagagggcagtgcaagcaaagcacgtccagttcgtatctggggttcatgtagcaagcttctggctgtcagctctactttgggatctcatatccttcctaattccgtccctgctgctgctggtcgtctttaaggcgttcgacgtgcgagccttcacgcgggatggtcatatggccgatacactgctgttacttctgctttatggatgggccatcataccactgatgtacctcatgaacttcttttttctgggcgccgccactgcatatactcgcctgacaatctttaacatactcagcgggatcgccactttcctcatggtgactatcatgaggatccctgcggtaaagctggaggaactctcgaaaactttggaccacgtcttcttggttctacctaaccactgtcttggtatggcagtaagctctttttatgaaaactatgagacacggcggtattgtacttcctcagaagttgctgctcattactgtaaaaaatataacattcaatatcaggaaaacttctatgcctggagcgctcccggggtgggtcggtttgttgctagtatggcagcatctggttgcgcttacctcatccttttatttctcatcgagacaaacttgttgcagaggctgcgaggaattctctgtgccctgaggcgccggcggactctgactgaactgtatacccggatgccagtactgccagaagaccaggatgtggcagacgagcgaactcgtatcctcgctccatcaccagactcactcctccacacaccactgattatcaaggagctgagcaaggtgtacgaacagcgcgtgccccttctcgccgtcgatcgtctctctctggcagtgcagaagggcgagtgctttggccttctaggattcaacggcgcggggaaaactactacattcaagatgctgacaggcgaggaatctctgacttccggggatgcctttgttggagggcacagaatttcatcggacgtcggtaaggtgcggcagcggattggatactgtccacagttcgacgccctgctcgatcatatgacaggacgggagatgctcgtaatgtacgctaggctgcggggcattcccgagcggcatattggagcatgcgtcgagaacactctcaggggcttgctcctcgagccacacgctaacaagctcgtacggacatattcaggcgggaacaagaggaaactgtccacagggatcgcactgatcggagagcccgcagtgatcttcctggatgagccctcaacaggaatggatcccgtcgcccgcagactcctgtgggacacagtggctcgggcccgcgaaagcggaaaggcaataatcatcacaagccacagcatggaagagtgcgaagctttgtgcacacgtctggcaataatggtgcagggccagttcaagtgcttgggatcccctcagcatctgaagagtaaatttggatccggatactctctgcgggcgaaggtgcagtcagaagggcagcaggaggccttggaggaattcaaggccttcgtggatctcacctttccgggctcagtgctggaagacgaacaccaggggatggtacactatcacctgcccggacgggacctctcctgggccaaagtgttcggaatccttgaaaaagctaaggagaagtatggagttgacgactactcagtgtcgcagatctcccttgagcaagtatttctgtcgtttgcccacctccagcctcccaccgctgaagaaggccgctag

SEQ ID NO: 179956 - DNA, 6822 bp, synthetic construct
  misc_feature 1..6822: note = Description of Artificial Sequence: Synthetic coding sequence
  source 1..6822: mol_type = other DNA
atgggcttcgtgcggcagatccagctgctgctgtggaagaactggactctgcggaagaggcagaaaatccggttcgtcgtagagcttgtgtggccgctgtcactcttcttagttctgatttggctcaggaatgccaatcctctgtatagtcaccatgagtgccatttcccgaacaaggcaatgccatctgctggtatgttgccgtggctgcaggggattttctgcaatgtgaacaatccctgctttcagagccccacacctggcgaatccccaggcattgtgagtaattataataacagtattctggctagagtgtaccgcgatttccaagaattgctcatgaacgcacccgagagtcagcaccttgggaggatatggaccgagttgcatatactctctcagttcatggataccctgcgaacgcaccccgagagaatcgccggacgaggaataagaataagagatattctgaaagatgaggagacactaactctgttccttatcaaaaacatcggtctaagcgatagtgttgtttaccttctgattaatagccaggtcagacccgagcagttcgctcacggtgtgccagacctggccctgaaggacatcgcttgcagcgaggctttactcgaacgcttcattattttctcacaaaggagaggcgccaagacggtgagatacgccctttgcagcctgagccagggcacacttcagtggattgaggacacattatatgcaaacgtggacttctttaagctgtttcgcgtgctgccaactttactggactctagatctcagggcattaacctgcggtcctgggggggcattctctccgatatgtcccctagaattcaggaatttattcaccgcccttcgatgcaggatctgctgtgggtgacccgcccactgatgcagaacggcggtcccgagacatttaccaaactgatgggcattctgtctgacctgctgtgcgggtacccagaagggggaggatcacgggtccttagctttaactggtacgaggacaacaattataaagcatttctgggaatagacagcaccagaaaagacccgatttatagttacgacaggaggactacctctttctgcaatgctctaatacagagtttggagagcaacccacttacaaaaatagcatggcgggcggctaagccacttctgatggggaaaatcctgtatactccagactcgcccgctgcacggcgtattttgaaaaacgccaactccacattcgaagagctggagcatgttcgaaaattagtgaaagcctgggaggaggttggacctcagatttggtatttcttcgataactccacccaaatgaatatgattcgtgatactctgggtaatcccactgtaaaggattttctgaatagacaactgggggaggagggtatcacggctgaagcaatcctgaatttcctgtataagggtcctcgcgaatcgcaggccgatgacatggcgaactttgattggcgggacattttcaacataaccgaccgcacccttcgtctggtgaaccagtacctcgaatgcctggtgctagacaagtttgagagctacaatgatgagacccagctcacccagcgcgcactctccctgctggaggaaaatatgttctgggctggggtggtgttcccagatatgtacccttggaccagcagcttgccaccacatgtaaagtacaaaatccgcatggatattgacgtggtggaaaaaaccaataagatcaaagatagatactgggactccggaccaagggccgatcccgtggaagactttaggtacatctggggagggtttgcttaccttcaggacatggtagagcagggtattacgcgcagccaagtgcaggccgaagctcctgtcggaatttatctacagcaaatgccttatccatgtttcgtagacgatagttttatgatcattctgaacaggtgttttccaatttttatggtcttggcctggatctattctgtctccatgactgtaaagtcaatagtcctcgaaaaagagttaaggctgaaagaaacactgaagaaccagggcgtctccaacgccgtgatatggtgtacctggtttctggacagctttagtattatgagcatgtcaatttttctcctaaccattttcatcatgcatggccgtattctccactactccgatccatttatccttttcctgttcctgttggccttctctaccgctaccatcatgctgtgctttctgctttcgaccttcttctccaaggcatcccttgctgccgcatgttctggggtgatatacttcacactctatcttccccatattctttgcttcgcctggcaagatcggatgacagccgaactgaagaaagcggtgtcactgttgtctcccgtggcctttggatttggcactgagtatctcgtaagattcgaggaacaggggctgggacttcagtggagtaatattggcaatagtcctacggaaggcgatgaattttccttccttctgtctatgcagatgatgctcctcgacgccgcagtgtacggcctgcttgcatggtatcttgatcaagtcttccctggcgactatggcaccccactcccatggtatttccttttgcaagaatcctactggcttggaggggagggttgtagcaccagggaggagcgcgccttggaaaagacagaaccgctcacagaagagacagaggacccagagcacccagaaggcatacacgattctttttttgagcgagagcatcctggttgggttcctggagtgtgcgtcaagaatctcgtgaaaatattcgaaccctgcggacgcccagccgttgataggctgaacatcactttctatgagaatcagattaccgcctttttgggacacaacggagctggcaagacaacaaccttatctatcctcactggcctcttacccccaacaagcggcaccgttttggtggggggccgagacatagaaacatcgctggatgccgtccgacagtctctgggcatgtgcccacagcacaatatccttttccaccatctgactgtggcagagcacatgctcttttacgcgcagcttaaaggaaagagccaggaggaagcccagctggaaatggaggccatgctggaggacacaggactccatcacaagcgcaatgaggaagcgcaagaccttagtggaggaatgcaaaggaaactgagcgtagctatcgcatttgtgggagacgcaaaagtggttattctggacgagcccactagcggcgtggacccgtattcccgtcgcagtatatgggatctattgctgaaatatagatcaggcagaacaattattatgagcacccaccacatggacgaggccgatctactgggcgataggattgcgataatcgcacaggggaggctttactgctcgggcacaccactctttctgaaaaactgctttggaaccggactctacctgacattagtcaggaaaatgaagaacatacaatctcaacggaaaggaagcgaaggaacgtgtagctgtagttcgaagggattttctacaacctgtcccgctcacgtcgatgatcttaccccggagcaggtgctcgatggcgatgtaaacgagctcatggatgtagttctgcatcatgtgcctgaggcgaagctggttgagtgcatcggtcaggaattaatattcttgcttcctaacaagaacttcaaacaccgggcgtatgccagcctgtttagggagctggaagaaacactcgctgatttgggcctgtcttcctttgggatctccgacacaccactcgaggaaattttcctcaaggtgacagaggacagtgatagtggccccctcttcgccggcggggcccagcagaaacgagagaatgtgaatccgcgccatccttgtctcggcccacgagagaaggctggtcagacacctcaggactctaacgtttgttccccaggtgctcccgccgcacatcctgaaggccaaccgcctcctgagcctgagtgtccagggccacagctaaacacaggcacacagctggtgctgcaacacgttcaggcattgctcgtgaaacgtttccagcataccattcggagccacaaagactttctcgctcaaatcgtactgcccgctacctttgtgtttctagctctaatgttatccattgtcattccaccatttggagagtatccagccttgaccttacatccgtggatctacggacagcagtatacttttttcagcatggacgagccgggatccgaacagttcacggtgctggccgacgtacttttgaataagccaggcttcgggaaccgctgtctgaaagaaggttggctgcccgagtatccatgtgggaatagcaccccctggaagaccccatccgtgtctccaaatatcacacaactctttcagaagcagaagtggactcaagtcaatccaagtccctcctgccgatgctcaacacgagagaagctgaccatgctgccagaatgcccagagggggcaggaggccttcctccacctcaacgaacacaacgctcaacagaaatcttgcaggacctcacagaccgaaacattagtgactttctggtgaaaacatatccggctttgatcaggtcctccttgaagagcaagttttgggtcaatgaacagcgctacggtggtatctcaattggtggcaagttgccagtggtgccaattaccggggaggcccttgtgggtttcctatccgacttggggcgcattatgaacgtgagcggagggcccataacgcgggaggcttctaaggaaatacctgacttcttaaaacacctggagacagaagacaatattaaagtttggtttaacaataaaggatggcatgccctcgtgtccttcctcaatgttgctcataacgccatactgagggcgtccctccctaaggatcgaagcccagaggaatatggaatcactgtcatctcacaacctctaaatctgacaaaagagcaactttctgaaatcaccgtgctgaccacatctgtggacgctgtcgtggccatttgcgtaatcttcagtatgagcttcgtgcctgcctcatttgtcctgtatctaatacaggaaagagtcaacaagtcaaagcacctccagttcatctcaggagtgagccccactacatactgggtgactaatttcttgtgggacattatgaactatagcgtgtctgctggcctggtggtcggaatctttattggcttccagaaaaaagcttacacatcacctgaaaatctgcctgctttagtagcattactcctcctttatggatgggccgttattcccatgatgtaccctgcatctttcctgttcgacgtaccaagcaccgcctatgtcgcgctgagctgtgccaatctcttcataggtatcaacagttcagctatcacattcatccttgagctgtttgaaaataataggaccctgctgaggtttaatgcggtccttcggaagctcttgatcgtgttcccccatttttgtctgggcagagggttgatcgatctcgcgctgagtcaagccgtcacagacgtgtacgcccgtttcggagaagaacactctgctaatccgtttcactgggatctgattggcaagaatctgttcgccatggttgtggaaggagtggtgtacttcttgctgaccctcctggtgcagaggcatttctttctttctcagtggattgctgaaccgacgaaagaacctatcgttgacgaggacgatgacgtggccgaagaacgtcagcggattattactggcggaaataaaactgacattttgaggcttcacgagctcaccaaaatataccctggaacgtcgtccccagccgttgacaggctctgcgtgggagtgcgccccggagagtgctttggtttgctaggcgtgaatggagccgggaagaccactactttcaaaatgcttacgggtgataccaccgttacctctggtgacgccactgtcgctggcaagagcatcctcactaatatatccgaggtgcaccagaatatgggatattgtcctcagtttgacgccattgacgaactgctgaccggtcgggaacacctgtatctatatgctagactgaggggggtgcctgcagaggaaattgaaaaagtggctaattggagcataaagagtctgggcctcacagtctatgccgattgtctggcaggcacatattcaggaggaaacaaacggaagctgtccaccgccattgccctcatcggatgcccacccttagtcttactggacgagcccaccaccggcatggatccacaggcccggcggatgttgtggaacgtgatagtcagcattattcgggagggccgggcagtggtcctgacgagccattccatggaagaatgcgaagccttgtgtacacggctcgcaattatggttaaaggagcgtttcggtgcatggggacaattcagcacctgaagtctaagtttggagatggctacatcgtcactatgaaaatcaagagtcctaaagacgacctcttgccagatcttaaccctgtggagcagttttttcagggcaacttcccagggtccgtacagagggaacgacactacaacatgctgcaatttcaggtgagtagcagctcccttgcaaggatctttcaactgctcctctcccataaggattccctgcttatcgaagagtacagcgtgacacaaactacgctggatcaggtgttcgtgaactttgccaaacagcagacagagagtcatgaccttccactccatcccagagccgccggtgcctccaggcaggctcaggattag

SEQ ID NO: 179957 - DNA, 2940 bp, synthetic construct
  misc_feature 1..2940: note = Description of Artificial Sequence: Synthetic coding sequence
  source 1..2940: mol_type = other DNA
atgggcttcgtgcggcagatccagctgctgctgtggaagaactggacattgagaaaaagacagaagatcaggttcgtggtagagctcgtatggccactgtcattgtttctggtactcatctggttgcgcaatgccaaccctctctattctcatcacgagtgtcattttccaaataaagccatgcccagtgccggaatgctgccttggcttcagggtatcttctgcaatgtgaataacccttgctttcagtcacccacgcctggcgaaagtcccgggatcgtcagcaattacaataatagcatcctagcaagggtgtatagggactttcaagaattactcatgaacgcgccagaatcacagcacttgggccgcatctggaccgagctccatatcctgagtcagtttatggacaccttgcgcactcaccctgagaggatcgctggccgtggcatccggatccgggacattctgaaagacgaagaaacattgactctcttcctcatcaagaacattggtctttctgactccgtagtgtatctcctgattaacagccaagttaggcctgagcagtttgctcacggagtacccgatctggccctcaaagacattgcgtgtagcgaggccttactggaacgtttcattattttcagccagcgaaggggagccaagactgttcgctacgccctgtgttcactcagccaggggactttgcagtggatcgaagacacattatatgctaacgtggacttttttaaactcttccgcgtgctgcccactctgctggattctcgttcccagggtatcaacctgagatcctgggggggaatcttgtcagacatgtcacctcgtattcaggaatttatccatcgaccctctatgcaagacttactgtgggtgacacgaccgctcatgcagaacggtggtccggaaacatttacaaagctgatggggatactcagcgacctcttgtgcgggtatcctgagggcggcggctctagagtgctgtctttcaactggtatgaagacaacaactacaaagcgtttctggggatcgacagcacaagaaaagaccctatatacagttacgaccgtagaaccacatctttctgtaacgcgttaattcaaagtctagaaagtaatcccctcacaaaaatcgcctggagagctgcgaagccacttcttatgggaaaaatcctgtatacacccgactctcccgcagcacgccgaatactgaaaaatgcaaattcaactttcgaggaattggagcacgtgcggaagctcgttaaggcttgggaagaagtcggcccgcagatctggtactttttcgataatagcacacagatgaatatgatccgtgatactctcggtaatcccaccgtaaaagatttcctgaatagacagctcggagaagagggcattaccgcagaagcgatcctgaactttctttacaagggacctcgggaatcccaagctgatgacatggctaactttgactggcgcgatattttcaacatcaccgatcggactctaagactggttaaccagtatttagagtgtctagttctggacaagttcgaaagctataacgatgagacacagctaactcagcgcgcactatctctgctggaggaaaacatgttttgggcgggcgttgtttttcccgatatgtacccttggactagttcacttccaccacacgtcaaatacaaaattcgcatggatatagacgttgtggagaagacgaataagatcaaggacaggtactgggacagtggtccccgagccgatccagtcgaggacttcagatacatttggggtggatttgcatacctgcaggatatggtggagcaaggcattactcggagccaggtgcaggctgaagccccggttgggatctatctgcaacagatgccgtacccatgctttgtagacgattctttcatgataatcctgaacaggtgttttcccattttcatggtattggcatggatttatagtgtgagcatgaccgtcaagagcatcgtcctggaaaaggagctccgactcaaggaaacattgaagaatcagggggtgtcaaacgccgtcatctggtgcacctggtttttggacagcttcagtattatgtctatgagcatcttcctgctcacaatcttcattatgtccttactgtctcctgtcgcatttggctttgggacagaatatcttgtgcgcttcgaggaacaaggtctcggcctgcagtggtctaatattgggaactcaccgacagaaggtgatgagtttagtttcctgcttagtatgcagatgatgcttttggacgctgctgtatatggtcttcttgcctggtaccttgaccaggtattccctggggactacgggacccccctgccttggtactttttgctgcaggaatcttattggttgggcggggagggatgttcgacacgggaagagcgcgcgctcgaaaaaaccgagcctttaaccgaggaaacagaggaccctgagcacccggaaggcatacatgattctttcttcgaaagggagcaccctggctgggttccaggcgtgtgtgttaagaacctggttaaaatctttgagccttgcgggcggccagccgtagaccggctcaacattacattctatgagaaccagatcaccgccttcctaggtcataatggtgcaggaaagacaacaacgttttccgcaggagctccactgtcctccaaaggtccagagaggcacttattacgaggcgagcatgggccaccgtggttcccaaaggagcaacagactcgcacatcacagggggccgcgaacccaagagacaccgtctttaaatctttcggcgagccacaggaggggactaccgcttgtacgccttgtgatgggatgtttagtcgggcagtacaatgcgagtggaacgttggacccgtccccttttag

SEQ ID NO: 179958 - DNA, 1179 bp, synthetic construct
  misc_feature 1..1179: note = Description of Artificial Sequence: Synthetic coding sequence
  source 1..1179: mol_type = other DNA
atggtggtggagggcgtggtgtacttcctgctgaccctgctggtgcaacgccactttttcttatcacagtggatcgccgaaccaacaaaggaaccaattgttgatgaggacgatgatgtggccgaggaacgccagagaataattacggggggcaataaaactgatattttaaggctgcacgagctgactaaaatctaccctggcacctcatctcccgcagtggatcgtctgtgcgtgggcgtgcgtcccggcgagtgtttcggactgctcggagttaacggtgccggcaagaccacaacctttaagatgctcaccggggatacaaccgttacttccggggatgctactgtggctggcaaaagtatactcaccaacatatcagaggttcatcagaatatgggctactgcccacagtttgacgccatagacgagttgctgaccggtagggaacatctgtatctctacgcacgcctgaggggggtaccagccgaagaaatagaaaaggtggccaactggtccatcaagtcactgggcctgaccgtgtacgcagactgcctggcggggacctatagcgggggcaacaagcgcaagctcagtactgccatcgctttaattggatgccccccattggttcttctggatgaaccgacaactgggatggaccctcaggcacggcggatgctttggaatgtgattgttagcattattagggaggggcgtgccgtggtcctgacctcacactctatggaagagtgtgaggccctgtgcacaagactcgctataatggtgaagggcgctttccgatgcatgggcacgatccaacatctcaagtccaaattcggagacgggtatatcgtgactatgaagataaagtccccaaaggatgacttgttgcccgatctgaatcccgttgaacagttttttcaggggaacttcccaggttccgtccaaagggagcggcactataatatgctccagtttcaagtgtcatcgtcttccctcgcacggatctttcagttgctgctgtcacacaaagacagcttgctgatcgaggagtactccgtcacccaaaccaccttggatcaagtcttcgtgaactttgccaagcagcagacagagagtcatgatttacctctccatcctagggccgcaggggcttcaagacaggctcaagactag

SEQ ID NO: 179959 - DNA, 1632 bp, synthetic construct
  misc_feature 1..1632: note = Description of Artificial Sequence: Synthetic coding sequence
  source 1..1632: mol_type = other DNA
atgatgatgaactacagcgtgagcgccggcctggtggtgggcatcttcattggctttcagaagaaggcatacacgagcccggaaaacttgcccgcccttgtggcgctgctcctgctctatggttgggcagtgataccaatgatgtatcctgcttcttttttattcgacgtgccatcaacagcctatgttgccctgagttgtgctaacttgttcatcggcattaacagtagcgcaattacgtttatcctggaactttttgaaaataaccgaactctcctcagattcaatgcagtacttcgaaaacttctgattgtgttcccccacttttgtttgggtcggggcctgatcgaccttgcgctctcccaggcagttacagacgtctacgcaaggtttggtgaagagcactcagctaacccttttcactgggatctgatcgggaagaatctgtttgccatggtggtcgaaggagtcgtctactttctgttaaccctgctggttcagcgccactttttcctgagtcaatggatagccgaacctacgaaagagccaattgtggatgaagacgacgacgtagccgaggaaagacagcgcataataacgggcggaaacaagaccgacatccttagattgcacgagctgaccaaaatttatccgggaacttccagcccagccgtggacaggctctgcgtcggggtgcgacctggggagtgcttcggccttctgggggtgaacggggctggaaagaccacaaccttcaaaatgctgactggcgatactactgtaactagtggagacgccactgttgcaggaaaaagcatcctgacaaacatctctgaggttcatcagaacatggggtactgcccacaattcgacgcaatcgatgaattattgactggaagagagcatctgtacctctacgcccgcctgcgtggggtgcctgcagaggagattgaaaaggttgcaaactggtccatcaagtcactgggcttgacagtgtatgccgattgcctagctggcacttacagcgggggcaacaaacgcaagctgtctaccgctatagctctaataggatgccccccactggtactgctggacgagccaacaaccggcatggaccctcaagctagaagaatgttgtggaacgtgatcgtctcaatcatccgagagggcagggccgtcgttcttacttcccacagtatggaggaatgcgaggcattatgtactcggctggccatcatggtcaaaggcgccttcagatgtatgggtacaatccagcacctgaaatctaagtttggggatggatacatcgtcaccatgaagatcaagagccccaaggacgaccttctgccagatctgaatcccgtagagcagttcttccagggcaacttccccgggagcgtacaaagagaacgacactataatatgttacagtttcaggtctcgtcatcatccttagctaggatcttccagctcctgttgtcccataaagacagcctcctaattgaggagtattctgtgacccagacaactttggaccaggttttcgtcaactttgccaaacaacagacggaatcccacgacctccctttacatccaagagccgctggtgcctctaggcaggcccaggattag

SEQ ID NO: 179960 - DNA, 3198 bp, synthetic construct
  misc_feature 1..3198: note = Description of Artificial Sequence: Synthetic coding sequence
  source 1..3198: mol_type = other DNA
atggacgtggtgctgcaccacgtgcccgaggccaagctggtggagtgtataggacaggagctgatctttttactgccgaataaaaacttcaagcaccgagcctatgcctccttgtttcgggagctggaggaaaccctggctgaccttggcctctccagcttcggtatctctgacacaccactggaggaaatctttctgaaggtgacagaggattccgactcagggcctctctttgctggaggcgctcaacagaagcgggaaaacgtcaaccccaggcacccttgccttggaccgagagagaaagcagggcagaccccccaagattccaacgtctgcagcccgggggcccctgcagctcaccctgaaggacagccaccacccgagcctgaatgtccgggccctcagttgaacacaggtacgcagttggtgcttcagcacgttcaggctctcctggttaagcggttccagcacacaattaggtcccacaaggatttcttggcacagatcgtccttccagcaactttcgtgttcttggctctgatgctgagtatcgtcattccacctttcggggagtacccagccctcacgctgcacccctggatctacggccagcagtatacctttttttcaatggatgaaccgggatctgaacagtttaccgttctggccgacgtgttgctgaacaaaccggggttcggcaaccgttgcctcaaagagggctggctgccagagtacccctgtggcaactcaacgccttggaagactccctcagtgtctccgaatattacacagttattccagaaacagaagtggacccaagtcaatccgagccctagctgtcgatgctccacacgggagaagctcactatgcttccagagtgtcctgaaggcgccggaggcctccccccccctcagaggacacagcgaagcacagagatactgcaagaccttaccgatcgaaatattagcgacttcctcgtgaagacttacccagctctcatccggtcttcactgaagtctaagttctgggtgaatgagcagaggtacggaggtatcagcatcggaggcaagctccccgtggtcccaattaccggtgaggccctagtgggcttcctgagcgacctgggcagaattatgaacgtaagtggtggacccatcacacgggaggcaagtaaagagatccctgatttcctgaaacatctggaaaccgaagataatattaaagtgtggtttaacaataaagggtggcacgcactggtctcattcctgaacgtggctcataatgccatccttcgcgcatccttaccaaaagatcggagtcccgaagaatatggcataactgtgatatcccagcctttgaatctgacaaaagagcagttatccgaaataaccgtacttacaaccagtgtcgacgccgtcgttgccatttgcgtgatcttttctatgagcttcgtcccagcttccttcgtcctgtaccttattcaagaacgcgtgaacaagtctaagcatctgcagttcatttctggcgtttctccaacaacctactgggtcacgaacttcctttgggacatcatgaactactccgtgagtgctggactggtggtaggcatatttattggctttcagaaaaaggcatacacttctccggagaacctgcctgccctcgtagcgttacttctactctacgggtgggcagtgatacccatgatgtacccagcttctttcctgttcgatgtgcctagtactgcatacgtggctctgtcttgtgccaatctctttatcggaattaacagtagcgcaatcactttcattctggagctgttcgagaacaatcgaactctgctgagatttaatgcagtcctccgcaaattacttattgtgtttccccatttttgcctcggaagaggccttattgatctcgctttgagtcaggctgtgactgatgtttacgcccgctttggggaagaacacagcgccaaccctttccactgggacttgatcggcaaaaacctttttgcgatggtggtggaaggcgtggtatattttctgctcactctgcttgttcagcgacatttcttcctttctcaatggattgctgagcctacaaaggaacctattgttgacgaagatgacgacgtggccgaggagagacagcggatcatcacaggtggaaataaaaccgatattcttaggttacatgagttgacaaaaatctatccgggtacatcatcaccggctgtagacagattatgtgtgggagtcaggccgggggaatgttttgggctgcttggcgtcaacggcgcaggcaaaacaactacatttaaaatgctgactggggatacgaccgtaacttctggcgacgctactgttgccggtaagagcatccttaccaatatatctgaggtgcatcaaaatatgggatattgtccgcaattcgacgcgattgacgaactgctgacaggacgagaacacctctacttatacgccaggctccgtggcgttccggccgaggaaatcgaaaaggtggcgaattggagcataaaatcgttaggcctgacggtgtacgccgattgtcttgcgggaacctattccggtggcaacaaacggaagttgtcaacagccatcgctctcatcggctgcccccccctggttctactggatgagcctaccacaggcatggatccacaggcccggaggatgctgtggaacgtgatagtgtcaatcataagggagggcagagccgtggtgctgacgtcccactccatggaggagtgcgaagccctctgtacacgcctcgcgatcatggtgaaaggtgcattccgctgtatgggcacaatccagcatctgaaatctaagttcggtgatgggtacatcgtgaccatgaagatcaagagtccaaaagatgatcttctcccagatttgaaccccgtagagcagttcttccagggaaatttccctgggagtgtccaaagggagcggcattacaacatgcttcaatttcaggtgtcttcgtcttccctggcccggatcttccagctgttactaagccacaaagactctctcctgatcgaagaatactcagttacacaaacaaccttagatcaggtgttcgttaacttcgctaagcagcagacagagagccatgacctcccactgcatccaagggccgccggtgcatctaggcaggcccaagattag

SEQ ID NO: 179961 - DNA, 4929 bp, synthetic construct
  misc_feature 1..4929: note = Description of Artificial Sequence: Synthetic coding sequence
  source 1..4929: mol_type = other DNA
atgagcaccgccatccgggaggtgggcgtgtggcggcagacccggaccttactgctgaagaattatctgatcaaatgtcggacaaagaagagttccgtccaggaaattctctttcctctgttcttcttgttctggttgatcctgatatcaatgatgcatcctaataaaaagtacgaggaagtaccaaatatagaactcaatcccatggacaagttcacactctcaaatctcatcctcggctataccccagttactaatattacatcttctatcatgcagaaggtctctaccgaccacttgcctgacgtcatcatcacagaggagtacacaaatgagaaagagatgctcacaagctctctctctaaacccagcaacttcgtgggcgtagtgttcaaggatagcatgagctacgaactgcgtttcttcccggatatgattcctgtgtcatctatttatatggattctcgcgcaggatgttccaagtcatgcgaggctgctcagtactggagcagcggctttacagtgctgcaggcctctatcgatgcagccattatccagttgaaaacaaacgtcagcctttggaaggagctggaatcgacaaaagcggtgatcatgggagaaactgctgtggtggaaattgatacctttccacgaggcgtcattctgatataccttgttattgcttttagcccgtttggctatttcctggccatccatatcgtcgccgagaaagagaaaaagatcaaggagttcctcaaaatcatgggcctgcatgatacagccttttggctcagctgggttttgctctacacctcactgatcttcctgatgtctttgctaatggcagtcattgctactgcctctctgctttttccccagagcagctctattgtcatatttcttttattcttcctgtacgggctgtcgtcagtgtttttcgctctgatgctcacacctctcttcaaaaagagtaagcacgtgggcattgtggagttctttgtgactgttgccttcgggttcattggtctgatgattatcctgattgagtcctttccgaaatccttggtgtggctgttttcgcctttctgccactgcaccttcgttatcggcatagcccaggtgatgcacttagaggacttcaatgaaggtgctagtttctccaacctgactgccggaccttaccccttgataatcaccatcattatgcttaccctgaactccatattttacgtcttgctcgcagtctatcttgatcaagtcatacccggagaattcggactgcggagatcaagcctgtatttcctcaagcccagttattggtctaagtccaaacgaaattacgaggagctatccgaaggaaacgtcaatggcaatatcagtttctccgagatcatcgaaccagtgtcaagcgaatttgtgggcaaggaggcgatccggatctcgggaatccagaagacgtatcgtaaaaagggggagaatgtagaggcccttagaaacttgtctttcgatatctacgagggccagattaccgctcttctgggacatagcggtactggcaaatcaactctgatgaatatattatgcgggctttgcccaccttctgacggttttgcgtccatttacgggcatcgagtgtccgagatagacgaaatgttcgaagctcgcaaaatgatcggcatctgtccgcaactcgacatccactttgacgtgctcacagtcgaggaaaatcttagcatcctcgcctctatcaagggcataccagccaataatatcatacaggaagtgcagaaggttcttctggacctggacatgcagactattaaggataatcaagcaaagaaactgtctggcgggcagaaaagaaaactcagtctgggaattgccgtgcttggcaatcccaagatcctcctactggatgaaccaacagccgggatggacccgtgttcacggcacatcgtttggaacctgctgaaatatagaaaggctaaccgggtcaccgtattcagtacccacttcatggacgaggcagacatattggcagatcgcaaagccgtgatcagccaggggatgctgaaatgtgtggggtcatcaatgtttctgaagtcaaagtggggtattggttacaggttgtcaatgtatatcgacaagtattgcgcaacggaaagcctgtcaagcctggtgaaacagcatataccaggagctactctgcttcagcagaatgatcagcaactggtgtatagcctgccgtttaaggatatggacaagttttctggactcttttctgccttagatagtcattctaacttgggggttatcagctacggggttagcatgaccacattggaggacgtattccttaagctggaggtagaggccgaaatcgaccaggccgactactctgtgtttacacagcagcctctggaggaagaaatggatagtaaatcctttgatgagatggaacagtccctgttaatcctgtccgaaaccaaggctgccctagtgagcactatgagcctgtggaaacagcagatgtataccatcgctaagtttcatttttttacattaaaaagggagtctaaaagtgtgcgaagcgtgctcctgctgctcttgattttttttactgtgcagatatttatgttcttggtccaccacagcttcaaaaatgccgtcgtaccaattaaactggtgcctgatctatattttctgaaacctggagataagcctcacaaatacaagacctcacttcttttacagaactcggcagactccgacatcagcgatctcatcagtttctttacctctcagaatatcatggtcacaatgattaacgatagtgactacgtcagcgtggcacctcactcagccgccctgaacgtgatgcactctgaaaaagattatgttttcgcggccgtattcaattcgacaatggtgtatagcctgcctatcctcgtcaatatcatctccaactattatctataccatctaaatgtgaccgaaacaatccagatttggtctaccccgttctttcaggaaatcacagacatagtttttaagatcgaactttactttcaggctgctttgctggggattatcgttaccgcaatgcccccgtacttcgcaatggagaatgcggaaaatcataaaattaaggcttatactcaactgaaactgagtggcctactcccttcggcttactggataggacaggccgtggttgatatcccactgtttttcattatcctgattcttatgctgggctctctgctggcattccactatggattatacttctacacagtaaagttcctggccgtggtgttctgcctcataggctatgttccctctgtgatcctctttacttatatcgccagcttcacttttaagaaaattttaaataccaaagaattttggtcgttcatctacagcgtcgcagccctggcgtgcattgccattacagagattaccttttttatgggttacaccattgctactattcttcattatgccttctgtatcatcatccctatctaccccctattgggatgtctaatatccttcatcaagatttcttggaaaaacgtgcgcaagaacgtcgacacctataacccttgggatcgtctgtctgtggcagtgatcagtccttacctccagtgcgtattgtggatatttttgctccagtattacgaaaaaaaatacggcgggcggagtatacgcaaagaccccttttttagaaacctaagcaccaagtcgaagaatagaaagctcccagagccccccgataacgaggatgaagatgaggacgtcaaagccgaaagacttaaagtcaaagagctgatggggtgtcaatgctgtgaagagaagccctccattatggtcagtaatctgcacaaagagtacgatgacaagaaagacttccttctgagcagaaaggtgaagaaagtggcaacaaagtatatcagcttctgcgtgaagaagggcgaaatcctgggcttgcttgggccaaatggggcgggcaagagcactattattaacattttggtcggcgacatcgaacctacatcaggccaggtgttcctcggggactactcatccgaaacctccgaggacgatgactccctgaaatgcatgggctactgcccccaaatcaaccccctgtggcctgatactactttgcaagagcactttgagatttacggggctgtgaaaggcatgagcgccagtgacatgaaagaagtgatctctagaatcacccacgcactggatctcaaagagcatttgcaaaagacagtgaaaaaactgccggccggtatcaagagaaagctgtgttttgccctgagtatgctgggcaatccacaaatcacgctcctggacgagcccagtacaggtatggatcctaaagctaagcaacatatgtggagagcaatccgcacagcgtttaaaaacagaaagcgcgccgccattctgacgacacactatatggaggaagcggaagccgtgtgtgatcgcgtggctattatggtctccggtcagctgcgatgtataggaacggtgcagcacctaaaatctaagtttggcaagggatatttcctggagattaaactaaaggattggatagagaaccttgaagttgatcggctgcagagggaaatccagtacattttcccgaatgcatcgcgtcaggagagcttttccagcattctggcttacaaaatccccaaggaggatgtccagtccctgtctcaatcctttttcaagctcgaagaggcgaaacacgcatttgccatcgaggagtactctttcagccaggccacactggagcaggtgtttgtggagctgaccaaggaacaggaggaggaggacaattcatgtggtactctgaatagcacactttggtgggaacgaactcaggaggatagggtggtcttttag

SEQ ID NO: 179962 - DNA, 4932 bp, synthetic construct
  misc_feature 1..4932: note = Description of Artificial Sequence: Synthetic coding sequence
  source 1..4932: mol_type = other DNA
atgagcaccgccatccgggaggtgggcgtgtggcggcagacccggaccctgttactgaagaactatctcattaaatgccgcacaaaaaaaagttcagtgcaagaaattttgttcccgctgttcttcctcttttggctgatcctgatctcgatgatgcaccccaataaaaagtatgaagaggtgcccaatattgaactgaacccaatggacaagtttacattaagcaatctgatcctgggatacacccctgtcaccaatattacttcttcgataatgcaaaaggtgtctaccgaccacctccctgatgttattataactgaggaatatactaacgagaaagagatgcttacttctagcctgtccaaaccttccaatttcgtgggggtggtcttcaaggattccatgtcctatgagctacgctttttcccggacatgatccctgttagttccatatacatggattccagagccggctgttctaaatcatgcgaggcggcacagtactggtcttcaggctttacggttctgcaggctagcattgatgccgctatcatccaactaaagacaaatgtcagcctctggaaggaattggagtcaactaaggcggtgataatgggtgagacagctgtggtggagatcgatacatttccccgcggagtgatcctaatttacttggtgatagcttttagcccattcgggtacttcttggccattcacattgttgcagagaaggaaaaaaaaatcaaggagtttctgaaaatcatgggcctccatgacacggctttctggttatcttgggtgctactctatacatcattgatcttcctgatgtctctcctaatggccgtgattgctacggccagtctgctgttcccacaatcatcatccatcgttatcttcctgttgttctttctgtatggactcagttcagtcttttttgctctgatgttgacacccttatttaagaagagcaagcatgtggggatcgtggagttcttcgtcaccgttgcattcggatttattggattgatgatcatactgattgagagcttcccaaaatcgctggtttggctgttctcacccttttgccactgcacatttgtgattggcatcgcccaggtgatgcacctggaggacttcaacgaaggagcctcattctcgaacttgactgcaggcccgtacccactaatcataaccatcatcatgctgaccctcaactctatattttacgtgctgttagcagtctacctggaccaggtcatccccggagagttcggattaaggaggagctccctctatttcctcaagccatcatattggtccaaaagtaaacgcaattatgaggaactgagcgaaggtaatgtaaacggaaacataagcttctccgaaatcatcgaacctgtgagctccgaattcgtcggcaaagaagccattcggattagcggcatacaaaaaacttataggaaaaagggggagaacgtggaagccttgagaaacctgtcgttcgacatctacgagggccagataaccgcattgttaggccattcgggcacaggtaagagcaccctgatgaatatcctgtgtggtttatgccctccttctgacgggtttgctagtatctacggccaccgggtgtcagaaatagatgaaatgttcgaggcacgcaaaatgatcgggatttgtccacaactggacatccacttcgacgtgttaacggtggaggagaacctgtcaatcctcgcaagtattaaagggatccctgctaacaatattattcaggaggttcagaaagtacttttggatctagacatgcagaccataaaggacaaccaagccaagaagttgagcgggggccagaagcggaagctgtcactcggaatcgcagtgctggggaacccaaagattcttcttttagacgaaccaacggcaggtatggatccctgctcccgtcacatcgtttggaacctccttaagtataggaaggcaaaccgagtgacagtgttctcgacccattttatggacgaggccgatatcctcgccgatagaaaagccgtcatttcacagggtatgttgaagtgtgtagggagcagcatgtttctcaagagcaaatggggaatcgggtatagattgagcatgtatattgataaatattgcgccactgaaagcctttcctcattagtcaagcagcacattccaggcgccacgcttctccagcagaacgatcagcagctggtgtacagcctgcctttcaaggatatggataagttcagcgggctttttagcgctttggatagtcattccaaccttggagtgattagctacggggtctctatgacaactctagaggacgtttttctgaagctggaggtcgaggctgagatcgaccaggctgactactctgtgttcacacagcaacccttagaagaggagatggattctaagtccttcgatgagatggaacagtcattacttattctgtccgagacaaaagctgcgctggtttccaccatgtccctctggaagcagcagatgtatactatcgcaaagtttcattttttcacactcaagcgtgagtctaagtctgtgcgatcagtgctcctactgctgctgatcttttttaccgtgcagatcttcatgttcctggtacaccactctttcaaaaacgctgttgtgcccatcaaactggttccagatttatacttcttgaagcctggagataagccccacaaatacaaaaccagtcttctgctgcagaactccgctgccgacagtgatattagcgatcttatctctttctttactagccaaaatataatggttaccatgatcaatgacagcgattacgtgagcgtcgccccccatagcgcggcactgaacgtcatgcacagcgagaaggactacgtctttgccgcagtctttaactcaactatggtgtacagccttccaattctagtgaacataatctcgaattattacctgtaccacctcaacgtaacagagaccattcagatctggtcaacccctttctttcaagagatcactgatattgtatttaaaatagagctttacttccaagccgcgctcctcggaattatcgttaccgccatgcctccatactttgccatggaaaatgctgaaaaccacaaaattaaagcctacacacagctgaagctcagtggccttctaccaagcgcctattggatcgggcaggctgttgttgatatccctctgttcttcattatcttaatacttatgctcgggtcgctgctggcgtttcactatggactctatttctacacagtcaagtttcttgcagtagtgttttgtttgatcggttatgttccaagcgtgatcctgtttacatatatcgctagctttacatttaagaaaatattgaatactaaagagttctggtcattcatctactccgtggctgcactggcatgtattgccataaccgaaattaccttttttatggggtacactatcgccaccatactccactacgctttttgtatcattatccccatctacccccttcttgggtgtctcatatcattcatcaaaatttcctggaaaaacgtcagaaagaatgtcgacacctacaatccttgggacaggctcagcgtggcagtcatcagtccttacctccagtgcgttctttggatttttttgctgcagtattatgagaaaaagtacggcggacgtagtatcaggaaagacccgtttttcaggaatctaagcaccaagagtaagaaccggaagctccccgagccgccagacaatgaagacgaggatgaggacgttaaggccgagcggctaaaagtaaaggagcttatgggctgtcaatgttgcgaggagaagccatcaatcatggtatcgaacctccataaggaatatgacgacaagaaagatttcctgctcagcaggaaggttaaaaaagtggccacaaagtacatttctttttgtgttaaaaagggagaaatcctgggactgctgggacccaacggtgcaggtaagtccacaatcataaacattctggtcggtgacattgaaccaacgtctggacaggtgtttcttggggattattcctcagagacctctgaagacgacgacagcctgaaatgcatgggatattgcccacagattaaccccttatggcccgatactacacttcaggaacattttgagatctacggcgccgttaaaggcatgagcgccagtgatatgaaagaggtaattagcaggatcacccacgctctcgatctgaaagaacacttacagaaaacggtcaagaagctgcccgctgggattaagcggaaactatgcttcgccctgtccatgttgggcaacccccaaattacgctgctggatgagcctagtacaggaatggatcctaaagcaaagcagcatatgtggagagctatccggaccgcattcaagaaccgtaagagagctgcaatccttacaactcactatatggaagaggcagaggcggtttgcgatcgtgttgctattatggtgagcgggcaattgcggtgcattgggaccgttcagcacctgaaatccaaattcggaaaagggtacttcctggaaattaagctgaaggactggatcgagaatctagaggtggatagactgcagagagagatccaatatatcttccctaacgcctcccgccaggaatccttttccagtatcctggcctataaaatcccaaaggaagatgtgcaaagcctgagtcagtcgtttttcaaactggaggaggctaagcatgcttttgccatagaggagtattccttcagtcaggccaccctggagcaagtattcgtcgagttgactaaagaacaagaggaggaggacaactcctgtgggacgctaaatagtaccttgtggtgggaaagaacacaggaggatcgggtcgtattttag

SEQ ID NO: 179963 - DNA, 4854 bp, synthetic construct
  misc_feature 1..4854: note = Description of Artificial Sequence: Synthetic coding sequence
  source 1..4854: mol_type = other DNA
atgaacatgaagcagaagagcgtgtaccagcagaccaaggccctgctttgcaaaaactttctgaagaagtggagaatgaagagagagtccctgctcgaatggggcctaagcatccttctgggcctctgtattgctctgttcagctcctctatgaggaacgttcagttccctggcatggccccccagaatctcggcagagttgataagttcaacagtagcagcttgatggtagtatacactccgatcagcaatttgacccagcagataatgaacaaaacagcgctagcacccttgctgaaagggacaagcgtcatcggggccccgaacaagactcatatggacgagatcctgcttgaaaatcttccctatgcaatggggattatcttcaatgaaaccttttcctacaaactgatcttctttcaggggtacaattctcccttgtggaaagaagacttcagcgcccattgctgggatggctatggtgaattcagctgtaccttgacaaagtactggaacaggggattcgttgccctgcagacagctatcaatacagccatcatcgagatcaccacaaaccacccagtcatggaagagcttatgtccgtcactgctataactatgaagactttgccttttattacaaagaatcttctgcacaatgagatgttcattctgttcttcctcctgcacttctctcctcttgtatatttcatttcgctcaacgtgaccaaggaaagaaagaaaagcaagaatctgatgaagatgatgggattgcaggatagtgccttttggttgtcctgggggctgatctatgccggctttattttcatcatttctatctttgtgacgatcattatcacatttacacagataatcgtcatgacaggatttatggtgattttcatcctgttctttttatatggactgtctctcgtggccttggtctttcttatgtctgtcctgctaaagaaggcagtccttacaaacctggtggttttccttcttacgctcttctggggctgtctaggattcaccgtgttctacgaacagttgccttcttctttggaatggattctgaacatctgctcacctttcgctttcactacaggaatgatacaaatcataaagctggattataacttgaatggggtgattttccccgacccctctggagattcttacaccatgatcgcgaccttttcaatgctcctgctcgatggcctcatatatttactgctcgctctgtattttgacaaaatcctcccatacggggatgagagacactatagcccattgttctttcttaacagctcaagctgcttccagcatcagcgcaccaacgctaaagttatagagaaagaaatcgacgcagagcacccttcagatgattatttcgagccagttgcaccagaatttcagggtaaagaggcgatccgcatccgcaacgttaaaaaggaatacaaaggtaagagcgggaaagttgaggctctcaaggggctgctgttcgatatctatgagggccagattacagctatcttgggccacagcggagcaggcaaatcctcccttttgaatattctgaacggactgagcgtgccaacggaggggagtgtgaccatttacaataaaaacctgtccgagatgcaggatctggaagagatcagaaagatcacaggggtctgcccccagtttaacgtacagttcgacattctcactgtcaaggagaacctgtccttatttgcgaagattaaagggatccacctgaaggaggtggagcaggaggtgcagcggattttactagagctggatatgcaaaacatccaggacaatcttgcaaaacatctttccgagggacagaaacgtaagcttacctttgggatcacaatattgggcgatccccaaatcctgctgctggatgaaccaacgaccgggctcgacccgttctcacgcgatcaggtgtggtctcttctgcgcgagagacgggcagaccacgttattttgttctcaactcagtccatggacgaggccgacatcctcgctgatcgaaaggtgattatgtccaacggccgcctcaagtgcgcagggagctcaatgttcctgaaaagaagatggggactcgggtaccacttatcactgcacagaaatgagatttgtaaccccgaacagatcacgtcctttattacacaccatatacccgatgctaagttgaagactgagaataaagagaaactcgtctacacccttccactcgagaggactaacacctttccggacttgttctctgacctggacaagtgcagtgaccagggggtgaccgggtacgatatctccatgtctactctaaacgaagtattcatgaaattggaggggcagagcaccatcgagcaggactttgaacaagtcgaaatgatacgagatagcgaaagcctgaacgagatggagctagcccactcctccttctcagagatgcagaccgccgtcagtgatatgggattgtggagaatgcaggttttcgccatggccagactcagatttctgaaattgaagcgccaaactaaggtactcctgactcttctcctggtattcggaattgctatttttccattgattgtggagaatatcatgtacgccatgttgaacgagaaaatagattgggagttcaaaaacgaactgtacttccttagtcccgggcagctcccacaggagccacgaacctcactgctgataatcaataatacggagtccaatattgaagatttcatcaagagtctgaaacaccagaatatattactggaggttgatgattttgaaaaccggaatggaacagacggtctgagttataatggggcaataatcgtatcaggtaagcagaaggactatagattcagcgttgtctgtaatactaaacggttgcactgcttccctatcttaatgaacatcatcagcaatggcctcctgcagatgttcaaccacacacagcacattcggattgaatcgtcaccattcccactaagccatattgggctctggacagggttgcccgacggctcattcttcctgttcctcgtgctgtgctctatctctccctacattactatgggaagtattagtgactacaagaaaaacgctaagagtcagctgtggatctctgggctctatacctctgcctattggtgcggccaggcactggtggatgtgagcttctttattctgatactcttattaatgtacctgattttctatatagagaatatgcagtatctgctgataacaagccagatagtgtttgctcttgtgattgttacccccggctacgccgcaagcctggtattttttatatatatgatttccttcatttttaggaaacgacgcaagaactccgggctctggagcttctactttttcttcgcatccactattatgtttagcatcaccctgatcaaccactttgatctgtccattctcattaccacaatggtgttggtgccgagctacaccctgctgggcttcaaaacgttcttagaggttagagaccaagagcactatagagaatttcccgaagccaatttcgaactgagcgctaccgatttcctggtgtgctttatcccatactttcagacactgctgttcgtctttgttctcaggtgcatggagctgaaatgcggaaagaagcgcatgcgcaaggacccggtctttagaatctcgccccagtcgagggacgccaagcctaaccctgaagaacccattgatgaagacgaggacatccaaactgaacgtatcaggacagcaacagccctaacgacttcaatccttgatgagaaaccagtcattattgccagttgtctccacaaggagtacgcaggccagaaaaaatcatgcttctcaaaaagaaaaaagaagatagcggctagaaatatttcgttttgtgtacaagagggagaaatccttgggctcctcggacccaatggggcgggtaaaagcagtagcattaggatgatctccggtatcacaaaacccaccgctggggaagtggagttgaaagggtgctcctcagtcctcggacatttgggctattgtccacaggaaaatgtgctatggcccatgctgaccctgcgtgaacatctcgaggtgtatgctgccgtgaaaggactgcgaaaggctgatgcccggctggccatagcgagactagtctcggcctttaagctccacgagcagctcaatgttccagtgcagaaacttaccgctggaattacaaggaaattgtgcttcgtgctgtctctcctgggcaattcccccgtcttgctgctggatgagcctagtacaggaatcgatcctaccggtcagcagcagatgtggcaagctattcaggctgttgttaagaacaccgagagaggcgttttactgaccacacataacttggccgaagctgaagctctgtgtgacagagtcgctataatggtgagtgggagattacgttgcataggttcgattcagcacctgaaaaacaaacttggcaaggattatatcttggaactgaaagtcaaggagacgagtcaagtgacactggtacacacggaaattctcaagttattcccacaggctgccgggcaggagcgctatagctcactcctcacttataaactgccagtcgccgatgtgtaccccctgtcgcaaaccttccataagctggaggccgtcaagcacaatttcaacctggaggagtattcactgtcacagtgcaccctcgaaaaggtattcctggagttgtcaaaggagcaggaagtgggcaatttcgatgaggagatcgataccaccatgcgatggaaacttttgccacatagtgatgaaccttag

SEQ ID NO: 179964 - DNA, 1434 bp, synthetic construct
  misc_feature 1..1434: note = Description of Artificial Sequence: Synthetic coding sequence
  source 1..1434: mol_type = other DNA
atgttcagcatcaccctgatcaaccacttcgacctgagcatcctgatcacgactatggtgttggtgccaagttataccctgctgggcttcaagacattcctggaggtacgagaccaggagcattacagagaattcccagaggcaaacttcgagctgagcgccacggactttctggtttgcttcatcccctactttcagactctgttgtttgtgttcgtactacggtgcatggagctcaagtgcggcaaaaagaggatgcgcaaggatcctgtgtttaggatcagtccacaaagtcgcgacgctaagcccaacccagaagagcctatcgacgaggacgaagatattcaaacggagagaattcggaccgctacagccctgacaaccagtatccttgacgagaaacctgttataatcgcctcttgcttgcataaagagtatgcagggcaaaaaaaatcatgtttcagcaaacggaagaagaaaatcgcagccaggaacatcagtttttgcgttcaggaaggagaaatactgggactgctgggtcctaatggagcggggaaatcctcctctattagaatgatttctggcattacaaaacctaccgccggggaagttgaactgaaaggatgcagtagtgtgctgggccacctgggctactgcccacaggagaacgtgttgtggccaatgctgaccttaagggagcaccttgaggtgtacgccgcggttaagggactgagaaaggctgatgcaagactggccattgccaggttagtttctgcattcaagctacatgaacagctaaatgtaccggttcaaaagctcacagccggaattacccgcaagctgtgtttcgtcctcagcctgttgggaaatagccctgtattactccttgacgaaccctctaccgggatcgaccccactggccagcagcagatgtggcaggcaatacaggcagtggttaagaacaccgagaggggggtcctgctaacaacccataacctcgcagaggcggaggcactgtgcgatcgggtggccatcatggtttctggtcgcctgcgctgcatcggatccatccagcacctcaagaacaaattggggaaggactatatacttgagctcaaggtcaaagaaacaagtcaggtcactctcgtccacaccgagattctgaagttgttcccgcaggccgcaggtcaggaaaggtatagttcgttgctgacctacaagctccctgtggcggatgtgtatcccttatctcaaacatttcataagctagaggctgtcaaacacaacttcaacctggaagaatactccctaagccaatgcacattggagaaagtgttcctggaactctctaaggagcaagaggttggaaattttgacgaggagatcgacacaacaatgcgctggaagttgcttccacatagcgatgaaccgtag

SEQ ID NO: 179965 - DNA, 6441 bp, synthetic construct
  misc_feature 1..6441: note = Description of Artificial Sequence: Synthetic coding sequence
  source 1..6441: mol_type = other DNA
atggccttctggacccagctgatgctgctgctgtggaagaacttcatgtacaggcgccgccaacctgtgcaattgttggtggaactgttgtggcctctgttcctctttttcattcttgtggcagtgcgacatagccatcccccccttgaacatcacgagtgccactttcccaacaagccgctgccttcagctggaacagtgccatggctccaggggttgatctgcaacgtcaataatacatgctttccccaactgactccgggggaagagccaggtcggctttcaaatttcaatgattctcttgttagccggctgctggccgatgctagaaccgtgctcgggggggcttctgcccatcgcacacttgcgggactgggcaaactgattgcgaccctgagagcagcacggtcgactgcccagcctcagcctacaaagcagagtcctctggagcccccaatgctcgatgttgctgaactcctgacctccttactccgcaccgaatccctcgggctggctttgggacaggcgcaagagcctctccacagcctgttggaggccgctgaggaccttgcgcaagagctgttggccctgcggtctctcgtggagctgagggccctcttacagagaccacgggggacatctggccccctggagctcctgtcagaagctctgtgtagtgtgagagggccttccagcaccgttggcccttcccttaattggtatgaggcctcagaccttatggagctggtgggacaggaacccgagtccgctctaccagacagtagcctatcacccgcgtgctcagagctcatcggcgctttggacagtcatcctcttagcaggttgttatggaggaggctgaagcccttaatcttggggaagttactgttcgccccagacactccattcactcgtaaacttatggcccaggtgaatcgcacattcgaagagctgactctcctgcgggacgtccgagaggtgtgggagatgctcgggccacgtatctttacattcatgaacgacagctccaacgtggccatgctgcaaaggctactacaaatgcaggatgaaggcagaagacagccacggcctgggggccgcgatcatatggaagctctgaggagcttcctggaccccggcagcgggggctattcatggcaggatgcacatgctgacgttggtcacttagtcggtaccctggggagagtaacagagtgcctgtcccttgataagctcgaggctgcccctagcgaggccgcccttgttagcagagctctgcaacttctggcggagcacaggttttgggcaggcgtcgtttttttaggaccagaggactccagcgatcccactgaacacccgacaccagacctcgggccaggccacgtgcggatcaagatacgcatggacatagatgttgtgacccggacaaataaaatcagagatcgattctgggaccctgggcccgcagctgacccacttaccgacctcagatatgtctggggaggttttgtttacttgcaggacctggtggagagggccgcggtgagagtcttgagcggggctaatcccagggcaggcctgtacctccaacagatgccgtacccttgttatgtggatgatgtttttctcagagtgcttagccggtctttgccactgtttcttacactggcttggatatattccgtgaccttaacggttaaagctgttgtcagggagaaagagacccgactcagggacacgatgagagcaatgggtctctcccgcgcggtactgtggctcggatggtttctctcctgtctgggcccatttctgctgtctgcagcgctgcttgtgctagtgcttaaactgggcgatattctgccctacagccaccccggagtggtgtttctcttcttggccgcgttcgcggtggctactgttacacagagctttcttctaagcgcctttttttcccgggccaatttggccgccgcctgcggcgggttagcctacttctcgctctatctcccgtatgtcctatgtgtggcttggcgggacaggttgccggccggcggtcgggtcgctgctagcctgctgtcaccggtggcgtttgggttcgggtgtgagtcactggccttgctggaagagcagggagagggggcccagtggcataatgtagggacaagacctacagccgatgtgttcagcctggcccaggtgtcaggcctcttactgctggacgctgccctgtatggactcgccacatggtatttggaggctgtttgccctgggcaatacggaatacctgaaccatggaactttccgtttaggcgaagttattggtgtggaccacggcctcccaagtctcccgccccatgcccaactcctctcgatccaaaagtgttggttgaggaagcccccccaggcctgagccccggggttagcgtgagaagtctggagaaaaggttcccggggtctccgcaaccagcattgagggggctgagtctggacttttatcagggtcatatcacagccttcctgggtcataatggtgcagggaaaacaactacgctttccatcctctccggactgtttccgcccagcgggggaagcgccttcatcctgggtcatgatgtaaggtcatccatggccgccattaggcctcaccttggcgtgtgccctcaatacaacgtattattcgacatgctaacagtggacgagcatgtctggttttacggacgccttaaaggattaagcgccgcggttgtggggcctgaacaggatagactgttacaggatgtggggctcgtgtctaaacagtccgtgcaaacgagacacctgagcggtggcatgcagagaaagctgagtgtggcgatcgcattcgtcgggggatctcaggtcgtaattcttgatgagccaaccgccggcgtggaccctgcctccaggcgtggaatttgggaactgctgctgaagtacagggagggacgtacactgatcctgagtacccaccaccttgatgaagctgagctattgggagaccgagtcgcagtggtagccggcggccgcctttgctgttgcggcagcccactgtttttgagacgacacctgggttccggttactaccttaccctcgtgaaggccagactgccacttacaactaatgagaaagccgacacagacatggaaggctctgtggacacccgacaggagaaaaaaaatggatcgcagggcagtcgtgtgggtactccacagttattagctctggtgcagcactgggttccgggcgcccgactcgtggaggagttgccccacgaactggtactcgttctcccatacaccggggcacatgatgggagcttcgccacacttttccgtgaactcgacacccggcttgccgaactacggcttacaggatatgggatctcggatacgagcctggaagagatctttctgaaagtggttgaggaatgcgctgccgacacggatatggaagatggctcttgcggacagcatctgtgcaccgggatcgcagggctggatgtaacattgcgattgaaaatgccgccccaagagacagccttagagaacggggaacctgctgggtctgccccagagacagatcaaggcagcgggcctgatgctgtcggacgcgtgcaggggtgggctctgactaggcagcagttacaagccctgttgctcaaaagatttctcctggcgcgccgctcccggcggggcctgttcgcccagatcgtgctgccagccctgtttgtcggcctcgccctggtgttctctctgattgttcccccatttggccactatcccgctcttcgactcagcccaacaatgtacggcgcccaagttagctttttttcagaggatgcacctggggatcccggaagggcccgcttgctcgaagccttactccaagaagctgggctggaggaaccgcccgtccagcactctagtcaccggttcagcgcacctgaagtgcccgccgaggttgcaaaagtgctggcctcgggcaactggacacctgaatcaccgagccccgcatgtcaatgtagtaggccaggagccaggcggctgttgcccgactgcccagcagccgccggcggtccaccgccccctcaggctgtgacaggcagtggcgaggttgtgcagaacctgacaggtcggaatctaagcgattttttggtaaagacctatccacgactggtccggcagggactgaaaaccaaaaagtgggtgaatgaggtccgatacggggggttcagcctaggagggcgcgatcctggactgccttctggtcaggagctcggccggagcgtggaagagctgtgggctctgcttagccccctgcccggcggtgcactggatagagtacttaagaatctgacagcctgggctcacagtctggacgcccaagattccctgaaaatctggttcaataacaagggttggcattctatggtggccttcgtaaaccgggcatccaacgccatcctgagggcacacctgcctcctggtcctgcacggcatgctcactccatcactacactcaatcaccctctaaacttaacaaaggagcagctgtcggagggagccctgatggccagcagcgttgatgtcctcgtaagcatatgcgtggtgtttgctatgtctttcgtgccagctagttttacactcgttctcatcgaggaacgggtgacacgcgccaaacacctgcagttaatgggtgggctgagcccaaccctctattggttaggcaatttcctctgggatatgtgtaattacctcgtgcccgcttgtatcgtggtcctcatcttcctggcttttcagcagcgagcctacgttgcaccagctaacctgccagcccttctgctgcttttactgctgtacggatggtcgatcacccctctaatgtaccccgccagctttttcttttcagtcccttccacagcatacgtcgtgctcacctgcatcaacctgttcatcgggatcaacggatccatggccacatttgtgctggagcttttctccgatcagaaactccaggaggtctctcggatcctcaaacaggtttttcttattttcccccacttctgcctcggcagggggttgatagacatggtgagaaatcaggctatggcagacgccttcgagcgtttgggtgatagacaattccagtcacctctgcgatgggaggtggtgggaaagaatttactggccatggtcatacaagggcccttattcctcctttttactctgttactgcagcaccgatcccagctgttgccacagcctcgggtgcggagcctgccactcctgggggaggaggatgaggatgtcgctagggaaagggagagagtcgtccagggtgctacccagggggatgtgctggtgctgcgcaatctcacaaaggtgtatcggggtcaaagaatgcccgccgtagataggctctgccttggaataccccctggggagtgctttggccttctgggggtgaatggggctgggaagaccagcacttttcgcatggttactggggatacactagccagccggggagaagcagtgctcgcggggcattcggtggctcgagaaccatcagctgcccacctcagcatggggtactgtccccagagcgacgcaatttttgagctgctaaccgggcgggagcatttggaacttctcgcccgcctgcggggggtaccggaggcacaagtggcgcaaacagccggaagcggcttggcccgcctcgggttgagctggtatgctgatagacctgcgggtacctactcaggaggaaataaacgcaagctcgccaccgcactcgccctggtgggggatcccgccgtagtcttcttggacgaaccaacaacgggaatggaccctagtgcaagaaggttcctgtggaattcactgctggccgtcgtcagggaagggcgatcagtgatgctgactagccatagcatggaggagtgtgaggctctttgttctcgtctagctatcatggtgaatggcaggttcagatgtctgggtagtcctcagcatttaaaaggacgattcgccgcgggacatacgctgaccctgagggtgcctgcagccaggtctcaacctgccgctgccttcgttgccgccgagttcccaggggctgaactgcgggaagcgcacggcggtagacttaggtttcagttgccccccggtggcagatgcgctctcgcccgggtgttcggcgagctcgccgtgcacggtgcggagcacggcgtggaagacttctcagtcagccagaccatgctggaagaggtttttctgtatttctctaaggaccagggtaaagatgaagacactgaggagcagaaggaggctggggttggggtggaccccgctcccggtctgcagcaccccaagagagtcagccagttcctggatgacccatcaactgcggaaactgtcctttag

SEQ ID NO: 179966 - DNA, 6441 bp, synthetic construct
  misc_feature 1..6441: note = Description of Artificial Sequence: Synthetic coding sequence
  source 1..6441: mol_type = other DNA
atggccttctggacccagctgatgctgctgctgtggaagaacttcatgtatcgcaggcgccagccggtccagcttctggtggagctgctctggcctttgttcttatttttcatcctggtcgctgtgcggcactcacacccacccctcgaacaccacgaatgtcattttcctaataagcctttgccctcagcaggcacagtgccttggcttcaaggtctgatatgcaatgtgaataacacctgctttccgcagctgactcctggcgaagagccaggtcgcctgagtaacttcaacgattccctggtgtcgcggctactggccgatgccagaaccgttctgggcggagctagtgcacaccgtactctcgcaggactgggaaaactgatcgccacactgcgggcagcgcgcagtaccgcgcagccacaacccacaaaacagtcaccacttgagccccctatgctcgatgtcgcagagctgcttacaagtctgttgagaactgagagcctcggtttggccctggggcaagcccaagaacccctacatagcctgctggaggccgcagaagatttagcccaggagcttcttgccctgcggtccctcgtggaattgagagccctgctgcagcggccgcgggggactagtggcccccttgagctgctgtcagaggccctgtgctctgttcgggggccctcttcaaccgtgggaccatctctgaattggtacgaggcttccgatttgatggaactggttggccaggaacccgaaagcgcattgcctgatagctccctaagccctgcatgcagcgaactgatcggagcattggacagtcacccgctgtcgagactgctctggcggcggttgaaacctcttatattgggcaagctcctgttcgcccccgatacaccattcacacgtaagctgatggcacaggtaaatagaacattcgaggagctgaccttgctccgggatgtgagggaggtctgggagatgctcggaccgcgcatattcacattcatgaacgattcttcaaacgtcgcaatgctccagcgactacttcagatgcaagatgaagggaggagacagcccagaccaggcgggagggaccatatggaagcacttagaagctttctcgaccccggcagcggaggatattcttggcaggatgcccacgccgatgtgggccatcttgtgggaaccctcgggcgtgtgacagaatgtctatccctggataaacttgaggcggcaccctccgaagctgcactggtgtccagagccctgcagctgctggccgagcatcgcttttgggcaggagtggtattcctcggtcctgaagattcctcagatcccactgagcatcccacacctgaccttgggcctggccacgtgcgcatcaagatccgcatggacattgatgtggtcactaggacgaataaaatccgggaccgcttctgggatcccggacccgctgctgaccctttaactgatctccgatatgtgtggggagggtttgtttacctccaggacctggtagagagagccgctgtgcgagtgctcagcggagctaaccctagggcaggcctatatctgcagcagatgccttacccatgttacgtggatgacgtctttctccgcgtgctgagcaggagtcttcctctgtttcttacactcgcgtggatttatagtgtgactctgacagtgaaagctgtcgtcagagagaaggaaacccgtctgcgggatacgatgcgagccatggggcttagccgagccgtcctctggcttgggtggttcctatcctgtctgggccccttcctcttaagtgcagctcttctggtcttagtcctgaagttgggagacatcctgccttattcccacccaggagtcgtctttctgttcttggccgccttcgctgtggcaacagttactcagagttttctcctaagcgcgttcttcagccgagccaaccttgccgcggcctgcggtggacttgcatatttctcactgtacctcccatacgtgctctgcgtcgcctggagggatcgacttcctgccggaggacgtgtcgcagcctctctcctgtcgccggtcgcgtttgggtttggctgtgagtccctggcgctgctcgaggaacaaggcgagggggcacagtggcacaatgtcggcactcgcccgactgccgacgtctttagtctagcgcaggtgtccgggctcctgctcctggatgcagccctgtacggattggcgacctggtacctggaagcggtgtgtcctggtcaatacggtatcccagagccttggaatttccctttccgtcggtcatactggtgcggaccacgacccccgaagagcccagccccctgtcccacccctttggatcctaaagttctggtggaagaggccccccccgggctttccccaggggtttctgttcgcagtctagagaagcgctttcctggcagtcctcaacctgcactgcgtgggctaagcttagacttctaccagggccacattactgcattccttgggcataatggcgctgggaagacaaccactctatctattctgagcggcctgttccccccctccggaggatccgccttcatattgggccacgatgttagatcctccatggccgccatcagaccgcatctgggggtctgcccccagtataacgtgctgtttgatatgcttaccgtcgacgaacatgtgtggttttacgggcgactaaagggcctatcagctgcagtcgtagggcccgagcaggacagacttcttcaggatgtcggactcgtgagtaaacagagcgtgcaaacacggcacctgtctgggggaatgcagagaaagctgtcagttgccatcgcattcgttggcggcagccaggtggtaattctagacgagcctacagccggagtggaccctgctagtcggcgaggcatttgggagcttctgcttaaataccgagagggacgaacgcttatcctgtcaactcatcatcttgacgaagctgagctgcttggtgatcgggttgcagttgtcgcgggcggcagactttgttgctgcggatctcccttatttctccggcgccacttaggctccggatattacctcactctggttaaagcgagactccctctgaccacaaacgaaaaagccgataccgatatggaaggatcagtggatactcggcaagaaaagaaaaacgggtctcagggcagccgcgtggggaccccccagctcttagctctggtccagcattgggtcccaggggcccgcctggtcgaggagctgcctcacgagttggttctcgtcctcccctatactggggcccatgatggctcgttcgcaacactgtttcgggagttagacacccgcctggccgagctacgtctgaccggatacgggatatctgacacatcactggaggaaatcttcctgaaagtggttgaggaatgtgcagccgatacagatatggaggatggttcctgcggccagcacctgtgtacaggaattgccgggctggatgtgacactccgccttaaaatgcccccacaagagacggctttggaaaatggggaaccagcgggctccgcccccgagaccgaccaggggagtggccccgacgccgtgggaagggtgcaaggatgggcgcttacccgacagcagctacaagcgctactgttgaagagattcctgctggctcgcagatcccgcagggggctttttgcccagattgtgctgccagccctgttcgttggattagctctggtgttttcacttatcgtgccgcctttcggccactaccctgctcttcgtctcagtccaacaatgtatggtgcccaggtttcatttttcagcgaggacgctccaggcgacccaggtcgagcccgcctgttagaagctttgctgcaggaagccggactggaggagccacctgttcagcactcatcacacagattctcagcacccgaagtcccagcagaggtcgccaaagtgctggcctcaggcaattggacgcccgagagtccctctccagcttgtcagtgctctagacccggggccagacgactcttacccgactgcccggccgctgcaggtggtccacctccgccccaagcggtgaccgggagcggcgaggtagtccagaaccttaccgggaggaatcttagtgattttctggtgaaaacctatccccgcctcgtgagacagggccttaaaactaaaaagtgggtgaacgaagttagatacggtggctttagccttggaggaagagaccctggcctgccgtccggacaggagctgggaaggtctgtggaggaattgtgggccctcctatcacctttgccgggaggcgccctcgatagggtcctgaaaaatctgacggcatgggctcatagcctggacgcacaggatagcctgaagatttggttcaacaataagggatggcactccatggtcgcgttcgtgaatcgagcctccaacgccatacttcgcgctcatcttccaccaggacctgccagacacgctcattcaattacgaccctgaaccaccccttaaacctgaccaaggaacagctgtcagagggggctctgatggcctcatccgtggacgtactggtgagcatctgtgtggtgttcgctatgagtttcgtgccggccagcttcactctcgtgctaatcgaggagcgggttacacgggcaaaacatctccagctcatgggagggcttagcccaacactttactggctagggaattttttatgggacatgtgcaattatctggtcccagcctgcatagtggtactgatttttttggcctttcagcaaagagcctatgttgcccctgcaaatctgccagcgctcctgctgctgctcctcttgtatggatggtctatcacccccctcatgtacccagcctctttttttttcagcgtgccttcaacggcttacgtggtgctcacatgtatcaatctgtttattgggattaatgggagtatggccactttcgtgctggagctgttttccgatcagaagttacaggaagttagcaggatcctgaagcaggtcttccttatctttccgcatttttgtctgggacggggattaatcgacatggttaggaaccaggccatggcagatgccttcgagcgcctaggggaccggcagttccagtctcccttacgctgggaagtcgtggggaaaaatttgctggcgatggtcatacagggacctttgtttctgcttttcactctgctcttgcaacatcggagccagcttcttccccagccccgggtccggagtttaccgctcctgggcgaggaagatgaagacgttgctcgggaaagagaacgcgtagtccagggcgctacccagggagacgtattagtactgagaaacctcaccaaagtataccgtggacagcggatgcctgctgtcgataggctgtgtttgggaattccccccggtgagtgctttggcttactgggggtgaatggagcaggcaaaacgagcacttttagaatggtgaccggcgacacactcgcgtcgcgcggggaggcggtacttgcaggccactccgttgctcgggaacctagcgccgcccatttgagcatgggttactgcccccagtcagacgccatcttcgagctcctgaccgggagggagcacctggaactactggcccgacttaggggagtccctgaagcccaggtagcccaaaccgcgggatctggtcttgccagactaggtttgtcgtggtatgccgatagacctgcaggaacctatagcggagggaacaagcgaaagctggctaccgcgctggccctggtaggggatcctgccgtggtgtttttggatgagcccacaactgggatggacccttctgcgagacgcttcctgtggaattccctgttggcagtggtgagggaagggagatctgtcatgctcacgtcacacagcatggaggagtgcgaggcattgtgctcacgactggcaattatggtgaacggaagattccgttgcctaggttctccacagcacttgaagggccggttcgcagcaggtcataccctgacattacgtgtgccagccgcccgcagtcagcctgccgccgcgttcgtagccgccgagtttcccggagcagagcttagagaagcccacggagggagactcagattccagctcccgccgggcggacgctgtgctctcgccagagtgttcggggagcttgcggtgcacggggcagaacacggagtcgaagacttttcggtctcccaaaccatgctggaggaggtctttctgtatttctcaaaggaccaggggaaggacgaagacactgaagagcagaaggaagccggcgtgggagtggatccggctcctgggttacagcaccctaagagagtaagccaattcctcgacgatcctagtactgcagagactgtgttatag

SEQ ID NO: 179967 - DNA, 495 bp, synthetic construct
  misc_feature 1..495: note = Description of Artificial Sequence: Synthetic coding sequence
  source 1..495: mol_type = other DNA
atggccttctggacccagctgatgctgctgctgtggaagaacttcatgtatcggagaagacagccagtccagctgctggttgagctactgtggccacttttcctgttctttatattggtggcggtaaggcatagccaccctcccctggaacatcatgaatgtcatttccccaataagccccttccctccgctggcaccgtcccttggctgcagggcctcatttgcaacgtgaacaacacttgtttccctcaactcacacccggcgaggagccaggacgtctgtccaacttcaatgattccctggtgtcacgcttactcgccgacgcgagaacggtcctggggggggccagtgctcaccggaccctggccgggttgggtaaactgatcgctaccttgcgagccgctagatctaccgcccagcctcaacccacaaagcagtcgccccttgagccacccatgctcgacgttgcggaactgctcacatcactgctgtag

SEQ ID NO: 179968 - DNA, 4746 bp, synthetic construct
  misc_feature 1..4746: note = Description of Artificial Sequence: Synthetic coding sequence
  source 1..4746: mol_type = other DNA
atgcggaagcggaagatcagcgtgtgccagcagacctgggccctgctgtgtaagaacttccttaagaaatggcggatgaaacgcgaatcactgatggaatggctgaattccctgttgctgctgctatgtctgtatatttacccgcacagtcatcaggtcaacgactttagctccctactgacaatggaccttggacgagtggatacgtttaacgagtccagattttccgtcgtgtatactccagtgactaatacaacccagcagatcatgaataaggtagcttccactcccttcttggctggcaaggaagtcttgggattgccggacgaggagtcaatcaaggagtttaccgctaattaccccgaagagatcgtacgggtgacctttacaaacacatactcttaccatctgaagtttttgctggggcacggtatgccggccaagaaagagcataaagaccacaccgcccactgctatgaaacgaacgaggacgtgtattgcgaagtgtccgtcttttggaaggagggcttcgtcgccctgcaggcagccatcaatgcggccatcatagaaatcactaccaaccactcagtaatggaggaactcatgtccgttacgggaaagaatatgaagatgcacagcttcatcggccagagcggagtgatcacagatctgtacctgttcagctgtataataagtttctcctcattcatttattacgccagcgtcaacgtgactagagaacggaagcgcatgaaagcgctcatgacaatgatgggtcttcgagattctgctttttggctgtcttggggactcttgtatgcgggtttcatttttataatggccctgtttttagcactggtcatcaggagcacgcagtttatcatactgagtggcttcatggtagtattctccttgttcttgctttatggcttaagcttggttgccctggcgtttctgatgtccatcctagtgaaaaaatctttccttacgggtttggtcgtatttctgcttaccgtcttctggggctgtttaggcttcacctcactttaccgtcatcttcctgctagtctggagtggattttgtctctcctctccccgttcgcatttatgctgggcatggcacagcttctccacctagattacgaccttaatagtaacgctttcccccatcccagcgacgggtctaatctcatcgttgctaccaactttatgctggccttcgacacctgcctttatctggcacttgctatctattttgagaagatactgcccaacgagtacggtcatagacgaccaccgttattctttctgaagtcaagcttttggagtcagacccagaaaactgatcacgtcgccctggaggatgagatggatgcagatcctagttttcacgatagcttcgaacaggcccctccagagtttcagggcaaagaggctatcaggatacgtaacgtgacaaaggaatataaggggaaacccgacaaaattgaagctttgaaagacttggtctttgacatctacgaaggccagatcactgcgatactcggtcacagcggagcaggcaagtctaccctgcttaacatcctgtccggcctgtccgtgcctacaaaaggcagcgtaacgatctacaacaacaagctttctgaaatggcagatctggaaaacctgtccaaattgaccggcgtttgcccccaatctaacgttcagtttgactttctgacagtgcgggaaaatctcagactttttgctaaaattaaaggaatcttgccccaggaggtggacaaggaaatcttcctgctggatgagcctaccgcagggctcgacccctttagcagacatcaggtttggaatctgctgaaggaacgtaagaccgacagggtgatacttttctccacccagttcatggacgaggcggacatattggcggaccggaaggtttttctaagtcaggggaagctgaaatgcgctgggtcatccctctttttgaagaagaagtggggcatcggctaccacctgtccctgcagctgaacgagatctgcgtcgaggagaatatcacctctcttgtgaaacagcatatcccggatgctaaattgtctgccaaatccgaaggaaagctgatttacacacttcctctggagcgcaccaacaaattccctgaactctacaaggatctagatagctatcccgatctgggaatcgagaattacggcgtgagcatgacaactttgaatgaagtcttcctgaaattggaagggaagtcaacaatcaacgagagcgacatcgctattctgggggaagtccaagccgaaaaagccgatgataccgagcggctggtcgaaatggaacaggttttaagcagtcttaataaaatgcgcaagaccatcgggggcgtggccctgtggcggcagcagatttgtgcaattgcacgggttcgactgctgaagctaaaacatgagaggaaggctttgttagccctcctcctgatcctaatggctggcttttgtcccctgctggtggagtacaccatggtcaaaatttaccagaatagttatacttgggaactgagtcctcatctatatttcctggcccctgggcagcagccccatgacccgcttacccagctgctgatcattaacaaaactggtgcaagtatcgacgacttcattcagtccgtggaacatcagaacattgctttggaggtggatgccttcggtacgcgcaacggcaccgatgatccatcgtacaatggggccatcactgtttgttgcaatgagaagaattacagcttcagcctcgcttgtaacgctaagcggctaaactgtttccccgtgttgatggatatcgtgtccaatggacttctcggcatggtcaaaccctcagtccacattcggaccgaacggagcactttcctcgaaaacggtcaagacaaccctataggtttcttggcttacataatgttttggctggtcctcacgagctcctgtcctccctacatcgccatgtcctccatcgacgattataaaaacagagcaagatctcagttaaggatttcagggctcagtccttccgcctattggttcggacaagccctcgtcgacgtctcactctacttcctggtcttcgtgttcatttatctgatgagttatatatccaacttcgaggatatgctcctaacaatcatccatatcatacaaattccttgtgccgtcggatattctttctccctcattttcatgacctatgtgatcagtttcatttttcgtaaaggtcgcaaaaattcagggatctggtctttttgtttttacgtggtgacagtctttagcgtggccggctttgcattctccatttttgaaagtgatattccattcatcttcactttcttgatccccccagccacaatgatcgggtgcctcttcctgagttcacatctgctgttttcctccctgtttagcgaggaacggatggatgtgcagccctttctcgtttttctaatccccttcctgcacttcataatttttctcttcacactgcgctgtctggaatggaagtttggaaagaagtctatgagaaaggacccctttttccggattagtccccgcagctcggacgtgtgtcaaaatcctgaggaacctgagggagaagatgaggatgtccagatggaaagagttcgcaccgcaaatgcattaaactcaaccaactttgatgagaagcctgtgattatcgcctcgtgcctccgaaaggagtatgcaggaaaaaggaaaggctgcttttcgaaacgcaaaaacaaaatcgcaacaaggaatgtttctttctgtgtccggaagggagaggtgttagggctgctgggccacaacggagccggcaaatccacctctatcaaggtaatcaccggggacaccaaaccaactgcgggtcaggttctgctcaaagggtctggtggcggcgatgctttagagttcctgggttactgtccacaggagaacgccttgtggccaaacctcactgttcgccagcatctggaagtgtatgcagctgtaaaagggctacgtaaaggcgatgccgaagtggcaatcacgcgtctcgtggacgccctgaagctgcaggatcaacttaaatccccggttaagacactaagcgagggcattaagcgaaagctgtgcttcgtactatcaatcctaggcaatccaagcgtcgtgttgttagacgagccttccacaggaatggaccctgaaggtcagcagcagatgtggcaggctatcagagcaacttttagaaatacagagcgaggggcgcttctgaccacacactacatggctgaggccgaagcagtgtgcgacagagtggccataatggtgagtggacgactgcgctgcatcgggtccatccaacacctgaagagtaagttcgggaaggactacctgctggagatgaaagtgaaaaatttggcccaggtggagccattacatgccgaaatattgaggctcttcccacaagcagctagacaggagcgatactccagcctaatggtctacaagttgcctgttgaggatgtgcagcctttagcccaggctttctttaaactggagaaagtgaaacaatcattcgacctggaagaatactccctcagtcaatcaaccctggagcaggtcttcttggagcttagcaaggagcaggagctaggtgatttcgaagaggactttgatccttccgtcaaatggaagctcctgccccaggaggagccttag

SEQ ID NO: 179969 - DNA, 801 bp, synthetic construct
  misc_feature 1..801: note = Description of Artificial Sequence: Synthetic coding sequence
  source 1..801: mol_type = other DNA
atgcggaagcggaagatcagcgtgtgccagcagacctgggccctgttgtgcaagaactttttaaaaaaatggcggatgaaaagagagtctcttatggagtggctgaatagcctattactcttgttgtgcctttatatttatccgcactcccatcaggtgaacgattttagctcactcctcacaatggacttgggacgcgtcgacactttcaatgagagcagattttccgtggtctacactccagtgaccaatacaacgcagcaaattatgaataaggtggccagcactccatttctggccggcaaggaagtgttgggcctcccagatgaggaatctattaaggagtttaccgccaactatccagaggagatagttagggtcacctttacgaacacatatagctaccatctgaagttcctccttgggcatggaatgcccgccaaaaaagaacacaaagaccacactgcccactgctatgagaccaacgaagacgtttattgcgaagtaagtgttttctggaaggagggattcgtggccctgcaagcggccataaacgctgccattattgagattacaaccaatcactcggttatggaggaactgatgtcggttactggcaagaacatgaaaatgcacagcttcatcggacagtctggggtcatcacggatctatacctgttttcttgtattatatccttctcttcttttatttactacgccagtgtaaacgtcacaagagagcgtaagcgtatgaaggcgttgatgacgatgatggggctcagagactctgctttctggtag

SEQ ID NO: 179970 - DNA, 4866 bp, synthetic construct
  misc_feature 1..4866: note = Description of Artificial Sequence: Synthetic coding sequence
  source 1..4866: mol_type = other DNA
atgcggaagcggaagatcagcgtgtgccagcagacctgggccctgctctgcaagaactttctgaagaaatggcgcatgaagagagagtcactaatggaatggttgaattccttacttctgttgctttgtctttatatctaccctcattcccatcaggttaatgatttttccagcctcttaacaatggacttggggcgcgtggataccttcaacgagtccagattcagcgtagtctacaccccagttacaaacacaacacagcagattatgaataaagtggcatctactcccttcctcgccggcaaagaggtgctcgggctgcctgacgaggagtcaatcaaagagtttaccgccaactacccagaagagattgtccgagtgacctttacgaatacgtatagttaccatcttaagtttttactggggcatggtatgccagcaaagaaggagcacaaagatcacaccgcccactgctatgagacaaatgaggacgtttattgcgaggtcagcgtcttctggaaagaaggctttgtagcacttcaagcagccataaacgcagccattatcgagatcaccacgaatcacagcgtcatggaagagttgatgtccgtcacaggaaaaaacatgaagatgcatagctttattgggcaatctggcgtcatcactgacctgtacttatttagttgcatcatctccttcagctccttcatctattacgcaagcgttaatgtgactcgggagagaaaacgcatgaaagctctcatgactatgatgggcctcagagactccgcgttctggctttcatgggggctcctctacgcaggatttatctttataatggctcttttcctggcactcgttatccggtctacacagtttattatccttagcggctttatggtggtctttagcctgttcctgctttacggcttgagcttggtagcccttgcctttctgatgtccatcctggtcaagaaatcatttctgaccggccttgtggttttcctgctgaccgtgttttgggggtgcctaggatttacgtctctgtaccggcatctgccagcctcactagagtggattttaagtttgctttcaccatttgcctttatgctcggtatggcccagctcttgcaccttgactatgatcttaattccaatgcttttccgcatccctctgacggttccaatttgatcgtggccacaaactttatgcttgcgttcgacacctgtctctatttggccttggcaatctactttgagaaaatcttgccaaatgagtatggccacaggcggccaccacttttctttctgaagtcatccttctggtctcagacacagaagacagatcacgtggcccttgaagatgagatggatgccgacccatctttccatgactcattcgagcaagcaccacccgagttccagggcaaggaggccattcgtattcgcaatgtgaccaaagagtataaaggtaaacctgataaaatagaggccttaaaagacttggtgttcgatatttacgagggacagatcaccgccatattaggtcatagcggagccggtaagtccacccttctcaatattcttagcggtctcagtgtacccacgaaaggttctgtgactatctataacaacaagctgagcgagatggctgatctggagaaccttagcaagctcacgggggtatgcccgcagtctaatgtgcaattcgattttctgacagtccgcgaaaacctcaggctttttgccaaaatcaaggggatcctgccccaagaggtcgataaagaaatccagcgagtcctgttagagctagagatgaaaaacatccaggacgttctagcccagaacctcagcggagggcagaagaggaagcttacattcgggatagctattctgggtgaccctcagatttttctgcttgatgagccgacagcaggattggatccatttagcaggcatcaggtatggaacctactaaaagaacgcaaaacggatcgtgtcatcctgtttagtacccagttcatggacgaggccgacattctggcggataggaaggtgtttctgagccagggcaaacttaagtgtgctggatcctctctctttctgaagaagaagtggggcatcggctaccatctgagcctgcaactgaatgaaatctgtgtcgaggaaaatattacatctctagttaaacagcacatcccagacgctaagctatctgctaaatccgaaggcaagttgatctacactcttccattagagagaaccaacaagttccctgagctctataaggacctggactcctaccccgacctggggattgagaactatggagtgagtatgacaaccctgaatgaggtatttctgaaactggagggaaagtctaccatcaacgaaagcgacatcgccatccttggtgaggtccaagcagaaaaggccgatgacacggaacgactggtagaaatggaacaggtgctttcctccttaaacaaaatgagaaaaacaatcggaggtgtggctctgtggcggcaacaaatatgcgccatagcgagggtgagattactcaaactgaagcatgagcggaaagctctgctcgccctgcttctaatacttatggctggattttgcccattgttggtcgagtacacaatggtgaagatctaccagaactcttatacatgggagctatctccccacctgtactttctggccccaggtcagcagccacacgacccactgactcagctgcttattataaataagaccggtgcttccatcgatgacttcatccagtccgtggaacatcagaatattgctttggaggtcgatgccttcggcacaagaaatggtaccgatgatccctcttacaacggcgcaattactgtgtgctgcaacgagaaaaactacagttttagtctggcatgcaacgccaagcgtctgaactgctttcccgtcctcatggatatcgtgtccaacgggcttctgggcatggttaagccaagtgtgcacattagaacggagcggagtaccttcctcgagaacgggcaggataatccaattggttttctggcttacataatgttctggctggtgctcacgagtagctgcccaccttacatagctatgtcgtcaattgacgactacaaaaatcgggctaggagccagcttaggatctcgggcctctcaccctccgcctattggttcgggcaggccctagtggatgttagcctctacttcctggtgttcgtgttcatttacctgatgtcctacattagtaattttgaagacatgctcctcaccatcatccatataatccagattccctgcgcagtgggttatagtttttccctaatatttatgacgtatgttatttcctttatctttaggaaaggcagaaaaaactccggtatttggtccttttgtttctacgtggtgaccgtgttctctgtggccggcttcgccttctctatcttcgaaagcgatataccgttcatattcacgttcctcatccccccagcaacaatgattggttgtcttttcctgtcctcccatctgcttttcagtagcctgttcagcgaggagcgtatggacgtgcagccattcctggtgtttctcattccattccttcactttatcatttttctgtttacactacgttgtctggaatggaagttcgggaagaagtcaatgaggaaggatccattttttcgtatttcccctagatcttccgatgtgtgccagaacccagaagagcctgagggcgaagatgaagatgtgcagatggaaagagtcagaaccgccaatgctctaaattctactaacttcgatgaaaagccagttattattgcttcgtgtctgaggaaagagtatgcgggaaaacgaaaagggtgcttctccaagcggaagaacaagatcgctactcgtaacgtcagcttctgtgtgcggaagggcgaggtgcttgggctattaggacacaatggtgcgggaaaatctactagtatcaaggtgattactggggacactaaacccaccgcaggacaggtgctactgaagggatctggtgggggagatgcgctagagttcttgggctattgtccacaagagaatgcactctggcccaatctgacagttcggcaacacctggaggtgtacgccgctgtgaaagggctcagaaagggcgatgcagaggtggctatcactagactcgttgatgcactaaagttacaggaccagttgaagagtcccgtaaagactctttctgagggaatcaaacgcaagctgtgtttcgttctctcaattctcgggaatcccagcgttgtgctgctggatgaacccagtaccggaatggatccagaagggcaacagcagatgtggcaggccatccgtgccacattccgcaacacagagcggggtgccctgctaacgacccattatatggccgaggccgaggccgtgtgcgatagggtggcaatcatggtgagcggaagactaagatgtatcgggtcaatacagcatttgaagagcaaatttgggaaggactacctgttagagatgaaggtgaagaacctggcgcaggtcgagcctctccatgccgagattttgcgcctttttcctcaagctgcaagacaagagcggtactcgtctcttatggtctataaattgcccgtagaggacgtgcagccgttagcgcaggcttttttcaagctggaaaaggtgaaacaaagctttgacctggaggagtactctttgagccagtccacattagaacaagtcttcttagagttgtctaaagaacaggagctgggggactttgaggaggatttcgacccctccgttaaatggaaactgttgccgcaagaagagccgtag

SEQ ID NO: 179971 - DNA, 3312 bp, synthetic construct
  misc_feature 1..3312: note = Description of Artificial Sequence: Synthetic coding sequence
  source 1..3312: mol_type = other DNA
atggacctgggccgggtggacaccttcaacgagagccggttcagcgtggtttacactcccgtgacgaatactacacaacagattatgaataaagtagcctccactcctttcctcgcaggcaaagaggttctcggactgccagatgaggaatccattaaggaattcactgccaactatccagaagaaatcgtcagggtcaccttcacaaatacctactcctatcacctgaaatttctgttgggccatgggatgcccgcgaagaaagaacacaaggaccacaccgctcattgctacgagactaatgaagatgtctactgtgaagtgtccgtgttttggaaggaaggcttcgtggcccttcaggcagctataaacgccgctattattgagataaccaccaatcactccgtgatggaggagctcatgtctgtaactggtaaaaatatgaagatgcactccttcattggccagagcggcgtgattaccgacctgtatctttttagctgtataatcagtttttccagctttatctactacgcttcagtcaacgtaactcgtgagcgcaagaggatgaaggcgctgatgactatgatgggcctgagagattctgccttttggctgagctgggggctgctctatgcaggtttcatctttatcatggcgctgttcctcgcactggtcataagaagcacacagttcataatcctctcaggttttatggttgtgttttctctatttctgttgtatggactatccctggtggcactggcatttctaatgtccatactagttaagaagtccttccttacaggactcgttgtgttcttgctaaccgtgttctggggatgtctaggctttacatccctgtacaggcacctgccggctagcctggagtggattctgtctctgctttcacctttcgccttcatgcttggaatggcgcagctcctgcatctggattacgacctcaactccaacgcatttcctcacccatcggacggctctaatctgatagtcgcaacaaatttcatgctggccttcgatacttgtctgtatctggccctggctatctactttgaaaaaatattgccaaatgagtatgggcacagaaggcccccattgtttttcttgaagagttctttttggtcccagacacagaagacggatcatgtggccctcgaggacgagatggacgcggaccccagtttccacgactcttttgagcaggccccaccggaatttcagggtaaagaggcaataaggatccgaaatgtgacgaaagagtacaaaggcaagcccgacaaaatcgaggcgctgaaagacttggtattcgacatttacgaggggcagataacagcaatcctggggcactctggtgctggcaaatctacattgcttaacatcctctctggcttaagcgtgccaacaaagggctcagtcacaatctataataataaattgagcgagatggctgatcttgaaaatctgagtaaactgacaggcgtatgtccacagagcaacgtacagttcgactttcttacagtgcgggagaacctccgcctctttgccaagataaagggtatcttgccccaagaggttgacaaggaaatccagcgggttctgcttgaattggagatgaagaacattcaggatgtcctggctcaaaatctcagcgggggccagaagaggaagttgacattcggcattgcaattctgggtgacccccagattttcctgctggatgagccaacagctggcctagatccattcagtagacatcaggtttggaatctccttaaggaaagaaaaactgatcgcgtaattctgttttccacccagtttatggatgaagccgatattctagcggatagaaaggtgttcctgtcgcaggggaaacttaagtgcgcagggtctagtttgttcctcaagaagaagtggggaatcgggtaccacctgagtctacagctcaatgagatttgcgttgaggagaacataaccagcctagtcaagcagcacattcccgacgccaaactctctgccaaatctgagggaaagctcatatacactctgcccctcgagcgtactaataagttccctgaattgtataaagacctggacagttacccagaccttggtatagagaattacggcgtcagcatgactactcttaacgaagtcttcttgaagctcgagggaaaatcaaccattaatgagtcagatatcgccattcttggagaggtgcaagctgaaaaagcagacgatactgagcgactcgtcgaaatggaacaggtgctgtccagcctaaacaagatgcgaaaaacaatcggaggcgtggccctgtggagacagcagatctgtgcaatcgcacgcgtgcgtctgctgaagctgaaacacgaacggaaggcactgctggcactgctactcatccttatggctgggttctgtccgctcctcgtcgaatataccatggttaagatctaccagaacagttacacatgggagctgagtccccatctgtacttcctagcgcccgggcaacaaccacacgaccctctgactcaacttcttatcataaacaagacgggtgctagcatagacgacttcatccagtccgtggagcaccagaacattgccctcgaggtggatgcctttggaacaaggaatgggacagacgacccgtcctacaatggagccatcaccgtctgctgcaatgagaagaactacagctttagtttggcatgtaacgctaagagattgaattgctttcccgtgcttatggacatcgtgagcaatggcttgctcggcatggttaagccgtctgtgcacattcggacagaaagatccacatttctggaaaacggacaggacaacccaattggctttctggcgtacataatgttctggctcgtccttactagttcttgcccgccttatatcgccatgtcatctatcgatgattacaaaaatcgtgccaggtctcagctcagaatctccggactgtccccgtccgcctactggttcggacaggcgctagtagatgtgtcgctatatttcctagtcttcgtcttcatttacctgatgtcctacatatctaactttgaagacatgcttctgactataatacatatcatacaaatcccatgcgcagtgggctatagcttttcactaatcttcatgacatatgtgatctcgtttatattccggaaaggacggaaaaacagcggaatctggagcttctgcttttacgtcgttagcattttcctggtcgatgtgtactgcatatacctgatctacaattcagaattaattctctag

SEQ ID NO: 179972 - DNA, 471 bp, synthetic construct
  misc_feature 1..471: note = Description of Artificial Sequence: Synthetic coding sequence
  source 1..471: mol_type = other DNA
atgctgggcatggcccagctgctgcacctggactacgacctgaactctaacgcctttccacatcctagtgatggctctaatttaatagtggcgactaattttatgttggccttcgatacttgtttgtacttggctctggcgatctactttgagaagatcctgcctaatgaatacgggcatagaagacctcctctcttctttctgaagagcagcttctggtcccagacccagaagacggaccatgttgctctagaggacgaaatggacgccgatcctagcttccacgactcattcgagcaggcccccccagaattccaaggcaaggaagccattaggatccgaaatgtgacaaaggaatacaagggcaaacccgacaagatagaagcacttaaagatttagtgttcgatatttatgaaggtcagatcacggccatcctcgtgacggtggaactcgaatcccaacattgttag

SEQ ID NO: 179973 - DNA, 4875 bp, synthetic construct
  misc_feature 1..4875: note = Description of Artificial Sequence: Synthetic coding sequence
  source 1..4875: mol_type = other DNA
atgagcaagcggcggatgagcgtgggccagcagacctgggccctgctgtgtaagaattgcctcaagaaatggcgcatgaaaagacagaccctcctcgagtggctcttcagctttttattagtgctctttctgtacctcttcttctctaacttacatcaggtccacgacactccgcagatgtctagcatggatctggggcgggtagatagctttaacgataccaactatgtgatcgcctttgcaccagagagcaagacaacgcaggaaataatgaataaggtcgcttcagcccctttcctcaaaggcagaaccataatgggatggcctgacgagaagtcaatggacgaactggacttgaattacagtattgacgctgttcgggtgatttttaccgatactttttcctaccatttgaagttttcctggggtcaccgtatccccatgatgaaggagcaccgggatcactctgcccactgtcaagccgtcaatgaaaaaatgaaatgcgagggcagcgaattctgggagaaaggcttcgtcgcctttcaggctgcaattaatgccgccattatcgaaatagcaaccaaccacagcgtgatggagcaacttatgtctgtgactggcgtccatatgaagatccttccctttgtggcacagggcggcgtggctactgacttctttatttttttctgcatcatttctttctcaacttttatctattatgtgagcgtcaatgttacccaggaacgtcagtacatcaccagtttaatgacgatgatggggctgcgtgagagcgctttctggcttagctggggcttaatgtacgccgggttcattctcatcatggctaccctcatggcattgatcgtgaaatcagcccagatagtggtgcttaccgggtttgtgatggtgttcacactgttcctgctgtacgggctttcactgatcactctggctttcctgatgagtgtattgatcaagaaaccttttctgaccggcctggttgtgtttctgttgatcgtcttttggggcatcttagggtttcccgcactgtacacccggctgccagccttcctggagtggaccctctgtcttctctcccccttcgcctttactgtgggcatggctcagttgatccatctcgactatgatgtcaattccaatgcacatttggacagctcacagaacccttatctgataatcgcgacactcttcatgcttgtgtttgataccctcctctatcttgtgctgaccctttattttgacaaaattttacccgcggagtatggtcacaggtgcagtccattgttcttcctgaagtcctgcttctggtttcagcacggccgggcaaatcacgtggttctggaaaacgagaccgatagcgatccaactccaaatgattgcttcgaacctgtgtctccagagttttgtggcaaagaggctatccgaatcaaaaatttgaaaaaggagtatgccggcaaatgcgaacgcgtggaggctcttaagggcgtggtcttcgatatatatgaagggcagattactgcccttctgggacactccggggcgggcaaaacaactttgctgaatatactttcaggactctctgtgcccacgtcagggtcggtcactgtctataaccacactctgagcagaatggctgatatcgagaacattagtaaattcactgggttctgcccacaatctaacgtccagttcgggttcttaaccgttaaggagaacctccggttgttcgctaagattaagggaattctgccacacgaagttgagaaagaggtgcagcgggtggttcaggaattagagatggagaatattcaggatattttggctcagaacctgtcaggaggccaaaatcggaaactcaccttcgggatcgcaatcctgggtgaccctcaggttctcctgttagatgagccaaccgctggactggatcccctgagccggcacaggatttggaatctgttgaaagaaggcaaaagcgaccgcgtgattttgttcagtacccagtttattgatgaggcggatatcctggccgaccgcaaagtctttatcagcaacggcaaacttaaatgtgccggctcaagcttattcctgaagaaaaagtggggaattggataccatttgtcattgcaccttaacgaacggtgcgatccagagagcattacttcactggtgaaacagcacatctcagacgccaaacttacggcacagtctgaggagaagctggtgtatatccttccccttgagcggactaataaattccccgagctgtaccgggatctggatcgctgctccaatcagggcatcgaggattatggcgtgtcgattacgaccttaaacgaagtatttctgaagctcgaagggaagagcactattgacgagtccgatattggaatttggggccagctgcagaccgatggggccaaggatatcggaagcttagtggaattggagcaagtactgtcctccttccacgaaacccggaaaactatcagcggagtggccctatggagacaacaggtttgcgctatcgctaaagtgcgttttctcaagttaaaaaaggagaggaaatctctttggacaatcctgctactatttggcatcagcttcatcccacagctgttggagcatctgttctatgagagctaccagaagagctacccgtgggagcttagccccaatacctactttctgagtcctggacagcagccccaagaccctctgacgcacctgctggtcatcaataagacgggttcgaccatcgacaatttcttgcactcgctccgtagacaaaatatcgctatcgaagtggacgcgtttggaactagaaatggcacagacgatccgtcctataatggtgccattattgtatccggcgatgagaaggatcaccgcttcagcattgcatgtaataccaagcggctgaattgtttccctgtgctcctggacgtaatttccaatggactcctcggtatctttaatagctccgaacacatccagactgaccggagtaccttctttgaggagcacatggattacgaatatggttatagatcgaatacatttttctggattccaatggccgcatcctttactccttacattgctatgtcaagtatcggcgactataaaaagaaggcgcactcccagctcagaatctccggcctgtacccgagtgcctactggtttgggcaggccttggttgacgtgagtttgtattttctgattctactgctcatgcagatcatggattacatcttcagccccgaggagattatttttatcatccagaatctgctcatccagattctgtgctccatcggctacgtcagttccttggtctttcttacctatgtgatctccttcatatttcggaacggaagaaaaaattctggtatttggtccttcttttttttgatcgtggtcatcttctccattgtagccacagaccttaatgaatacggttttctgggcttattctttggcaccatgctcatcccccctttcacgctcatagggagccttttcatcttcagcgaaatcagccctgacagcatggactacctaggggcctcagaatctgaaatcgtatacctggctctgctaattccgtacctccattttctcatcttcttgttcatcctgaggtgtctggagatgaactgtcggaagaagctcatgaggaaggatccagtctttaggataagcccccgatcgaacgctattttcccaaatcccgaggagccagagggcgaagaggaggatattcaaatggagaggatgcgtacggtcaatgctatggctgtgcgcgatttcgacgaaacacccgtgattatagcctcatgcctgagaaaggaatatgcaggaaagaagaaaaattgtttttctaaacggaagaagaaaatcgcaactagaaatgtctccttctgtgtaaagaagggggaagtgattggcctactgggacacaacggtgcaggaaagtcaacaactatcaagatgatcaccggggatacaaagccaaccgcgggccaagtcattctcaagggaagcggcggcggggaaccattgggttttctcggatactgtcctcaggaaaatgccctctggccaaacctaaccgtgaggcagcacctggaggtttatgctgctgtgaagggactccgtaaaggcgatgccatgatcgccatcacacggctggtggatgcgctgaaactccaagaccagctcaaagctcccgtgaaaaccctctccgagggtattaagcggaagctctgctttgtgctgagcatcctgggcaatccgtccgtcgtgcttttggacgagccttctacaggcatggatccggaaggccagcagcagatgtggcaggtaatcagagcaactttccgaaataccgagcgcggcgccctcctcactacccactacatggccgaagcggaggccgtatgtgaccgggtagctatcatggtgtccgggcggcttcgttgtatcggaagtattcagcacttgaagtcaaagtttggtaaggattatctgcttgagatgaaactaaagaacctggctcaaatggagcccctgcacgcagaaatccttcgactctttccacaggcggctcagcaggagcgcttttcttccctgatggtttataaactgccagttgaggacgtcagaccattgtcacaagcgttcttcaagctggaaatcgtgaagcagtcctttgacctggaggaatactcactgtcacaaagcactctggaacaggtgtttttagagttaagtaaggagcaggaactgggcgatctggaagaagatttcgacccaagtgtcaagtggaagctgctactgcaggaagaaccctag

SEQ ID NO: 179974 - DNA, 4308 bp, synthetic construct
  misc_feature 1..4308: note = Description of Artificial Sequence: Synthetic coding sequence
  source 1..4308: mol_type = other DNA
atgagcaagcggcggatgagcgtgggccagcagacctgggccctgctctgcaaaaactgtttaaagaaatggcggatgaaacgacaaaccttactggagtggctctttagcttccttctggtgcttttcctctatctcttttttagcaaccttcatcaggtgcatgacaccccccagatgtcaagcatggacctaggcagggtggacagtttcaatgatactaattacgtgattgcttttgcccctgagtcgaagacaacacaagagatcatgaataaagtggcgtccgccccgttcttaaaaggcaggaccattatgggctggcccgacgagaaaagtatggatgagcttgacctgaactacagcatcgacgccgtaagagtcatctttacagacaccttttcttatcacctgaagttttcttgggggcaccgcattccgatgatgaaagagcatagagaccattcagcccactgccaggctgtgaatgagaagatgaagtgcgagggatcagaattctgggagaaaggctttgtcgcattccaggccgccattaacgctgcaatcatagagatagccaccaaccactcagtaatggaacagctgatgagtgttaccggcgtgcatatgaagattttgccctttgtggctcagggcggagttgcaactgatttcttcatcttcttctgtattatctctttctccacttttatttactacgtctcagttaatgtgacacaagaacggcagtatattaccagtctgatgaccatgatggggctgcgggagtctgcattttggctctcatggggactgatgtatgccggctttatcctcataatggctacattgatggccttgattgtgaaatccgcgcaaatcgtcgtcttgacaggcttcgtgatggtttttacattgttcctgttgtatgggctatccttaatcactctggcttttctcatgtccgtactgattaagaagcctttcttgaccgggttggtagtattcctgctaatcgttttttggggtatcctgggttttcctgccctgtacacaagactgcctgcctttttggagtggacactgtgtctgctatcaccctttgcgttcaccgtcggaatggctcaattgattcatctggattatgatgtcaattcaaacgcacatctggactcgtcacagaacccatatcttatcatcgcaactttgttcatgttggtgtttgacacattactctatctagtgttaacactctattttgacaagattctaccagctgaatacggccatcgatgttctccactcttctttcttaagagctgtttctggttccagcacggcagggctaatcatgtggttcttgaaaacgaaaccgactcggaccccacacccaacgactgcttcgaacctgtctcacctgaattctgcggtaaagaggcaatccggataaagaatctgaaaaaggagtacgccgggaaatgcgagcgcgtggaggcactcaaaggggtggtgttcgacatttacgagggtcagatcaccgctttgctaggacatagcggcgccgggaagactaccctactaaatatcctctcaggtctgagcgtgcccacctctgggagcgttactgtatataaccacactctgtcaaggatggcagatattgaaaacatctcaaaattcaccggattttgcccacagtccaatgtccagtttggattcttgaccgtcaaggaaaaccttcgtctcttcgccaagatcaagggaattctgcctcacgaagtcgagaaagaagtacagagagtcgtgcaggagttggagatggagaacatccaggatattctcgcgcagaatttaagtggtggacagaatcgcaaactcacgtttggcattgccatcctcggggatccccaggtgttgctgttggacgagccaactgctggccttgacccgctgtcccgccatcggatatggaacctgttaaaggaaggtaagtcagacagggtcattctattctcgactcagtttatcgacgaagctgacatcctagcagacaggaaagtcttcatcagtaacggcaagctgaaatgtgccggaagctccctgtttctgaagaagaaatggggcatcgggtaccatctttcactgcacctcaacgaacgatgtgaccccgaatctatcactagcctcgttaaacagcacatctcagacgcaaagctcactgcccagtctgaggaaaagctcgtatacattcttccccttgagagaaccaacaagttccctgaactctatagggatctggaccgatgctccaatcaaggcattgaggactatggagtctccatcaccactctgaatgaagtattcctgaaattggagggaaaaagtacaattgacgagtccgatattggaatttggggtcagctacagacagatggggcaaaggacattggaagcctggtggagttagagcaggttttaagctcattccacgaaacccggaagactatcagcggcgtggcattatggaggcagcaggtttgtgccattgctaaagtgagatttctgaagctcaaaaaggagagaaagagcctgtggacgatcctgctactctttggcataagcttcatcccacagctactcgagcatctcttctatgaatcatatcaaaaatcatatccatgggagctcagccccaacacatacttcctcagtcccggacaacaaccccaagaccccttaacgcacctgctagttatcaataagaccggaagtacaatagacaattttctccacagtttgcgcaggcagaatatcgcaatcgaggtcgatgcatttgggactcgcaacggcaccgatgacccttcttacaatggagccatcattgtttctggagatgagaaggatcaccgctttagcatagcatgtaatacgaagaggttgaattgttttcctgttctgttagacgtcattagcaacggcctgctgggaatttttaattcctccgaacacatccaaaccgacagatccacatttttcgaggagcatatggactatgaatatgggtatagatcgaatacattcttttggattccaatggcagcttcttttaccccatatattgccatgtcctcaattggcgattataaaaaaaaggcacactctcagctgcgcatttctggactctatccaagcgcatactggttcggtcaggccttagtggacgtttctctatactttctgatcttactgcttatgcaaattatggactatatattcagtcctgaggagattattttcattatccaaaacttgctgatacagattctgtgctccattggttacgttagctctctagttttcttgacatatgtcatctcctttatcttcaggaacggaagaaagaatagcggcatatggtcctttttcttccttatagtggtgatcttttctattgttgcgacagatttaaacgagtatggctttctcggcctgttctttgggactatgctaatccccccctttaccctgatcggcagtttatttattttcagcgagatatcccccgactcgatggactatctgggcgcctcggaaagcgagattgtgtatctggctctgctgatcccctacctgcactttctgatattcctcttcatactcagatgtctcgagatgaactgtcgcaaaaagctaatgagaaaggatcctgtgttcagaatcagccctagatccaacgccatttttcctaaccctgaggagcctgagggcgaagaagaagatatccagatggagcggatgcggaccgttaatgccatggcggtccgggattttgatgaaacgcccgtcatcattgcctcttgcctaaggaaagagtacgctggtaaaaagaaaaattgcttctcaaaacggaagaaaaagattgctaccaggaatgtatcattttgcgtgaaaaagggcgaagtcattggtctcctcgggcataacggcgcaggcaagagcaccacaatcaaaatgatcacgggagacacaaaacccactgccggacaagtgatccttaaggggtccggaggaggtgaacccctgggattccttggctattgcccacaagaaaacgcgctctggccaaatctgactgtgcgccagcacttggaagtgtatgcggccgtaaaaggtttaaggaagggtgacgcaatgatcgctatcacacgcctcgtcgatgccctaaagctacaggaccagctgaaggccccggtgaaaacactgtctgaaggcattaagaggaaagccggtgacagcgggcatttgtag

SEQ ID NO: 179975 - DNA, 3423 bp, synthetic construct
  misc_feature 1..3423: note = Description of Artificial Sequence: Synthetic coding sequence
  source 1..3423: mol_type = other DNA
atgagcgtgggccagcagacctgggccctgctgtgcaagaactgcctaaaaaaatggcgaatgaagcggcagacactgctagaatggcttttttcttttcttctcgtgctcttcctgtatcttttcttctccaacctccaccaagtgcacgatacgcctcagatgtcgtctatggatttggggagggtcgatagcttcaacgacaccaactacgtcatagcctttgcccccgagtcaaaaactacgcaggaaattatgaacaaggtggctagcgcaccgtttcttaagggtcgaaccataatgggatggccagatgaaaagagcatggatgagctggatctcaactattcaatcgacgccgttcgagtcatttttaccgatacattctcctatcacttgaagttctcgtggggtcacagaatccccatgatgaaagagcaccgagatcactcagctcactgccaggccgtcaacgagaagatgaagtgtgaagggtcagaattctgggaaaaggggtttgtggcattccaggccgcaattaatgcggccatcatcgagattgccactaaccattccgttatggagcagctaatgtcagtgaccggggtccacatgaaaatcctgccatttgtggctcagggcggggtggccaccgacttcttcatcttcttttgcatcatcagcttttctacatttatttactatgtgtcagtcaatgttacgcaagaacgacagtacatcacttcactaatgaccatgatggggctgagggagagcgccttctggctttcttggggtctgatgtacgccgggtttatcctgatcatggcaacattgatggcgctgattgttaagagcgctcagattgtcgtccttacaggatttgtaatggtgttcaccctatttctactttatggactgtcactgataacactggcttttctcatgagcgtgctgatcaaaaagccattcctgactggcctggtggtcttcctcctgatcgttttttggggcattttagggttccccgccctgtatacaagactgcccgctttcctcgaatggacactctgcctcctgtccccttttgcatttactgtgggcatggcacagttgatacatttagactatgatgtgaacagcaacgcacacttggactccagccaaaacccatacctgattattgccaccttgtttatgcttgtgtttgacacactactttaccttgtgctcacactctattttgacaaaattttgccagccgagtatgggcacaggtgctcccctctcttcttcctgaaatcttgtttttggttccagcatggaagagcaaaccatgtcgtactggagaatgaaactgacagtgatccaactccgaatgattgttttgagcccgtgtcaccagaattctgcggtaaggaagcgatcaggatcaaaaacctcaaaaaagaatatgccggcaagtgtgagagggtggaggctttaaagggtgtagtattcgatatatacgaaggtcagatcaccgctttgcttggccattctggtgctggaaagactacactcttgaacatactatcaggtctgagcgtccccacatccggtagtgtcaccgtgtacaatcatacattgtcccgaatggccgatatcgaaaatattagtaaatttaccgggttttgtccacagtccaacgttcagtttgggttcctcactgtgaaggaaaacttacgccttttcgctaagattaaaggaatcctgccccatgaggtcgagaaagaggtgcagagagtagttcaggagctagagatggaaaacattcaggacatcctagcacagaacctgagcggcggccaaaatcggaagctgacttttggcatcgcaatcctgggggaccctcaagtgcttctactcgatgagccaaccgctggcttggaccctctaagccgacacagaatctggaatcttctgaaggagggtaagtccgacagagtgatactgttctccacgcaatttatcgatgaggcagatatcctggccgatcggaaggtttttatttccaatggcaagctcaagtgcgccggctcatccctatttctgaagaagaaatgggggattgggtaccacttatccttgcacctcaatgaacgttgcgacccggagagcattacctccttagtaaagcaacacatctcagatgctaagcttacagcccagtccgaggagaagctggtgtacatcctgccgcttgaacgtacaaacaaatttccagagctgtacagggatctggacagatgctccaaccagggcattgaggactacggtgtgtcgatcactactctgaatgaggtgtttctcaaactggaggggaagtcaactatcgacgagtcagacattggcatttggggtcagctgcaaacagatggcgccaaggacataggttctcttgtggagctggagcaggtcctgtccagctttcatgaaacccgcaagaccataagtggcgtggctttgtggcgtcagcaggtctgcgcaattgccaaagtcaggttcttaaagctgaagaaagaaaggaaatccctgtggacgattctgctgctgttcggaattagctttatccctcagctgctagaacacctgttctacgaatcgtaccagaaatcatacccctgggagctcagtccgaatacctacttcctgtctccaggtcaacagccacaggatcctctgacacatcttctcgtgatcaataagaccggatcaactattgacaattttctccattcattaagacgacaaaatattgccattgaggtggacgccttcggaacccgaaatggcactgacgatcctagctataatggtgcaatcattgtctctggagatgaaaaggatcaccgcttctccatcgcatgcaatactaaacgcctgaattgcttcccggtgttgttggacgttatctcaaacggactgctagggattttcaatagcagcgagcatatccagacagacagaagcacattcttcgaagagcacatggattacgaatatggatatcgctccaatacttttttttggattccgatggcggcgtcctttaccccatacattgcgatgagtagtatcggcgattacaagaagaaggctcatagccaattgcgtatcagtggcctgtatccatccgcctattggttcggccaggccctggtcgatgtctctctttattttcttatcctcctgttgatgcagattatggattatatcttctccccggaagaaattatattcattatccagaatctgctaatccaggtggtcatcttctccatagttgccaccgacttgaatgagtatggattcttaggcctgttctggcatcacgtgaataccagcttgcatattgactggctcagcatccattttttttag

SEQ ID NO: 179976 - DNA, 2217 bp, synthetic construct
  misc_feature 1..2217: note = Description of Artificial Sequence: Synthetic coding sequence
  source 1..2217: mol_type = other DNA
atgcggggcccccccgcctggcccctgcggctgctggagcccccctcgcctgcggagccaggtcgactattgcccgttgcctgcgtttgggccgctgcctcaagggtgccaggctctctgtcacccttcaccggcctcaggccagctaggctgtggggagcaggtcccgcattgctttggggagtgggagccgctagacgatggcggtctggatgtcggggcgggggacctggcgcttctaggggcgtgcttggattagcaagattgctgggcctgtgggcccgtggccccggctcctgtagatgtggcgctttcgccgggcctggcgctccacgccttccccgcgcccgttttccaggaggtcccgctgctgccgcatgggcgggcgacgaagcctggaggaggggacctgccgctccccccggggacaaagggcgactcagacctgcagccgctggtctgccagaggcccggaaactgctgggcctggcctatcctgagagacggcggttggccgcggctgttgggtttcttaccatgagtagtgttatttccatgtccgccccgttctttctcgggaaaatcatcgacgtgatctatactaatccaacagtggactactctgacaacttaactagactttgtctgggactgagtgcagtctttctctgcggagcggcggctaatgctatcagggtgtatctgatgcagacctctgggcagcgtattgtcaaccgacttagaacttccttattcagctcaatactgcgacaggaagtagccttctttgacaaaactagaaccggagaactaatcaacagactatcatccgacacagcgctgctgggacgatccgtcaccgagaatctctcagacggtctccgagcaggtgcccaggcaagtgtcgggatcagtatgatgttctttgtttcacctaatctagccacattcgtgctgagcgttgtgccccccgtctccataatcgccgtaatctatggccggtatttgcgaaagctgacaaaagtgactcaggactccctggcccaggcaacacagctggcagaggagaggattggcaacgttagaacagttagagccttcggcaaggagatgaccgagatagagaagtacgcttccaaagtggatcacgtaatgcagctggcccggaaggaagcttttgctcgagccggatttttcggggccacaggactgtctgggaacttgatagtgttgtctgtgctgtacaagggcggcctgctcatgggttctgcacacatgaccgttggagaactctccagcttcctgatgtacgccttctgggtggggatttctatcggcggactgtccagtttctatagcgagctgatgaaaggattgggagctggaggccgcctttgggagctgttggagcgcgagccgaaactccctttcaacgagggagtgattttaaatgagaagtcttttcagggcgccttagaatttaaaaacgtgcacttcgcatatcccgcccggccggaggtgcccatctttcaggacttttcgctgtcgattccctccggaagcgtcacggcccttgtcggaccctcaggtagtggtaagagcaccgtgttgtcgttgctgctgaggctgtatgacccagcttctggcactatatctctcgacgggcacgatattcggcagttgaaccccgtgtggctgaggagtaagatcgggaccgtctcccaggaacccatcctgttctcctgcagtatcgcagaaaatatagcgtacggggccgacgatcctagctcagttactgcagaagagatccagagagtcgcggaagtcgccaatgcagtggcttttattcgaaacttcccgcagggatttaacaccgtagtcggagagaaaggcgttctgttgtcaggaggtcagaagcagaggattgcaattgctcgagcgctcctgaagaatccaaagatcctgctattagatgaggctacaagtgccctggacgccgaaaatgaatatctggttcaggaggctctggatcggttaatggatggccggaccgtacttgtcatagctcacagactgagtacaatcaagaacgctaacatggtcgctgttttggaccaggggaaaataactgaatacgggaagcacgaggaattgctgtcaaagccaaatggcatctacagaaagttaatgaataaacagtcttttatctcggcctag

SEQ ID NO: 179977 - DNA, 2529 bp, synthetic construct
  misc_feature 1..2529: note = Description of Artificial Sequence: Synthetic coding sequence
  source 1..2529: mol_type = other DNA
atggtgaccgtgggcaactactgcgaggccgagggccccgtgggcccagcttggatgcaagatggcctcagcccatgctttttcttcacacttgtgcctagcacaaggatggcacttggtacactcgccttggtactcgcccttccttgcaggaggcgtgaaaggccagccggcgccgacagcttgtcatggggtgcaggacctagaatcagcccatacgtgcttcagctcctcttagctacactgcaggcagcgctgccattggctggtctggctgggagagtggggaccgcccggggagcacccttgccctcttacctgcttttagcctccgtcttggaatctcttgctggtgcatgcggactgtggctgctggttgtcgagcggtcccaggcacgacagaggctcgccatgggaatctggatcaaattccgtcactctcccggacttctgctcttgtggacagtggcttttgctgcggaaaatctggccctagtcagctggaactctcctcagtggtggtgggctcgcgcagacctcggacagcaggttcagttttctctatgggttttgcgctacgtcgtgtcaggggggcttttcgtgcttggcctatgggcaccaggcttacggccacaaagctatacactgcaggtgcacgaggaggatcaggatgttgagcgcagtcaagtacgttccgccgcacagcagtcaacttggcgagattttggacgcaagctgcgtttactcagcgggtatctgtggccccgcggtagccccgccctgcagttggtggtgctgatctgtttagggctcatgggcctagaaagggccctcaatgttctggttcccattttctatcggaacattgtgaatctgctaacggagaaggctccatggaattcgctcgcctggaccgtgacctcctacgtgttcctgaagttcttgcagggtggcggtaccggctctacggggtttgtaagtaacctgagaaccttcctttggatccgggtgcagcagtttacttcaaggagagttgaattacttatattctctcatctccatgagctgtcactgcggtggcatctgggacggagaacaggcgaagtcctgagaatagccgacaggggcacctctagcgtgaccggattgctgtcctacctggtgtttaatgtcatcccaactttggctgacatcatcatcggaatcatctacttctccatgtttttcaatgcctggttcggcctcatagtgttcctgtgtatgagcttgtatctgacgctaaccatagtggtgacagagtggaggactaaatttagaagggctatgaatacccaggagaacgccaccagagctcgggcagtggacagtctattaaactttgaaaccgtaaagtactacaatgccgagagctacgaagtggaacgatatcgggaggcaatcatcaaatatcagggcctggagtggaaaagcagcgcctctttagtactcctgaaccagacccagaacttggtgattgggctcggactgctggccgggtcgctgctgtgcgcatattttgtgacggagcagaaactgcaggtgggcgactacgtgctgttcggtacctacatcattcagctgtatatgcccctcaactggtttggaacctattacagaatgatacagacaaacttcatcgatatggaaaatatgttcgacctcctcaaagaggaaacagaagtaaaggacttgcccggggctggccctttaagatttcaaaaaggacgaattgagtttgaaaacgtccatttcagctatgccgacgggcgcgagactttacaggatgtctcattcacagtgatgcctggtcaaacactggcactcgttggccccagcggagcaggtaagagcaccatcctgcgactcttgttccggttctacgatatctccagcgggtgcatccgcatcgacggacaagacatcagtcaggtgactcaagcctccctgcgctctcatatcggggtggtcccccaggacacagtcctattcaatgataccatcgcagataatatacggtatggtagagtcacagccggcaacgacgaggtggaggctgccgcccaagctgcagggattcatgacgccatcatggcttttcccgaaggataccgcacacaagtcggagagcgcggactcaagttatcaggaggagaaaaacagcgtgttgcaatcgccaggaccatcctgaaagccccaggcatcatactgctggacgaggccacaagcgcattggacacctccaatgagcgcgctatacaagcctctctcgctaaagtctgcgccaacaggacgactattgtggtcgctcatagactctctacagtggtgaatgccgaccagatcctggtcatcaaggacgggtgtattgtagagcgcggccgacacgaggcccttctgtcccgaggaggagtgtatgctgacatgtggcagctgcagcagggacaggaggagacctctgaagataccaagccccagacaatggaacggtag

SEQ ID NO: 179978 - DNA, 636 bp, synthetic construct
  misc_feature 1..636: note = Description of Artificial Sequence: Synthetic coding sequence
  source 1..636: mol_type = other DNA
atggtgaccgtgggcaactactgcgaggccgagggccccgtgggccccgcttggatgcaggacggcctttctccctgttttttctttactcttgtgccatccacccgcatggccctgggaactctcgctctggtgctcgcattaccgtgccggcgaagagagcgcccagccggggccgacagcctctcgtggggcgccggccctcgcatctccccctacgccctcccaggcggaccccattgtcaagctatctacttctggcctccctgttggcgcgtctggcccgcaccggttgcatgtgggtgtctctcttggagcggcgccagacacggctcggtctggcagtgggcaagtggatcctcctctgggaccgcgctggttagttgttcatcgggcctgtggcgcctccagttgagaacttggccctggtgcctggggactgcccactcaggagggggacagggccagacttgggcttcccgattttccctggcgtgcggatgctgcggcatgtggtctctagaggggtgcctctcttgggtgtctgggccattggactttgtgccgtcacccatccactgtcgattcatgaaacggactaaaatgtggaagggagcttctgagctggcggactag

SEQ ID NO: 179979 - DNA, 2391 bp, synthetic construct
  misc_feature 1..2391: note = Description of Artificial Sequence: Synthetic coding sequence
  source 1..2391: mol_type = other DNA
atggtgaccgtgggcaactactgcgaggccgagggccccgtgggcccagcctggatgcaggatggactgtctccatgctttttttttaccctcgttccttccacccgcatggccttaggcaccttggccttggtacttgccttgccttgtaggcggcgagagcggcccgccggagctgactccctgagttggggcgctgggcctcgcatttccccatacgtgttgcaacttttactggcaacgctgcaggccgccttacctctggccggactggcaggtcgggtcggtacagctaggggcgcacccctgccatcatacctgctgctcgcctctgtgctggagagtcttgccggcgcctgcggtctttggctgttggtagttgagcgctcacaagccagacagaggttggccatggggatctggattaaattcaggcactcacccggactgctactgctgtggaccgttgccttcgcggcagaaaatctcgccctggttagctggaacagtccacagtggtggtgggcgagggcagatctaggacaacaggtgaggagcgctgcccaacagtcaacatggagagatttcgggcggaagttacgccttctgtcgggctatctctggccacgcggatcgccggccctgcagttagtggtcttgatctgcttgggtttgatgggtctggagagggctctaaatgttttggtgcctattttctaccgaaatatcgtgaatctcctcacggagaaggccccctggaacagcctggcatggactgtgacaagttatgtgttcctcaagttcctgcagggaggcggcaccggatctaccggatttgtgagcaatctgaggacatttctttggatcagggtccagcagttcacctcccggagggtcgagttgctgatcttcagccatcttcacgaactgagtcttcgatggcatctgggtcgtcggactggggaggtgctcagaatcgcggatcggggcacttctagcgtgacaggacttttgagctatcttgtgtttaatgtcataccaacattagccgacatcatcattggcattatctactttagcatgttctttaacgcttggttcggcttaatcgtgtttctgtgtatgtccctgtatctcacgctgactattgttgttaccgagtggcgtactaagttccgcagggccatgaatacacaggaaaatgctaccagggcaagggccgtagattctctgctgaatttcgaaacagtgaagtattataatgcagagtcctatgaagtggaaagatatagggaggccatcataaaataccagggcctggaatggaaatctagcgcttctcttgtcttgctgaatcagacacagaatctcgtcatcgggctcggcttactcgcaggtagtctactatgcgcctattttgtgactgaacaaaagctccaagtcggagactacgtcttgttcgggacctacatcatccagctttacatgccattgaattggttcgggacgtactatagaatgatccaaacaaatttcatcgacatggagaatatgtttgacctgctgaaggaagaaaccgaggtcaaagacctgccaggagccggtcctctccggttccagaagggcagaattgagtttgaaaatgttcactttagctatgccgacgggcgtgaaaccctgcaggatgtcagttttaccgtgatgcccgggcagaccctggcacttgtgggccccagcggggccggaaaatccacgatcctaagactgttatttcgcttctatgatatcagtagtggctgcatccgcatcgacggacaggacatatctcaagtcacacaggctagtcttcggagtcacatcggggtggtgccccaagatactgtgctcttcaacgacaccattgccgacaatatcagatacggcagagtcaccgcgggcaacgatgaagtcgaggccgcagcccaggcagcaggcattcatgacgcaatcatggcgtttcccgagggttacagaacccaggtgggtgaaagaggacttaaattgtcaggtggcgagaaacaacgagtagcgatcgccaggactattttgaaagctccggggatcatactcctagacgaggctacctctgccctcgacacatccaatgagagggctatacaggcctcactagccaaagtctgcgctaaccggaccaccatcgtagttgcacaccgactgtcaacggtcgtgaatgcagaccaaatcctggtgatcaaagacggttgtatcgtggagcgtggccgccatgaggccctgctctcaagaggaggcgtgtatgccgatatgtggcaactgcagcagggccaggaggagaccagtgaggacaccaaaccccagaccatggaaagatag

SEQ ID NO: 179980 - DNA, 2262 bp, synthetic construct
  misc_feature 1..2262: note = Description of Artificial Sequence: Synthetic coding sequence
  source 1..2262: mol_type = other DNA
atggccctgctggccatgcacagctggcggtgggccgccgccgccgccgcatttgaaaaacgtagacatagcgcaattctgattagacccttggtcagtgtatccggcagtgggccccagtggcggccacatcaactgggggccctcggaacggcacgggcctatcagcagatcccagaatcgctgaaatccattacatggcagcgccttggcaaggggaatagcgggcagtttctggacgccgctaaggccttgcaggtttggcctctgatcgagaagcgtacctgttggcatggccacgcaggcggcggactgcacactgaccctaaagagggactgaaagatgtggacactcgaaaaatcatcaaagcgatgttgtcgtacgtatggcccaaggatcggcccgatcttagagccagggtggccatctcgctgggctttctgggtggcgccaaggccatgaacatcgtggtcccatttatgttcaaatacgccgtcgattctctgaaccagatgagcggtaacatgctgaacctgagtgatgctccaaacacagtcgccactatggctaccgcagtgcttataggctacggagtgagccgcgccggcgccgcttttttcaacgaggtcagaaatgcagtctttggcaaggtcgcacagaactccatccgtcgaatcgcgaagaatgtgttcctccacctgcacaacctagacttaggattccatctaagcaggcagacaggagcattaagcaaggccattgataggggtacccgtggcatttcttttgtactaagcgccctcgtctttaatctacttcctatcatgtttgaagtgatgctggtgtccggcgtactgtattataagtgcggcgcccagtttgctcttgtgactcttggaaccctggggacctacactgcttttacggtcgcagtgacccggtggcgcacccgttttcgaattgagatgaacaaggccgacaacgacgctggcaatgccgctatagatagcctgcttaactacgagaccgtgaagtatttcaacaacgagcgctacgaagcacagaggtacgacggctttctcaaaacttacgagacagcctcccttaagtccacgtcgactctggccatgctcaactttggccagagtgcaattttcagcgtgggcctgacagcaatcatggtcctggcttctcaggggattgtcgccggaactctgacagttggcgacctggtgatggtgaatggtcttctgtttcagttgtccctgcctctgaatttccttggcaccgtgtatcgcgaaacacgccaggccctgattgacatgaacacgttattcacgctgttgaaagtggacacgcagatcaaagataaggtcatggctagcccacttcaaatcaccccccaaacagcaaccgttgcatttgataatgtacacttcgaatacatagaaggccagaaagttttaagtggcatttctttcgaggtcccagctggcaagaaagtggctatcgttggtggatcggggtcagggaagagtaccatcgtgcgcctgctgttcagattttatgagccacagaagggctccatttacctggccggacagaacattcaggacgtgagcctggaatccctgagaagggctgtgggcgtagtccctcaggacgctgttctgttccacaacacaatctactacaatctgctttacgggaatatcagtgcctcgcctgaagaagtatacgccgtagcaaaattagctgggctgcatgacgcaatcttgagaatgccccatgggtatgacacccaggtgggggagcgcggtctgaaactgagtggaggagaaaagcagagggtggccattgccagggccattcttaaagatccccccgtgattctttatgacgaggctacctctagcctggacagtattacagaggagacaatactcggggctatgaaagacgtggttaagcatcggacaagtatcttcattgcacaccgcctgtcgacagtagttgatgcggacgagataattgtgttggaccaaggcaaggtcgccgaaagaggaacacaccacggactgctggcaaatccccactctatatattccgaaatgtggcacactcagagcagcagagtgcagaaccacgacaatccaaaatgggaggcaaagaaagagaacatatcaaaggaagaagaaagaaaaaagctccaggaggaaattgtcaattctgtcaagggttgcggtaactgctcatgctag

SEQ ID NO: 179981 - DNA, 2259 bp, synthetic construct
  misc_feature 1..2259: note = Description of Artificial Sequence: Synthetic coding sequence
  source 1..2259: mol_type = other DNA
atggccctgctggccatgcacagctggcggtgggccgccgccgccgcggcatttgaaaagagaaggcactccgccattctcattaggcccctggtgtcagtgtcagggagtggtcctcagtggcggccgcatcaactgggtgctctgggcacagcccgcgcgtaccagatacccgaaagccttaagagcattacatggcagcggctgggaaaaggcaactctggtcagtttctggatgctgccaaggccctgcaggtatggccgcttatcgaaaagagaacatgctggcacggacatgccggcggggggcttcacaccgacccaaaggaaggtctgaaagacgttgatacccgaaagatcattaaggccatgctcagctacgtctggcctaaggacaggcccgatctgagggctagggttgctatttcgcttgggttccttgggggtgctaaggccatgaatatcgtcgtcccatttatgttcaagtatgccgttgactctttaaaccaaatgtctggcaatatgctgaatctttccgacgctcctaatacagttgctacaatggctacagcggtgttgatcggctacggggtcagtagagctggagcagccttctttaacgaagtgaggaacgctgtctttggtaaggtcgcccagaatagtatccggcggattgccaagaacgtatttctacatctgcacaatctggatttagggtttcatctatcccggcaaaccggagcgcttagcaaggcaattgacaggggtactcggggtattagctttgtgctttcagcgttggtattcaacttactccccataatgtttgaagtgatgctcgtgagcggggtcctttattataaatgcggagcgcagttcgcgctcgttacgttggggaccttaggcacttacaccgcattcacagttgctgtgacacgctggagaactagatttcggatcgagatgaataaggcggataatgacgctggtaatgccgccatagattccctgctgaactatgagacagtaaaatattttaataatgaacgatatgaggcgcagcgatacgacggatttctcaagacttatgagactgccagtctaaagtcaaccagcaccctggcgatgctgaactttggacaaagtgccatcttcagcgttggtttgactgcaattatggtcctagctagccagggcattgtcgcgggaactctcacggtgggagatcttgtgatggtcaatgggctgctgtttcagctgagccttcccttgaatttcttgggaacagtgtaccgggaaaccagacaggcactgattgatatgaacacattatttacactcctgaaggtcgacactcagattaaagacaaagttatggccagtccgttacagattacgccacagaccgccaccgtcgcgttcgacaacgtgcatttcgaatatatcgagggtcagaaagtgctctctggcatttcctttgaggtccccgccggcaaaaaagtggctatagtgggcggctccggctccggaaaatctacaatcgtgagactccttttccggttttacgaaccccagaaagggtcaatatatctggccgggcaaaacatccaggatgtttccttggagtcactgcgacgtgccgttggggtcgttcctcaagatgcagtgctgttccacaacacgatttattacaatctcctgtacgggaatatctccgcctcacccgaagaagtctacgccgtggcaaagctggccggcttgcacgatgctatattacgcatgccccacggctacgacacacaggtgggagagcggggcctgaagctgtctggtggtgaaaaacaacgcgttgccatcgccagagccatactgaaggatccacctgttattctgtacgatgaagcaacaagtagcctggatagcataaccgaggaaaccattttgggcgctatgaaggacgtcgtgaaacacagaacttccatttttatcgcacatcggctgtcgacagtcgtggacgctgatgaaatcattgtcttggaccagggtaaggtggctgagcgcgggacccatcatggtctgttagctaacccgcattctatttactctgaaatgtggcatacgcaaagcagccgagttcagaaccatgataacccaaaatgggaggccaagaaggaaaacattagcaaagaagaggagaggaaaaagctgcaggaggagatcgtgaatagtgtgaaaggatgtggcaattgttcgtgctag

SEQ ID NO: 179982 - DNA, 2109 bp, synthetic construct
  misc_feature 1..2109: note = Description of Artificial Sequence: Synthetic coding sequence
  source 1..2109: mol_type = other DNA
atggccctgctggccatgcacagctggcggtgggccgccgccgccgccgccttcgagaagaggcgccactcagccattctgatccgcccacttgttagtgtatccgggtcaggccctcagtggcgcccacaccagctgggggccttgggcacggctcgggcgtaccaggccctgcaggtgtggcccctcattgagaaacggacctgttggcatggacatgcaggcggcggactgcacactgaccctaaagagggactgaaagatgtggatacgcgaaagatcattaaggccatgctaagttatgtgtggccaaaagatcggcctgacctgcgagcaagggtggcgatttccctcgggtttcttggtggcgcgaaagctatgaacatcgttgtgccatttatgttcaagtacgccgtggactctctgaaccagatgtccgggaacatgttgaacctatccgacgccccaaatacggtggccactatggccactgctgtgctcatcggttatggggtgtcacgagcaggagccgcattttttaatgaagtccggaacgccgtgttcggtaaggtcgcgcagaactctatccgaagaatcgccaaaaacgtgtttcttcatcttcacaacctggatctggggttccatttgagcagacagacaggagcgctctcaaaagcaattgataggggaacaagaggtatcagcttcgttttgtcggccctggttttcaacctgctgcccattatgtttgaagtgatgcttgtgagtggagtgctgtactacaagtgcggggctcagttcgcattagtgactctgggtactctcggaacatatacggcctttacagtggccgtgaccagatggagaacccggttccgcatcgaaatgaacaaagcagataacgacgccggaaatgctgccattgactctctcctgaattacgagaccgtcaaatacttcaataacgaaaggtatgaggcccagcgttatgacggatttctgaagacttacgagactgcatctctcaagtcgacctccacattagcgatgcttaactttggtcaatccgcaatcttttcggttggactcacggccataatggtactcgccagccagggtattgtagctgggacgctgaccgtaggcgatttagtgatggtcaacggccttctgtttcaactcagtctgcccctgaacttcttgggtacggtctacagggaaacgcgccaggccttaattgatatgaacaccttatttacgcttctaaaagtggacactcagatcaaggacaaagtgatggcaagtccgctccagatcactcctcagacagcgacggtggcattcgataatgtccacttcgagtacatcgaagggcagaaggtgctgtctggaatctcctttgaggtaccggccggcaaaaaggtggcgatcgttgggggatcagggtcaggaaaatctaccattgtcaggctacttttccgcttctacgaaccccagaagggaagcatctaccttgctggccagaatattcaggacgtctccctcgaatctctgcggcgtgccgtcggtgtcgtgccacaggatgctgtgttgtttcataatacgatctactacaaccttctgtacgggaatatctccgctagtcctgaagaggtttacgccgtggcgaaattagccggcctccatgatgcaatcttgaggatgcctcacggctacgatacccaggtaggcgaacgcggactcaagctatcaggcggcgagaaacagagagtcgcgattgcccgggcgatcctgaaagaccctcctgtgatattgtacgatgaagccacttccagtctcgattctattacagaagaaactattcttggcgccatgaaggacgtggtgaagcaccggacctccatcttcattgcccaccgcttgtcgacagttgtggatgccgacgagatcattgtgctggatcaggggaaagtggccgagcggggcacccatcacgggctactcgcaaacccacactctatttattcagaaatgtggcacacacaatcttctagggttcagaaccatgacaatccaaagtgggaagccaaaaaggagaatatttcatag

SEQ ID NO: 179983 - DNA, 2181 bp, synthetic construct
  misc_feature 1..2181: note = Description of Artificial Sequence: Synthetic coding sequence
  source 1..2181: mol_type = other DNA
atggccctgctggccatgcacagctggcggtgggccgccgccgccgccgcctttgagaagcggcgacatagtgccatcttgataagaccattggtgtccgtgagcggaagcggcccccagtggagaccccatcagttgggcgccctcggtaccgctcgcgcttaccaggctctgcaggtgtggccgttgatcgaaaaaaggacatgttggcacggtcatgctggaggcggccttcacactgatcccaaggagggactcaaggatgtggatacccggaaaatcattaaggcaatgctttcttacgtgtggcccaaggatcgccctgatttaagagctcgcgtggcaattagtctgggcttcttaggcggcgcaaaggctatgaacatcgtggttcccttcatgtttaaatatgccgtggacagcttaaatcagatgagcggcaatatgcttaacctgtccgacgctcctaataccgtggcaactatggctaccgccgtgctgatcggctatggagttagtcgtgctggtgctgcttttttcaatgaagtccgtaacgccgtgttcgggaaggtcgcacaaaacagcattcgtagaatcgctaaaaatgtgttcctccatcttcacaatttagacctgggttttcacctgtctagacaaactggcgccctgagtaaggccatcgataggggaactcgtggcatatcattcgtgctgtcagcattggtatttaacctactcccaattatgttcgaggtgatgctcgtgtccggagtgctatattacaaatgcggcgctcagttcgccctggttactctcgggacactaggcacatacaccgcctttactgtcgccgtgactcgttggcggacacgctttcggattgagatgaataaagccgacaacgatgcggggaacgccgccatagattctttgttgaactatgaaactgttaagtacttcaacaacgagcgatatgaggcacagagatacgacggctttctgaaaacctacgagaccgccagtctgaaatctacttctacgttagctatgctgaacttcggccagagcgctatattctccgtgggcctgaccgccattatggtgctggcatcccagggcatagtcgctggaactctgacagttggcgatctcgtcatggtcaatggcttactgtttcagctcagtctccctctgaattttctcggtactgtctaccgcgaaacccggcaggctctaattgatatgaatacactatttactcttctcaaagtcgatacacagataaaagacaaagtcatggctagccccctccaaattaccccccaaacagccaccgtcgcattcgacaacgtgcacttcgaatacattgaaggccagaaggtcctgtctgggatctcattcgaagtccctgctgggaaaaaggtagccatagtaggtggttctgggagcggtaaatcaaccatcgtgagacttctgttccgcttctatgagccacaaaaagggtccatttatttggctggccagaacatccaggatgtgtccctagaaagtctacggcgagccgtgggtgtggtacctcaggatgccgtgctgttccacaacactatttattataatttactgtatggcaacatcagtgccagtccggaggaggtgtacgccgtggcgaagctggctggactccacgacgccatcctgcgaatgccccacgggtatgatacccaggtgggagagcgaggacttaagctgtcaggtggggagaagcagagagtcgcaatcgccagagccatcttaaaggacccccccgtgatcctgtatgatgaggccaccagcagcctcgactcgattaccgaggaaaccatcttgggagcaatgaaagacgtggtcaagcaccggacatccattttcattgcacataggctgagcactgtagtagacgccgatgagattattgtgttggatcagggaaaggtggccgaacgtggcactcaccacggccttctggcaaatccccatagtatctattccgagatgtggcacacccagagcagtcgggtacagaatcacgataatccaaaatgggaagcaaaaaaggaaaatatcagtaaggaggaagaacgtaagaagctccaggaggagatcgtgaactcagtgaaaggttgtggcaactgctcatgttag

SEQ ID NO: 179984 - DNA, 2208 bp, synthetic construct
  misc_feature 1..2208: note = Description of Artificial Sequence: Synthetic coding sequence
  source 1..2208: mol_type = other DNA
atgctggtgcacctgttccgggtgggcatccggggcggccccttccctggtcggctcctccctccacttagattccagaccttcagcgccgtgagaaatacctggagaaatggaaagaccggtcagctgcacaaggctgagggggagtattccgacggctatagatcaagctcgcttttacgcgcagtcgctcatctccgcagtcagctgtgggctcacttacctcgggctccgctcgcccctcgttggagtccaagtgcttggtgctgggtcgggggtgctctcctaggccccatggttttgtcaaaacacccacatctttgcctcgtcgctttatgcgaggcagaggaggccccgccagcttcatcaacaccccatgtcgttggcagccggtttaactggaagctcttctggcagttcctacatccgcatctgttggtgctgggtgtcgccgtcgtgctcgccctgggcgcagcactcgtgaacgtccagatcccactgctcctcggtcagctggtagaagtcgttgccaagtatacacgcgatcacgttggcagttttatgaccgagtctcagaacttatcaacacacttgctgattctctacggtgtccaaggccttcttacgttcgggtacctggtgttgctctctcatgtaggggaacggatggcagtggatatgaggagagcactgttttcatctctactgcgacaggacatcacattctttgatgccaacaaaacaggccaactcgtgagccgtctgacgactgacgtccaagaattcaaatcttctttcaaactagtaattagccagggtctacgaagctgcacccaggttgccggttgtttggtcagcctctcaatgttatctacgaggctgaccttacttctgatggtggcaacccctgctttaatgggcgtggggacactgatggggtccggacttagaaagctgtcaagacagtgccaagaacagatcgccagggctatgggggttgctgacgaggcgctcggcaacgtgcggacagttagggcattcgctatggaacagcgtgaggaagagagatacggcgccgaattggaggcatgcagatgcagagctgaggaacttggtcggggcatcgcattattccaaggactgagcaatatagcgtttaattgtatggtactcggcacactctttatcggggggagtctcgtggccggacaacagctgactgggggagacctcatgagctttttggtagcctcccagaccgtgcagcgctcgatggccaacctatcagtcctgttcggccaggtggtccggggtctttcggccggggcccgcgtgtttgagtacatggccctcaatccatgtatccctctgtccgggggatgctgcgttccaaaggaacagttaagaggcagcgttactttccagaacgtgtgcttttcgtacccctgtcgccctgggtttgaagtgctgaaggacttcacactcacgctgccccctggcaagatcgttgctctggttggccagagtgggggagggaagaccaccgtggcctccctgctggaaaggttttatgatcctacggcaggagtcgtgatgctggacggccgagatctgcgcactctggaccctagctggctgcgtgggcaggtcgtgggattcatatctcaggaaccagttctgtttggaactaccattatggagaacatccgttttgggaagcttgaagccagcgacgaggaggtgtacaccgctgcccgggaggcaaatgcccacgaatttatcacctccttcccagagggatataacactgtggtgggagaaagagggactaccctgtcagggggccagaaacaaaggttggctattgcaagagcgctcataaaacagcctacggtgctcatcctagacgaagctacctcagctctcgacgcggagagcgaaagggtagtgcaggaggctttagaccgcgcgtcagcaggaagaaccgtcctcgtgatcgctcacagactgtcgaccgttcgcggcgcacattgtatcgttgtaatggccgatggtcgggtatgggaagcagggacccacgaggagttgctgaagaagggcggtctatacgccgagctcattagacgacaagcgcttgatgcacctcgcaccgccgcgcccccccccaagaaaccagagggccctcgatcacatcaacacaagagttag

SEQ ID NO: 179985 - DNA, 1404 bp, synthetic construct
  misc_feature 1..1404: note = Description of Artificial Sequence: Synthetic coding sequence
  source 1..1404: mol_type = other DNA
atgctggtgcacctgttccgggtgggcatccggggcggccccttccccggcaggttgctccccccgctaagatttcagacatttagtgccgtcaggagactcctacgcctgcagcccagggtgagtcagaaagaaggaacactgggggtgtcggatcacgcccaatccgcactgccaactggtggacccttgagctggccctggcgatatagtgacggctaccgctctagttccttgctgagggccgtcgcccacctgcgttcacagctctgggctcacctgccgagagcccctcttgctcccagatggagccccagtgcatggtgctgggtcggtggcgccttgctgggaccgatggtgctctccaagcatcctcacctgtgtttggtggcattatgtgaggccgaggaagcaccaccagcatcttccacgcctcatgtggtcgggagcaggtttaattggaaacttttctggcaattccttcaccctcacttgcttgtgctgggagtcgccgtggtcctggcactaggagcagcactggtgaacgtgcagattcccctcctcctgggccagcttgtcgaggtggttgctaagtatacccgggaccatgttggatcattcatgactgagtctcagaacttgtctacacacctgctgatcctttacggcgtccaaggactgttaaccttcggatatcttgtactgctgtcccatgtgggagagcgcatggcagtggatatgaggcgggctcttttttcatcactcctccgacaggacatcaccttcttcgatgccaacaagactggtcagctggtcagtcgactgacaacggatgtccaggaattcaagtctagcttcaagctagtcatatcacaaggacttagaagctgcacacaggttgcaggctgtctagtctctctttcgatgctctctacacgactgacactattattgatggttgcaactccggcgcttatgggggtgggcactctcatgggctccggcctgcgcaagctttctcggcagtgccaggaacagatcgctcgtgcaatgggggtcgcagacgaagcattgggaaatgtgagaactgtgcgggctttcgccatggaacagcgggaggaagagcggtacggcgctgagctagaggcctgccgctgccgagccgaagaattggggcggggcatcgctttgtttcaaggcctgagcaatatcgcttttaactgcatggtcctgggaaccctttttattggagggagcctggttgcggggcaacagctgaccggcggggatcttatgagtttcctcgtcgcctctcagacagttcagaggcaggtccatggccaacccctgtgtcccgtgtgggcaggcggacccggggctgaatgcaggtgtccaggtctgtag

SEQ ID NO: 179986 - DNA, 2157 bp, synthetic construct
  misc_feature 1..2157: note = Description of Artificial Sequence: Synthetic coding sequence
  source 1..2157: mol_type = other DNA
atgctggtgcacctgttccgggtgggcatccggggcggccccttccctgggaggctgcttccaccactgcgattccagaccttctcagccgttcggtatagtgacgggtatcgcagtagttccctcctgagggccgtcgcgcatctgagatctcagctctgggcccatctaccccgagcacctcttgcgccacggtggtccccgtctgcatggtgttgggtcgggggcgctctgcttggtcccatggtgttatccaagcacccccacctctgtcttgtggcactttgcgaggctgaagaggccccaccggcttcttccacaccccacgtggtgggttctcggtttaactggaagttgttctggcagtttctccatccacaccttctggttttaggggtggctgtcgtcctggctcttggggccgcattagtaaacgttcaaattcctctgctgctgggccagttggtggaggtagtcgcaaaatacacgagagaccatgtgggcagcttcatgactgaatctcaaaacctgagcactcacctgttaattttgtatggtgttcagggactgttgacatttggctatctggtcttgctctcacatgtcggagagcgcatggccgtagatatgcgtagggccctgttttctagccttctacggcaggacatcaccttttttgatgcaaacaagaccggacagttagtctctcgactgacgaccgacgtgcaggagttcaaaagcagtttcaagcttgttatctcacaagggttaaggtcctgcactcaggttgccggttgcctggtgtctctgtctatgctcagcaccaggctgacattgcttcttatggtggcaactccagcactcatgggggtgggaacactaatgggatcgggactacgcaagctgtcccgccagtgtcaggagcagatcgctcgtgctatgggtgtcgcggatgaggccctggggaacgtgcggaccgtgcgggcattcgccatggagcagagagaggaagaaaggtatggggccgagctcgaggcatgcaggtgtcgggccgaggagcttggcagagggattgcactgttccaaggtctgagcaatatcgcctttaactgtatggttctgggtaccctgttcatcggtggctcgcttgtggcaggccagcagctgactggtggcgatctgatgagcttcctggtggcaagtcagacggtgcaacggagcatggcaaacctatctgtgctctttggccaggtcgtcaggggcctgagcgctggagctcgggtgtttgagtacatggccctcaacccttgcattcccctgtcgggcggctgctgcgttccgaaagaacaactgcggggtagcgtaacatttcaaaatgtgtgcttctcatatccctgcaggccagggttcgaagtcctgaaagatttcacattaaccctacctcctggcaaaatagttgctttagtgggtcaaagcggggggggcaaaacgaccgtcgcttctcttttggagagattttatgacccaaccgctggagtcgtgatgctcgacgggcgcgacctgaggacactggacccatcctggttgcgtggacaggtagttggcttcatttctcaggaacccgtcttattcggcactacaattatggaaaacatcaggtttggtaaactggaggcaagcgacgaggaggtttacaccgcagccagggaggccaatgcccacgagtttattacatccttcccagaagggtacaatacggtagtgggggagagagggaccacactttcaggagggcaaaagcagcggctggcaatcgcgcgagctcttattaagcaaccaactgtattgatcctagacgaggctacctccgcactcgatgcagaaagcgaacgggtggtgcaagaagctctggatcgtgcctctgcaggccggacagtcctggtgattgctcacagactcagcaccgtccggggggcccactgtatcgtggtgatggcggacgggagagtgtgggaggctggaacacatgaagaactcctcaagaagggcgggctctatgcggagttaatccggaggcaggcactcgatgcgccccgcactgccgccccgccaccaaagaagcccgagggcccccgtagccatcagcataaatcttag

SEQ ID NO: 179987 - DNA, 2106 bp, synthetic construct
  misc_feature 1..2106: note = Description of Artificial Sequence: Synthetic coding sequence
  source 1..2106: mol_type = other DNA
atgctggtgcacctgttccgggtgggcatccggggcggccccttcccaggacgactgctgcctccactcagattccagactttttctgctgtgagatatagcgatgggtataggtcaagttctctgttgcgcgctgttgctcacctccggtcacaattatgggcccacctccctcgtgcgttgctgggacctatggtcctgagcaagcacccccatctgtgtctcgtggctttatgtgaagctgaagaggctcctcccgctagtagtacacctcatgtagttggaagccggtttaactggaaactcttctggcagtttctgcaccctcacctgctggtcctcggtgtggccgtggtgctagccttaggggcagcgctcgtcaacgtgcagattcctctcctattgggccagctggtggaagtggtggccaagtatacacgagatcatgtggggtcattcatgacagaatcacagaacctaagtactcacctcctcatcctgtatggggtccagggcctgttaacatttggatatctcgtcctgcttagccacgtgggtgagcggatggctgtggacatgcgtagagctctgttcagctccctcttgaggcaggatatcactttcttcgacgctaataaaaccggacaactcgttagtcggttgactaccgatgttcaggaatttaagtcctccttcaaattggtgatttctcagggtctgcgctcctgtacgcaggtcgcgggatgcttagtgtctctttccatgttgagcactcggctgacgcttctgttaatggtagcaactccagccctaatgggagtggggactttaatgggttcagggttacgaaagctgtctaggcaatgccaggagcaaattgcccgagctatgggggtagcagacgaggctttagggaacgtcagaacagtcagagcattcgcgatggagcaaagggaggaggagcgatacggggccgagcttgaagcttgccggtgtcgggccgaggagctaggccgcgggatagctcttttccagggactctcaaatatcgcatttaactgtatggtactgggcaccttgtttattggtggctccttggtagccggtcagcaactcactgggggcgacctcatgtcgttccttgtcgctagccagaccgtccaaaggtctatggccaacctgagtgtcctgtttggccaggtcgtgaggggcctgtctgctggcgcacgagtctttgagtatatggctctgaacccctgtattccgctgtctggcgggtgttgcgttccaaaggagcagctcagggggtcagtcacttttcaaaacgtttgctttagttacccttgcagacccgggttcgaggtgttaaaagacttcactttaaccctcccacccggtaagattgtggccctggtcggccaatccggaggtggcaagacgacagtggctagtctgttagagcgtttttacgaccccacggcaggcgtggtgatgctcgacggtcgggaccttaggacgctggacccctcatggttgcgagggcaagtggtgggctttatctcccaggagcccgtgctgtttggcaccaccattatggagaacattcggtttggcaaactggaggcttcagatgaggaagtttatacagctgctagggaagctaatgcacatgaattcatcaccagttttcccgagggatataatacggtcgtgggagaaagaggcacaacactgagcggggggcaaaagcagcggttagccattgctagagccctaattaagcaacccacagtactcatcctggatgaggcaacctctgcgctggacgctgagagcgagagggtggtccaggaagcccttgatagggcctccgccgggcggactgttttagtgatagcccaccggctgagcaccgtgaggggtgcgcactgtatcgtggtgatggcggacgggcgcgtatgggaggcaggcactcacgaagagctcctgaagaaaggcgggttatacgccgaactcatccggcgacaggcgctcgatgcccctcgcacagccgctcctcccccaaagaagccagagggtccaaggagccaccagcataaatcctag

SEQ ID NO: 179988 - DNA, 1296 bp, synthetic construct
  misc_feature 1..1296: note = Description of Artificial Sequence: Synthetic coding sequence
  source 1..1296: mol_type = other DNA
atgctggtgcacctgttccgggtgggcatccggggcggccccttccccggacggctgcttcctcccttgagattccagaccttctccgccgtgagatacagcgacggctataggtcaagctcgttgctgagagcggtggctcaccttcgctctcagctctgggctcatctgcctcgagcccccctcgctcccagatggtctccctctgcctggtgctgggtgggtggcgccctgctggggcccatggttctcagcaagcatccacacttatgtcttgtggccctttgcgaggctgaggaagcaccccccgcttcctccactccacatgtggtcggcagcaggttcaattggaagcttttctggcagttcttacatcctcacctgcttgtcctcggagtcgccgtcgtgcttgctcttggagcagctctcgtgaacgtgcagattcccctccttctcggccaactcgtagaggtcgtggccaagtacacccgggatcacgtcgggtcattcatgaccgagagtcagaacttatcgacacacttactcattttgtacggagtgcaaggcctgcttaccttcgggtatctcgtcttgctgtcccacgttggcgaacgtatggctgtcgatatgagacgggctctttttagcagtctccttaggcaggatataacatttttcgacgccaacaaaactggacagctcgttagtagactgacaactgacgtgcaggagtttaagagctccttcaaattggtgatatcccaaggactgaggtcttgtacacaggtcgccggctgcctagtcagcctctctatgttgtctactagattgacactgttattgatggtggccacacccgccctcatgggagttggaacactgatgggatctggactacggaaactgagccgtcagtgtcaggagcagattgcaagggcaatgggcgtggcagatgaggcgctgggaaatgtgagaaccgttcgtgcctttgccatggagcagagagaggaagagcgctacggcgctgagttagaagcgtgtcgttgtcgggctgaagagctgggccgaggcatcgctttgtttcaaggcctgagcaacatagcgtttaactgcatggtcctgggaacactcttcattggcgggagcctggttgcaggtcagcagttgaccggcggcgatctgatgagttttttggtggcctcgcagacggtccaatcttttctacgggtcgccccttgtccgaacagtttgcctctgcaagccgtgacctttcatgcatggaaggatcacccctag

SEQ ID NO: 179989 - DNA, 2082 bp, synthetic construct
  misc_feature 1..2082: note = Description of Artificial Sequence: Synthetic coding sequence
  source 1..2082: mol_type = other DNA
atgctggtgcacctgttccgggtgggcatccggggcggccccttccccggaagactcctgccaccactgagattccaaaccttcagtgccgtacggtacagtgatggttataggtcaagctctcttctcagggcagtggctcatctcaggtctcagctttgggcccatctgcctagggcacctctcgcgcctcggtggtcgccaagcgcttggtgttgggtgggcggggcacttctcggtcccatggtactatcaaagcatccacatctgtgtctcgtggcactgtgtgaagctgaggaggctcctcccgcatcatctaccccccatgtcgtcggatccaggtttaattggaaactgttttggcagttcctgcacccccacttgttagtgctcggcgttgctgtggttctggctctgggtgccgctcttgtgaatgtccagataccactactgttgggccagcttgttgaagtggtggctaagtacactcgggaccacgtgggttccttcatgaccgagtctcagaacctttccacccatttactcatcctctacggcgtgcagggacttctgactttcggctacctggtgttattaagccatgtgggcgagcgcatggctgtagatatgcggcgggctctcttttcctcacttcttaggcaggacataaccttttttgatgccaataagaccggtcagctggtgtccaggcttaccactgatgtgcaggagttcaaaagttctttcaagttagtgatttcgcagggattacgatcatgtacacaggtggcaggttgtctcgtgagtctcagtatgctgtcaacacgcctgacactccttctcatggtggcaactcccgctctgatgggggtgggaacactgatggggtcaggtctgcgaaagctgtccagacagtgtcaggagcagattgctcgcgcaatgggcgttgccgacgaggccctagggaatgttcggactgtgagagcctttgccatggagcaacgggaagaggaaaggtacggcgcggaattggaagcatgccgctgcagggcagaggagctgggccgaggcatcgctttgtttcaaggcctcagtaatatcgcttttaactgcatggtgcttggaaccctattcatcggtgggagccttgtggctgggcagcaactgaccggtggcgatctgatgtcttttcttgttgccagtcagaccgttcagcgctccatggcgaacctatctgtgctgtttggccaagttgtgcgcggtctgtccgcaggagcccgcgtgttcgagtacatggccctgaatccttgcatccccttgtctggcggctgctgcgtcccaaaggagcagcttcgaggatcggtcacctttcagaacgtgtgtttttcttatccctgccgcccggggtttgaggttcttaaagattttactttgacactgccgcccggaaagatcgtggctctggtgggccagagtggaggggggaagacaacggttgcttcattgctcgagagattctatgatcctacagcaggcgtcgttatgttagacggtcgtgaccttcgaaccctggatcctagctggctacgcggtcaagtggtcggcttcataagccaggaacctgtactctttggtaccacgattatggagaatatcagattcggtaagttagaagcctcagacgaggaagtatacacggccgctcgcgaagctaacgctcacgaattcatcacgtctttccctgagggttataacaccgtggtcggggagcgcggcacgaccctgtctgggggccagaaacagcgtctggctattgcaagagcgctgattaagcagcctactgttctcatcctggatgaggcaacaagtgctctggacgcagaaagcgaaagagtagtgcaggaagcactagatcgggcctctgccggccgaactgtcctggcgggcacccatgaggaactgctgaagaaagggggcctttatgctgaactgattcgaaggcaggccttggacgccccacgaaccgcagctccaccaccgaaaaaaccagaaggtccacgctcccatcagcataagtcgtag

SEQ ID NO: 179990 - DNA, 1893 bp, synthetic construct
  misc_feature 1..1893: note = Description of Artificial Sequence: Synthetic coding sequence
  source 1..1893: mol_type = other DNA
atgcgggtgaagctgctgctgcccgccgcccccgtgctgccccggcagcatgctggagctttcattagtggacgcgattctggctggccaattcccaggcaggccgccacagctccaccattaccggatattctgtcttgtcaactggcccttggtgcagcactagtgaatgtccaaattccattgctcttgggccagctcgtggaagtggtggcaaagtatacaagagatcatgttgggagctttatgactgagtcgcaaaatctttccactcatcttttgattctgtacggggttcagggattgctcacttttggctatctggtgctgctgtctcatgtgggggaaagaatggctgtggacatgagacgcgcactatttagcagcctgctgagacaggatataaccttctttgacgctaataagacagggcagctggtttccagactgaccacggatgtacaggagttcaagtctagctttaaattggtaataagtcagggactgagatcatgcacacaggttgccggatgtcttgtgtctctctctatgctgtctacccggctgacactgctcctgatggtggccacgcctgcacttatgggtgtcggcactctaatgggcagcggcctgagaaaacttagcaggcagtgtcaggaacaaatcgcccgggctatgggtgttgccgatgaggccttgggaaatgtccggactgtgagggctttcgccatggaacagcgtgaggaggaacgctacggagcagaactagaggcatgtagatgtcgggccgaagagttaggtaggggaattgcacttttccagggactgagcaacatcgcattcaactgcatggttctggggacgctctttatcggggggagcttggttgcaggccaacagctgactgggggggacctgatgtcattcttagtggcatcacaaactgtgcagaggagtatggctaatctgagcgttttgttcggccaggtggtgcgcggactctccgccggggctagggtgttcgagtacatggcgttaaatccatgcatacctctatcgggcggatgctgcgtgcctaaggagcagcttcgagggagcgtcactttccagaacgtgtgtttttcttatccttgtcggcctggctttgaagtgttgaaggacttcacccttactctgcctccaggcaaaatcgtggctttagtgggacaaagcgggggtggaaaaaccacagttgcatctttgctcgaaagattttatgacccaaccgctggtgtggttatgctggacggtcgggacctaaggaccctggatccatcctggctcaggggccaggtcgtgggatttatctcacaggaaccagttctcttcgggacgaccattatggaaaacatcagattcggcaaacttgaagcgtccgacgaagaagtttacaccgctgctcgtgaagctaacgcacatgaatttatcacctcattcccagaaggatataacacagtggtgggagaacgggggactaccctgagcggcgggcagaagcagagactcgccatcgcccgggccctgatcaaacagccaactgttctgattctagacgaagccaccagtgcattggatgccgaatccgagcgcgttgttcaggaggcactggatagggctagcgcaggaaggaccgtactggtgattgcccaccgtctgagtactgtgaggggcgcccactgtattgtcgtcatggcagacgggagagtttgggaagcggggacacacgaggagctgttgaagaaaggtggactttacgccgagcttattagaaggcaggccttggatgctccaagaacagccgccccacctccaaaaaagccagaagggcctcgcagtcatcagcacaaaagctag

SEQ ID NO: 179991 - DNA, 2301 bp, synthetic construct
  misc_feature 1..2301: note = Description of Artificial Sequence: Synthetic coding sequence
  source 1..2301: mol_type = other DNA
atgcggctgtggaaggccgtggtggtgaccctggccttcatgagcgtcgatatctgcgttaccacggccatctacgtcttctctcacctggaccgctccctgttggaggacattagacatttcaacatttttgattcggtactcgatttgtgggccgcatgcttgtaccggagctgcctactgctgggggctactataggggtggccaaaaattctgctctgggccctcgaagactccgcgcttcttggttagttatcaccctcgtctgcctgttcgtgggaatctacgcaatggtgaagctgttgcttttttcagaagttaggagacccataagagacccatggttttgggccctctttgtgtggacctacatcagcctcggcgcctcatttttactctggtggctgctgtcaacagtgcgccctggcacacaagcactggaacctggggctgctacagaggccgaaggtttccccgggagcggcaggccacctcctgagcaggccagcggagcaactctacagaagctcttgagctacaccaagcccgacgtggccttccttgtggccgcttctttttttctcattgtggctgcactgggggagacctttttgccctactacacggggagggcaattgatggcatcgtgattcagaagtccatggatcaattctcaacagccgtggtaattgtctgtcttctggcaatcggctcctcctttgccgccgggatccgaggtgggatcttcacattgatttttgccagactcaacatccgcttgcggaattgcctgtttagatcactggtctcccaggaaacctcattctttgatgagaatcggacgggcgacctcatcagtagactcacctcagataccaccatggtatcagatctggtctcccaaaacattaatgtgtttcttcggaatactgtcaaagtcactggggtggtggtttttatgtttagcttgtcctggcaactgtcattggttactttcatggggtttcctattatcatgatggtcagcaatatctatggtaaatattacaaacgcctcagcaaggaagtgcagaatgcactagcccgagcgtccaataccgccgaagagacaatatcagccatgaaaaccgtccgctcattcgccaatgaagaggaggaggccgaggtatacctgaggaaactacagcaggtatacaagctgaatcgaaaggaagccgccgcctatatgtactatgtatgggggtcaggtttaaccctccttgtagttcaggtttctattctgtattatggcggccacctggtcattagcggtcagatgacttctggaaatttaatagcgtttattatctatgagtttgttctcggagactgtatggaaagcgtgggaagcgtttactcagggcttatgcagggggttggtgccgccgagaaggtattcgagtttatcgacaggcagcccactatggtgcacgacggatcccttgcacctgaccacctcgaaggccgcgtagactttgagaacgtcacttttacatataggaccaggccacatacccaagtgttgcagaacgtgtcgttttccctgagtcccggaaaagtgaccgcgctcgtcgggccctccgggtccgggaagtccagctgtgtgaacatcttagagaacttctaccccctggaaggaggccgcgtgctgctcgacggaaagccaatctcagcttacgaccataagtacctccatcgggtgatcagtcttgtctcacaggagcccgtccttttcgccaggagcatcacagacaatatcagctatgggctgcccacagtgcctttcgaaatggttgtcgaggccgcacaaaaagctaacgctcatggcttcataatggaactgcaggacggatacagcacggagacgggagagaagggggcgcagctgtctggcggccagaagcaacgggtagcaatggcacgggcgctcgtgcgtaacccgccggttttgatccttgacgaggccactagcgccttagatgcagagtcagaatacttgatacagcaggctatccacggtaacctgcagaagcacactgtcttgattatcgcacaccggctttctaccgtcgaacatgctcatctaattgttgttctggacaagggtcgcgtcgtgcaacaggggacccaccagcagctgctagctcaggggggtttgtatgcaaaactggtgcagcgtcaaatgctcggcctccagcctgcagccgactttaccgccgggcataatgaacccgtagccaacggctctcacaaagcatag

SEQ ID NO: 179992 - DNA, 2172 bp, synthetic construct
  misc_feature 1..2172: note = Description of Artificial Sequence: Synthetic coding sequence
  source 1..2172: mol_type = other DNA
atgcggctgtggaaggccgtggtggtgaccctggccttcatgagcgtcgatatttgcgtcacaacagctatttacgttttttcccacctcgacaggtcattacttgaagatattaggcacttcaacatcttcgattccgttcttgacctttgggctgcgtgtctctataggtcttgcttactgttgggggcgaccataggagtagccaagaatagtgctcttggtcccagacgtttgcgggcctcctggctggtgataactctcgtttgcctgtttgtcggcatctacgcaatggtgaagctgctgctgttctccgaagtgcgtcgccccatcagggacccttggttctgggccctgtttgtgtggacatacatctccttgggagcaagctttcttctctggtggcttctgagcacagtgcggcctgggacgcaggctctggagccaggcgctgctacggaagcagagggtttccccggcagcggaagacctccccccgagcaggcctcaggtgctaccctgcagaagctgctttcttacactaagcctgacgttgcattcctggtggctgcctctttctttctgattgtcgccgcgctgggcgagacctttttgccatactacaccggcagagccattgacggcatcgttatccaaaaatctatggaccaatttagtaccgccgtagtgatcgtgtgccttctggcaatcggcagcagcttcgctgccggcatccgcggtggaattttcacactgattttcgccaggctgaatatccgtctaaggaactgcctatttcgctctttggtttcacaggagacctccttcttcgacgagaaccggacaggcgacctgatctcacgcctgacatccgatactacaatggtgtctgatctggtgagtcaaaacattaacgtttttttgaggaacactgttaaagttacaggggtggtggtgtttatgttttccttaagctggcaactctccctcgtgacattcatgggctttccaattattatgatggtctctaatatctacgggaaatattataagagattaagtaaagaagttcagaatgccctagcccgcgcatctaacacggcagaggagacaatttcagccatgaagacagtcaggtccttcgccaacgaagaagaggaagccgaagtatatctcagaaaacttcagcaagtttacaagctgaacagaaaagaggcagccgcctatatgtattatgtgtgggggtccggctcggtgggcagcgtgtactccggactgatgcaaggagtgggtgccgcagagaaagtctttgaattcattgatcgccagccaacgatggttcacgatgggtctctggcgcccgaccacctggagggccgggtggattttgagaacgtcacttttacctataggacccgcccccatacacaggtgctccagaatgtctcttttagccttagtccgggcaaagtgactgcccttgttgggccctctgggagtggaaagtccagttgcgttaatatcctggaaaacttttatccccttgagggaggacgcgtgctcctcgacggcaagcccatcagtgcctacgaccataaatatctgcaccgcgtgatctcacttgtaagccaggagccggtcctgttcgccagaagcatcaccgataatattagttatgggctgccaactgtcccctttgaaatggtggtcgaagccgctcagaaggctaacgctcatggttttatcatggaattacaagacggctatagtacagagaccggcgagaagggtgctcagctgtccggcgggcagaagcagcgcgtagctatggcgcgcgcactagtgcgcaacccccccgtgctcatcctcgacgaagctacctctgccctggatgccgaatcagaatacctgatacagcaggcgatccatggtaaccttcaaaagcataccgtgctgattatcgcccatagactcagcaccgtagagcatgcccatttgatcgtggttctagacaaaggacgtgtagtgcagcaaggaactcaccagcagctgctggctcagggtggcctgtacgccaagctggtccaacggcagatgctgggactgcagcccgctgcagattttacggctgggcataacgagcccgtagccaacggaagtcacaaggcctag

SEQ ID NO: 179993 - DNA, 2301 bp, synthetic construct
  misc_feature 1..2301: note = Description of Artificial Sequence: Synthetic coding sequence
  source 1..2301: mol_type = other DNA
atgcggctgtggaaggccgtggtggtgaccctggccttcatgagcgtggatatatgcgtgacaaccgctatctatgtgttttctcacctggacagatctctactggaggatattcgtcatttcaacattttcgactctgttctggacttatgggctgcctgtctgtaccggagctgcctgctgcttggtgctaccattggtgtcgcaaagaactccgccctgggcccacggcggctgcgtgctagttggcttgtgataaccctcgtgtgtctcttcgtgggcatctatgcgatggtcaagctgctgctcttttccgaagtaagacgacccatcagggatccctggttctgggcgctctttgtttggacctatatttcactgggagccagtttccttctctggtggctgttgagcacagtgcggccagggacgcaggccttggaacccggagctgcaaccgaggctgaagggttccctgggagtggcagaccaccccccgagcaggcctcaggagccaccctccaaaagttgctctcctacactaagcctgacgtggcctttctcgtcgccgcgagtttctttctgattgttgccgctttaggcgagacattcctcccatactacacaggcagggcaatcgatggaatcgttatccaaaagagtatggatcagttctcaacagccgtggtcattgtctgcttgctggccataggatcttcttttgcagccgggattagaggcggcatcttcaccctgatctttgcccgcctcaatatccgattgagaaattgtctgtttcgatcgctcgtgagccaggagacgtccttcttcgacgagaacagaacaggggacctgataagcagactgactagtgacacaaccatggtgagcgacctggtgagtcagaatattaatgtttttctcaggaataccgtcaaagtgactggggtggtggttttcatgttcagtctttcatggcagctttccctggtgacatttatggggtttcccataatcatgatggtctctaacatctacgggaagtattacaaaaggttgtctaaagaggtccaaaacgctctggcacgcgcatccaataccgcagaggaaacaatctctgccatgaagaccgttaggtcctttgccaacgaggaagaagaggccgaagtctacctgaggaagttgcaacaggtttataagctgaaccgcaaggaggctgcagcatacatgtactatgtatggggttcgggactgactctgctggtggtccaagtctctattctgtactacggcggacacctcgtgatcagcggccaaatgacaagcggcaatttgatcgccttcattatctacgagtttgtgcttggcgactgtatggaatccgtcggatcagtctatagtggtcttatgcagggagtaggagcagccgagaaagtgttcgagtttatagataggcagcccactatggtgcacgatggctcgcttgcgcccgatcatctcgagggaagggtggatttcgagaacgtaactttcacgtatagaacacgcccacacacacaggtcctccagaacgtgagtttttccctcagccctggtaaggtcacagcactggtgggtcctagcggctctggaaaaagctcatgtgttaacattctggagaacttttatcctctggagggagggcgagtcttgctggatggcaagcccattagcgcctatgaccacaaatatctccacagagtaatctctttggtcagtcaggaacctgttttatttgcaagaagcataaccgataatatcagctatggtctacccaccgtaccttttgagatggtcgtagaagcagcgcagaaagctaatgcccacggattcatcatggagcttcaagatggttactccacagaaaccggagaaaagggcgcgcaactgagcggcggtcagaaacagcgcgtggccatggccagggcactggtgagaaatccaccagttctgatcctggatgaggctacctcagcgctcgatgccgagagtgagtatctgatccagcaggccatccacggtaacttgcagaagcacactgtattgatcattgctcatcggctttccacagttgagcatgcccacttgattgtggtgctggacaaaggccgtgtcgtgcagcagggcacacaccaacagcttctggcacaaggcggcctgtatgctaaattagtccagcgccaaatgctcggacttcaacccgccgcagactttactgccgggcataatgaaccggtggcaaacggaagtcataaggcgtag

SEQ ID NO: 179994 - DNA, 2310 bp, synthetic construct
  misc_feature 1..2310: note = Description of Artificial Sequence: Synthetic coding sequence
  source 1..2310: mol_type = other DNA
atgcggctgtggaaggccgtggtggtgaccctggccttcatgagcgtggacatctgtgtgactacagctatatacgtctttagtcatctggatcggtccttgttggaggacatcaggcactttaacatctttgattctgtgcttgatctgtgggccgcatgcctgtaccggtcatgcctgctgctgggagccaccattggcgtggcaaagaactccgctttagggccaagacgcctgcgcgcctcctggctggtcatcaccctagtgtgcctgttcgtgggtatctacgccatggtaaaactgttactattctccgaggtgagacgccccattagagatccttggttctgggccctgttcgtgtggacatatattagtctgggagctagctttctgctgtggtggctcctctcgacagtccgaccaggcacccaggccctggagcccggggctgccacagaagcggaggggttcccaggcagtggacggccaccgccggaacaggccagtggagccactcttcagaagctcctgtcctacactaaaccagacgtggccttcctggtggctgccagcttttttctgattgtagccgccctcggggaaaccttcctaccttattatactgggagggctattgatgggattgtgattcagaaatccatggaccagttctcgacagcggtggtgattgtctgtcttctggccattggtagctcttttgccgcagggattcgtggcggcatctttactttgatctttgcgaggctcaacatccggcttaggaattgcttgttccggtccctggtctctcaggagaccagcttttttgatgagaacaggaccggggacctcatttctaggctcacaagcgatactactatggtgtccgacctcgtaagccaaaacattaacgtgtttctgagaaacacagtgaaggtcactggcgttgtggtattcatgtttagtcttagctggcagttgtctctggtgacattcatgggcttcccaattatcatgatggtaagcaatatctacggtaagtactacaagaggttatccaaggaagtgcaaaatgcattagctcgtgcctctaatacagccgaggagaccatctcagcgatgaagactgtccgcagctttgctaatgaggaggaagaagccgaggtttaccttagaaagttgcaacaggtgtacaagctgaaccgaaaggaagcagccgcttacatgtattacgtctggggctccggtctaaccttgttggtagtgcaggtgtctattctttactacgggggtcacctagtgatctcagggcaaatgacgagtggcaatctgatcgcattcattatttatgaattcgtgctgggtgattgtatggagagtgtgggatcagtatacagcgggttgatgcagggagtgggcgccgcagaaaaggtctttgagttcatagacaggcaacctaccatggtccatgacggttcactggcccccgatcacctggaagggcgagtggactttgaaaatgtgacctttacctatcggacacgcccccatacccaggtcctgcagaacgtatctttcagcttgagcccgggaaaggtcacggcgctcgtgggtcccagtggttctggaaagtcctcgtgcgttaatattctggagaacttttacccgctggagggtggtcgcgtgctcctggacggaaagcccatttccgcttacgatcataaatacctccacagggtgattagtctcgttagtcaggagccagtgttgttcgctcgctctataaccgacaacatatcctacggactccctactgttccattcgaaatggtggtcgaagccgcccagaaggcaaacgcacatggattcattatggagctccaggacggctactctacagagacaggggagaaaggggctcagcttagcgggggccagaagcagcgcgtggccatggctcgtgctctggttcgcaatccccccgtgttaattctggacgaagctacctctgctctcgacgctgagtctgagtatttaagcccacaaattcagcaggccattcatggaaaccttcagaaacatacagtactgatcatagcacaccggctgtctactgtggagcatgcccatttaattgtggtattggataagggcagagtggttcagcaggggactcaccaacaactgctggcccagggcggcttgtacgccaaactcgtgcagagacaaatgctggggttgcaacctgctgccgacttcactgccggacataatgagcctgtagccaatgggtcacacaaagcctag

SEQ ID NO: 179995 - DNA, 2112 bp, synthetic construct
  misc_feature 1..2112: note = Description of Artificial Sequence: Synthetic coding sequence
  source 1..2112: mol_type = other DNA
atgcggctgtggaaggccgtggtggtgaccctggccttcatgagcgtcgacatttgtgttacaaccgccatttatgtattctcacacttagatcgctcgctgctggaagacataaggcacttcaatatcttcgattcagtcctcgacctctgggctgcctgtctttaccggagctgcctgctgctgggcgccactattggggtcgccaagaatagtgccctggggccacggcgcctgcgcgcatcatggttggtcattactttggtttgtctttttgtgggaatctacgcaatggttaaactactgctgttcagcgaggtcaggcgtcctattcgtgacccttggttttgggctcttttcgtctggacctacattagtttaggcgcttcgttcctgctgtggtggcttctctctaccgtgcgcccgggcactcaagctctcgagccgggggctgcaacggaggctgagggcttcccagggagcggcagaccacccccggaacaggcttctggtgccacactccagaagcttcttagttacaccaagccagatgtagccttcctggtggccgcctcctttttccttatcgtagcagccctcggcgagacatttttgccttactacaccggcagggccattgacggcatagtgatccagaagtcgatggaccaatttagcacagccgttgtaattgtgtgcttgcttgcgattgggagttcatttgctgccggcataagggggggcatctttactcttatctttgccaggttaaatattcggctgagaaattgcttattcagatccttggtcagccaagagacctcttttttcgacgaaaaccgcactggggatctgatttctaggctgactagcgatacaacgatggtcagtgaccttgtgtcccaaaatatcaacgttttcttacggaacacggtgaaggttaccggagtggttgtgttcatgttctccctgtcatggcagctctcattagttactttcatgggcttccctattatcatgatggtgtcgaacatctacggaaagtattataaaaggttgagcaaagaagtgcagaacgcactggctcgggcaagcaatactgcagaagagactattagcgccatgaagaccgtgcggagttttgccaacgaggaagaagaagccgaggtgtatctgcggaagctgcagcaggtatacaaacttaaccggaaggaggcagcagcctacatgtattatgtctggggatccgggctgacgctgcttgttgtgcaggtgtctattctttattatggagggcacctggtgataagtggtcagatgaccagtgggaacctcatcgctttcattatctatgaatttgtcctgggagactgcatggaaaacgtctcctttagcctgagtccgggaaaggtaactgcactggtagggccttctggatccggcaaatcctcatgcgtgaatatcctcgagaatttctaccctttggagggcggcagggtactgctggacggaaagcccatatccgcatacgaccacaagtatctgcaccgcgttataagtctggtgtcacaagaaccggtgctcttcgctcgttctataaccgacaacatttcctatggcctccccacagtccctttcgagatggttgtggaagctgcacaaaaggccaacgctcatggttttatcatggagcttcaggatgggtactccaccgaaaccggcgagaagggggcccagctttctggggggcagaaacagcgcgttgccatggcaagggccctggtgaggaaccctcctgtcttaatcctggatgaagccaccagcgcactcgatgcagaatctgaatatctcatccagcaagccattcatgggaacctccagaagcacaccgtgctcattatcgcccataggctgtccaccgtagaacacgcacacttgatagtcgtcctggacaaggggagggttgtacagcaggggactcaccagcaactgctggcacagggcgggctatacgccaagctggtgcagcgacagatgttggggctgcagcctgcagctgattttacagcaggccacaacgagccggttgctaatggaagccacaaggcttag

SEQ ID NO: 179996 - DNA, 2301 bp, synthetic construct
  misc_feature 1..2301: note = Description of Artificial Sequence: Synthetic coding sequence
  source 1..2301: mol_type = other DNA
atgcggctgtggaaggccgtggtggtgaccctggccttcatgagcgtggacatctgcgttacaactgcaatctatgtcttttcccacctcgatcgctcactgctcgaggatattcgccacttcaacatttttgacagcgtcctcgatttgtgggccgcttgtctctaccggtcgtgcctccttcttggtgcgacaataggagtagccaagaactcagctctcggtccccgcagactccgagcatcatggctcgtgatcacgctggtctgtttgtttgtgggtatatacgcgatggtcaagctgctgctcttcagtgaggtgaggaggcctattcgggatccttggttctgggctttgttcgtgtggacgtacatctctctgggtgcatcattcctgctgtggtggctcttgtcaacagtgcgccctggtacccaagctctcgaacctggcgctgccaccgaagctgaggggttccctggcagtggccggcccccccctgagcaggcatctggggccacattacaaaaacttttgtcatataccaagcccgacgtcgccttcctggtagccgcatcatttttcttgatcgttgctgcactgggcgaaacttttctgccatattacacggggagggcaattgacggcatagttatccagaaaagcatggatcagttttctactgccgtagtgattgtatgtctactggcgatcgggagcagtttcgcagccggcatccgcggaggcatctttacgttgatctttgcaagacttaacatcaggctaaggaattgtctgtttaggagtctcgtgagccaagagacatcctttttcgatgagaaccgaaccggggacttgatttcccgtctgacatctgataccactatggtgagtgatctggtgagtcagaatatcaacgttttcctccggaataccgttaaggtgaccggcgtggtggtatttatgttttccctgtcatggcaactgtcgctggttactttcatgggcttcccgatcatcatgatggtctccaacatttacggtaaatactataaacggttatcaaaggaagtgcagaacgcattggctagagcaagcaatacagccgaagagaccatcagcgctatgaagactgtgcggtcattcgcaaacgaggaggaagaagctgaggtgtacttaagaaagttgcagcaggtctataagctgaatagaaaagaggcagccgcctacatgtattatgtgtgggggtctggactcaccctgctggtcgtgcaagttagcattctgtactatggcggccatctggtgattagcgggcagatgacgtccggtaacttgatagcctttatcatctatgagttcgtgttgggtgattgtatggagtccgtgggctcagtttatagtgggttgatgcaaggtgtgggcgccgcagagaaagtatttgagtttattgatagacagcctaccatggttcacgatggctcccttgcacccgatcaccttgaaggacgggttgactttgaaaatgtgacctttacctacagaacccgacctcatactcaggtgttacagaatgtctcgttctctctctcgcccggcaaggtgacagcattggtcgggccttcggggtcagggaagtcgtcatgcgtcaacatccttgaaaatttctacccactggagggtggccgtgtactcctggacggtaagcctatctcagcatacgaccacaaatatttgcacagggtgataagcttggtgtctcaggaaccggttctgtttgcacgttccattaccgataatatctcttatggacttccgaccgtgcccttcgaaatggttgttgaagcagctcagaaagcgaatgctcatggattcataatggaactgcaagacgggtattcgaccgagaccggagaaaagggagcccagctgtccggaggccaaaagcagagggtggctatggcacgggcactggtgcgcaatccacccgtgctaatcctcgacgaggccacatcagcgttggacgcagagtcggaatatctgatccagcaggccatccacggcaatttgcagaagcacacagtgctcattatcgctcaccgcctaagcacagttgagcacgcccacttaattgtggtgcttgataaggggcgtgtcgtccaacaagggacccaccagcagctgctcgcacagggcgggttgtacgctaagctggtacaacggcagatgcttggccttcagccagctgcagacttcaccgcgggacataacgaacctgtcgcaaacgggtctcacaaggcatag

SEQ ID NO: 179997 - DNA, 4395 bp, synthetic construct
  misc_feature 1..4395: note = Description of Artificial Sequence: Synthetic coding sequence
  source 1..4395: mol_type = other DNA
atgtgcctgctggtgttccccctggtgccccggagccccgactacatattgccatgtagccccggctggaggctgagattggccgcctcatttctgttgtctgtgttccccctgttggacctcctcccagttgctctgccccccggcgcgggcccaggcccgatcgggctggaggtccttgctggctgtgtggcagctgtggcatggatctcccattctctcgccctctgggttctggcccattctccacacggccactccaggggtccccttgccctcgcactcgtggccttgcttccggctccagcccttgtacttactgtcctgtggcattgccagaggggtaccctgcttcccccactgctcccgggacctatggctcgcctgtgtctcctgatcctccagcttgcagcactgttggcctatgccctggggtgggctgcaccaggtggcccccgtgaaccatgggctcaggagcccctcctgcccgaggaccaggagccggaagttgctgaggatggcgaaagctggctgagccggttctcatacgcttggttagcccccttactggcccgaggtgcttgcggagaactgcgacaacctcaggacatctgtaggctgcctcaccggctgcagcccacctatctcgcccgggtgttccaggcacactggcaggagggcgccagactctggagagcattatacggtgcatttggtaggtgctatctcgctttgggcctgctcaagcttgttggaaccatgttgggtttcagtggccccctgttattgtctcttcttgttggctttctggaagaaggacaggaacctctgtctcatggactgctgtacgccctagggctggcagggggggctgtgttaggcgccgtgctgcagaatcagtacggatacgaggtctataaagtcacccttcaggcccgtggggcagtgctgaatattctctactgcaaagccttacagctgggaccatctcgtccgcccaccggcgaagcactgaacctgctcggaaccgattccgagcgactgttgaacttcgccggcagtttccacgaggcatggggcctgcctctccagctcgcaataacgctgtatcttctctatcaacaagtaggagtggccttcgtggggggattaattttggccttactcctggttcctgtcaataaggtcatagcaacgcggatcatggcttccaaccaggagatgctccagcataaggacgcccgcgtgaagctcgttaccgagctgctctccggcatccgcgtgattaagttctgcggctgggaacaagcgctgggggccagggtggaagcatgccgggcccgggagctgggccggctgcgagtcataaaatatctggacgctgcgtgtgtgtatctttgggcggccctgccagttgtgatctccatcgtgatctttatcacatacgtcctgatggggcaccagctaaccgctactaaggtgtttacagccctcgccctcgtccgcatgctcatcctgccgcttaacaactttccttgggttatcaatggcctgcttgaggcgaaggtgtctctcgataggatccagttgtttcttgatctacctaatcacaacccccaggcatactactctccagattgcgggcgcctgggcgcccaaataaagtggctgttgtgtagcgatcctccagccgaacctagtaccgtgctggaactgcatggcgctctgttcagctgggatcccgtcggcacgagcctcgaaactttcatttcacatttagaagtaaaaaaaggtatgttagtcggaatagtgggcaaagtagggtgcggcaagtctagtttgcttgctgctatcgctggagagctgcacagattacgcggacacgtggcggttaggggactctcaaaagggtttggcctcgccacccaagaaccttggatacaatttgcgactatacgggacaacatactgtttggcaagacatttgatgcgcagctttacaaagaagtattggaagcttgcgcactgaacgatgacctgtccattttaccagcaggtgatcaaaccgaggttggagagaagggcgttacgctctcaggcggtcaacgcgctaggattgcgcttgccagggcagtctatcaggaaaaagaactgtacctcttggatgaccctctggccgcggtggatgcagacgtggctaatcatctgctgcatcggtgcatccttggaatgttgtcatacaccaccaggctcttgtgcacgcaccgaaccgaatacctcgagcgagccgacgctgttctccttatggaggctggacgcctgatcagggcaggaccaccctccgagatattgcccctggtccaggctgtgcctaaggcctgggccgaaaacggccaagagagtgactcagcaaccgcgcagagcgtgcaaaaccctgaaaaaaccaaagaaggactggaagaggagcagagcacttcgggtaggcttctgcaggaagagtccaaaaaagagggcgcagtcgcactccatgtgtatcaagcctattggaaggcagtgggccaggggctggcattagccatcttattttccctgttgctgatgcaagcaactagaaatgccgccgactggtggctctcccactggatctctcagctgaaagctgagaactccagtcaggaagcacagccatctactagcccagcctcaatgggattattcagcccccagttgctcttgttttctcctggcaacctgtacattcccgtgtttccactgcctaaagccgcaccaaacggctccagcgacattcggttttacctgactgtctacgccaccatagctggggtaaacagcctgtgcacactgctgcgcgctgtcctctttgccgcaggcaccttgcaggccgcagccaccctgcaccggcgccttttgcatagagtgcttatggcaccagtaaccttttttaatgccaccccaacaggacgcatcctgaacaggttctcctctgacgtcgcctgtgctgatgatagcctgcccttcatactgaacatattgctggcgaatgccgctggcctgctcggcctcctagctgtgctagggtccgggctgccttggcttctcctgcttctgccccctttgtctataatgtattatcacgtgcaacgccactaccgagcgtccagtcgggagctgaggcgcctcggatctcttacacttagccccctttactcccacctggcagatactttagctgggctgtctgtactgagagccacaggcgctacctacagatttgaggaagagaatctgcgcctcctggagctgaatcagcgttgtcagtttgcaactagtgcaacaatgcagtggctggatataaggctccagctgatgggagccgccgtcgtgagtgctatcgccggcattgctctcgtgcagcaccagcagggactcgcaaatcccggcctggtcggactctctctgagctacgccctgagcctcaccggcctgttgtccggtctcgtgagcagcttcacacagaccgaagccatgctcgtttccgtcgagaggttagaggagtacacctgcgacctgccacaggaaccccaaggccagccactacagttgggtaccggctggctcacccaaggcggtgtcgaattccaggatgtggtcctcgcctaccggcccggtttgccaaatgccctggacggagtgaccttctgtgtgcagcctggggagaaattaggcatcgtaggccgcacagggtctggtaaatccagtctccttctggtgctcttccgtctgctggagcctagcagcggaagagttttgctcgatggggttgacacatcccagttagagctggcacagttgcgatcccaactggccatcattcctcaggaaccgtttttattctctgggactgtccgcgagaatctagaccctcagggtcttcataaagacagggctctctggcaggctctgaagcaatgccatctgagcgaggtgattacgagcatgggggggcttgatggggagttgggagagggagggaggtcactttctctcggccaaagacagttgctgtgccttgctcgcgcgctcctgactgacgccaagattctgtgcattgatgaagccaccgcatccgttgatcagaagacagatcagctgttacagcaaaccatttgtaagcgcttcgccaataaaactgtcctgaccattgctcatcggcttaacacaatcctgaactccgaccgggtgctagtgctgcaggctgggcgcgttgtcgaattagatagcccggccactttacggaaccagccacactccctattccagcagctgctacagtcctctcagcaaggcgtcccagcaagcttggggggcccgtag

SEQ ID NO: 179998 - DNA, 4479 bp, synthetic construct
  misc_feature 1..4479: note = Description of Artificial Sequence: Synthetic coding sequence
  source 1..4479: mol_type = other DNA
atggagcggctgctggcccagctgtgcggcagcagcgccgcctggcctttgccactctgggagggcgatacgaccgggcattgttttacccaacttgttttatctgccctgccccacgcactgcttgctgtgttgtcagcgtgctacctcggtacgccccgatctccagattatatcttaccctgcagcccgggctggagattaagactcgcagcctccttcctgctgtcggtgttccccctgctcgacttactgcctgtcgctttacctcccggggctggcccaggacctattggcctcgaggtgctggcaggatgcgtggcagcagtagcttggatatctcacagccttgccctttgggtgctggcccactccccgcatggccactcccgtggcccccttgcccttgctttggtcgcgttgctgccggctcccgcccttgtgctcaccgtcctgtggcactgccagagggggactctgctgccccccctgctccctggcccaatggccagactgtgcctgttgattctgcaactggctgcactcctggcctacgctttgggatgggccgcccccggaggcccacgtgagccttgggctcaggagccgctgctgcctgaggaccaggagccggaggttgcggaagatggtgaatcctggttgagtcggttcagttatgcatggttggctccactccttgcgcgaggcgcatgtggcgagcttagacagccccaagacatttgcaggctgccacacaggttgcaacccacctacctcgcacgagtgttccaggcccattggcaggagggggcgcgactttggcgggccctctacggcgcctttgggcgctgctacctggcccttggactcctcaagctggtgggaactatgctgggattttcgggcccccttctgctcagcttgctggtgggcttcctcgaggagggacaggagccactctcccatgggctgctctatgcgctggggctagctgggggcgccgtgctcggagctgtcctccagaaccaatacgggtatgaagtctacaaagtgaccctgcaggcccgcggcgcagtattgaatatattgtattgcaaagcactgcagctgggaccttctaggcctcccacgggggaggctttaaacttactcgggacagattctgagagattgctcaactttgccgggagtttccatgaagcatggggtttacctctgcagcttgcaatcacactatacctgctctatcagcaggtgggagtcgccttcgtcggtgggttaatcctggccctgctcctggtacctgtgaacaaggtgattgccacccgaattatggcctccaatcaggagatgttacagcacaaagatgcaagagtgaagctggtaacagagctcctgtcgggaattcgggtcatcaagttctgtggatgggaacaggcccttggggcacgtgtagaggcgtgccgggcaagggaacttggacgactccgtgtgataaaatacctggacgctgcctgcgtatacctgtgggcagctttgcctgtggtcatcagcattgttattttcatcacatatgtgttgatgggccaccagctgacggcgacaaaggtgttcacagctctggcgctggttaggatgctgatacttcccttgaataattttccttgggttattaacgggctactcgaggctaaagtctccctcgaccggatccagctgttcctcgatctgccgaaccataacccccaggcatactactcccctgatccgcccgccgaaccctcaacggtgttagagctgcacggagcactttttagctgggaccccgtgggaacaagtcttgagacctttatatcacacctcgaggtcaagaagggcatgttggtgggaattgtcggcaaggtcgggtgcggcaagtcttcactgttggccgccatcgctggtgagctacatagattaaggggacatgtcgctgtgcgtgggctcagcaaaggatttgggttagctacccaggagccgtggatccagtttgctaccataagagacaacatcttattcggtaagacttttgacgcgcagctttacaaagaggtgctggaagcctgtgctctgaacgatgatctgagcattctgcccgccggagatcaaactgaggtcggtgagaaaggagtaacattgtctggaggacagagggcccggattgcacttgcgcgcgctgtttaccaagaaaaggagctgtacttactggatgatcccctggccgccgtagacgccgacgtggccaaccatcttctccataggtgtattttaggcatgttgtcctataccacaaggctcctgtgcacccatcggaccgagtatttagaacgcgcggatgccgtattactcatggaggcagggaggctgatacgcgcgggccctccatccgaaatattgccacttgtgcaagccgtccctaaggcatgggctgagaatggccaagaatcagattccgcaaccgcacagagcgtccagaaccctgagaagactaaagaagggctggaggaggaacagtccaccagtggtagactcctgcaggaggagagcaagaaggaaggcgccgtagctctccacgtgtaccaggcttattggaaggctgttggtcagggattagctttagccatcctgtttagcctgctgttaatgcaggccacccgaaacgctgctgactggtggttgtcacactggatctcacagctgaaggcagagaactcttcccaggaggcgcagccctccaccagtcccgccagtatgggccttttctcgccgcaactgctgcttttctctcctggcaacttatacattccagtatttcccctccccaaagccgctccaaacggatcctctgacatccgcttttacctaacagtttatgctacaattgcaggggtgaacagtctttgcacactgctgcgcgcagtcctcttcgctgcaggcacgttacaggcggctgcgacgttgcaccgccggcttctccacagagtcctgatggcgccagttaccttcttcaacgcgactcccacagggcggattctgaaccgtttttcatcagacgtggcctgtgcagacgattctctgccttttattctgaacatacttcttgctaatgccgcaggattgctggggctgttggccgtgctgggctcaggtctgccgtggctcctgttactgttaccacccctgtcaattatgtattatcacgtgcagaggcattacagggcttccagccgggaattacggaggctggggtccttaactctatcaccattgtattctcaccttgccgacacgttagctggactctccgttcttcgcgctactggggctacttacagattcgaagaggagaatctacggctgttggaattaaaccagcgatgccagttcgccaccagtgccacaatgcaatggcttgacatccgcttacagctcatgggtgctgcagtcgtcagtgctattgcagggattgctctggtacagcatcagcagggactggccaaccccggcctcgtgggtttgtcactgagttatgccctctcacttactggactgctgtccggactggtgagttctttcacccaaacggaagctatgctcgtcagtgtggaacggctcgaagagtatacctgcgatcttccccaagagccccagggtcagcctctacagctgggcaccgggtggctcactcaggggggggtcgaattccaggacgttgtcctggcttatcgaccgggcttgccgaacgcactcgatggggtcacattttgtgtccagcccggggagaaactgggaatcgtgggaagaaccggtagtggtaagtcctctctgctgcttgtgctcttccgactgctggagcctagttccggcagggtcctcctcgacggcgtagacacttcgcagcttgaactggcccagcttaggtcccagttagcgatcattcctcaggagcccttcctttttagtggaacagtgagggaaaaccttgacccccaggggctccacaaggacagagccctgtggcaggccctcaaacagtgtcatctgtctgaagtgatcactagtatgggcgggctcgacggggaattaggcgaaggcggccgaagtcttagcttgggccagaggcaactcctgtgcctggctagagccctgttaacagacgcaaaaatcctttgcatcgacgaggccactgcctccgtggaccagaagacagaccagctgttgcaacagactatatgcaaacggttcgctaacaagaccgtacttactatcgctcatcgcctgaatactatactaaattctgatcgtgtcctggtgctccaggccggtcgggtagtcgagctggactcaccagccactctcaggaaccaaccgcattctctattccagcagctgctccagtctagccagcagggggtgcctgccagtctgggcggaccttag

SEQ ID NO: 179999 - DNA, 4035 bp, synthetic construct
  misc_feature 1..4035: note = Description of Artificial Sequence: Synthetic coding sequence
  source 1..4035: mol_type = other DNA
atgacccggaagcggacctactgggtgcccaacagcagcggcggcttagtcaacagaggaatcgacatcggggatgacatggtgagcggactcatctacaaaacatacaccctgcaggacggcccttggagccaacaggaaaggaacccagaggctccaggccgagccgccgtaccaccgtggggcaaatatgacgcagcactgcgaaccatgatcccatttcggcccaaacctagatttccagccccccagcccctggacaacgcgggtctgttcagctacctgactgtttcctggcttacccctctgatgatccaatccctgaggagcaggttggacgagaatacaataccaccactttcagtgcatgacgcatccgacaagaacgtgcagagactgcaccggctgtgggaggaggaagtaagccggcgcggaattgaaaaggctagtgtgctgctcgtgatgctcagattccagcgcactagacttatttttgatgccctgctggggatctgtttttgtatcgcttctgtcctcggtcccatacttattattcccaagattctcgagtattccgaggagcaactgggaaatgttgttcacggggtgggcctgtgctttgcactgttcctttctgagtgtgtgaagagtttgtctttttcctccagttggataatcaatcagcgcacggctatcagatttcgggccgctgtgtcgtcgttcgctttcgagaagcttattcagtttaagtctgtcattcacataacaagcggtgaggccatcagtttctttaccggcgacgtgaactacctgttcgaaggggtctgttatgggcctcttgttctcatcacgtgtgccagcctggtcatctgtagcatatctagctactttattattgggtatacagctttcattgctatcctctgctatctgctggtgtttccccttgctgtattcatgaccaggatggcagtgaaggcacagcatcacacaagtgaggtgagcgaccagcgtattcgggtcacttctgaagtgcttacgtgcattaagctgatcaaaatgtacacctgggagaagccatttgccaagatcattgaggatctccgacgaaaagagcggaagctcctggagaagtgtgggctcgtgcagtctctcacgagcatcacactattcatcattcctactgtcgcgacagctgtttgggtcctgatccatactagcttgaagctgaaactgaccgcgtcaatggcttttagcatgctggcgagcctcaatcttctgcgcttaagcgtcttttttgtccccatcgccgtgaagggactgactaattctaagagcgccgtgatgcggttcaagaaattttttcttcaagaaagtcccgtgttctacgtgcaaactttacaggatccttcaaaggctctagtattcgaagaagcaactctcagctggcagcaaacttgccctgggatcgttaacggagcacttgaactagagaggaatgggcacgcttccgagggaatgactcggcctagggacgcactcggcccagaggaggagggaaatagcctgggacctgaactccataagatcaatctggtggtgtctaagggcatgatgcttggggtttgcggtaacacaggatccgggaagtcaagtctcctgagtgccatcctagaggagatgcacctgcttgagggctccgtgggtgtgcagggatcgctggcatatgtgcctcagcaggcctggattgtgtcaggaaacattagagagaatatcctcatgggcggcgcctatgacaaggcccgctatctacaggtgttacactgttgctctctcaatagggatctcgagctcctgccgtttggagacatgacagagatcggcgaaagaggcctgaacctgtccggtggacagaagcagaggatatcactggcacgggccgtgtatagtgacagacagatttatctgctggacgatccattgtcggccgttgacgcccacgtgggtaaacacatattcgaagagtgcattaaaaagacgctgcgcgggaagaccgttgtgctagtgacacatcagctgcaatatctggaattttgcggtcagattatactcctcgagaatggcaagatatgtgaaaacggtacacacagtgagcttatgcaaaagaagggcaagtatgcccaattgattcagaagatgcacaaggaggcgaccagtgatatgctgcaagatactgccaagatcgcagagaagcccaaggtcgagtcacaagctttagccacaagtttggaggaaagcctcaatggcaacgccgttcctgaacatcaactcacacaggaggaagagatggaggagggctccctgtcttggcgagtctaccaccactatattcaggccgcaggagggtacatggtgtcttgtatcatattttttttcgtagttctcatcgtgttcctgacaatattttccttctggtggttgagctactggctggagcagggatccggaacaaattcctctagggaaagcaatgggactatggccgacctgggaaacatcgccgataatccacagctttccttttatcagctggtgtacggtctcaacgccctactgctgatctgcgtgggtgtttgctctagtggcatatttaccaaagttactcggaaagccagtactgccctccataacaagttatttaacaaggtgttcaggtgcccaatgagctttttcgacactattcctatcgggcgtctgctaaattgttttgcaggagacttggagcaattggaccaactgctgcctatatttagtgagcagttcctggtactgtcactcatggtcatcgcagtgctgctgattgtgtcagtgcttagcccgtatatcctcctaatgggtgcaatcatcatggtcatatgcttcatttactacatgatgtttaaaaaagcaatcggcgtttttaagagactcgagaattatagtagatctccactgttttcccacatccttaactcactgcaaggattgagctccattcatgtctacgggaagaccgaggattttataagtcagttcaaacggctcacagacgcgcaaaacaactatcttctcctcttcctgtcatcgacccgatggatggcactgcggctggagatcatgacaaatctggtcacactggcagtagccttgttcgtcgcattcggcatctcatccacgccatacagcttcaaagtcatggctgtgaacattgtgctgcaactggcatcatcttttcaggctaccgctagaattgggttggaaaccgaagcacagtttaccgctgtcgagaggattctccagtacatgaagatgtgtgtgtccgaagcccctctccacatggaaggaaccagttgtccccagggctggccccaacacggggagattatattccaggattaccatatgaaatacagagacaacaccccaacagtcttgcacgggatcaatcttactattagaggtcacgaggtcgtgggaatcgtggggagaacaggcagcggcaagtcttcactcggaatggctctgtttcgtttggtggagcctatggctgggcgcatactcattgacggcgtggacatctgctcgattggcctagaagaccttaggtccaagctgtccgtgatcccccaggaccccgtgttattgtccggcaccattcggttcaaccttgacccgttcgataggcacacggaccagcaaatctgggatgccctggagcgcacttttctcactaaggccattatcctcatcgatgaagcaactgcctcaatagacatggagacagataccctaattcagcgcacgatcagagaggcctttcagggctgcaccgtcctggttatcgctcatcgcgtgacaaccgtcctgaactgtgatcatatccttgtcatggggaatggcaaagtcgtggagttcgatcggcctgaagttctgcggaaaaagccaggaagcttgttcgccgccttaatggccaccgccacttctagtttgaggtag

SEQ ID NO: 180000 - DNA, 4149 bp, synthetic construct
  misc_feature 1..4149: note = Description of Artificial Sequence: Synthetic coding sequence
  source 1..4149: mol_type = other DNA
atgacccggaagcggacctactgggtgcccaacagcagcggcggcttggtaaacaggggtatcgatatcggcgacgatatggtctctggccttatctacaaaacttatacccttcaggatggaccctggtcacaacaggagcgcaatccagaagctcccggcagagctgcagtgcccccctggggcaaatatgacgccgctttgcgcacgatgataccattcaggccgaagcctcggtttcctgccccacaaccattggacaatgcgggcctgttcagttatctcacagtgtcctggctcacaccgctgatgatccagtccctgcgcagccggctggacgagaataccattcctcccctctctgtgcacgatgccagcgacaaaaatgttcaaagacttcacaggctgtgggaggaggaggtgtcccgccgtggcatcgagaaagctagcgtgctactggttatgctgcgtttccagagaactaggctgatttttgacgccctgctcggcatatgtttttgtattgcctccgttctcggccctatcctgataatcccaaaaattctagaatattccgaggaacaacttggcaacgtggtgcacggtgtggggctatgttttgcactgttcctttccgagtgtgtcaaaagcctgagcttttcttcatcttggatcataaaccagcgtaccgctattagatttagagcggctgtcagtagttttgctttcgaaaaactgatacagtttaagtccgtaatccatatcacatctggagaggccatctctttcttcactggggacgtgaattacttgttcgagggcgtttgttacgggcctctggtgctcattacatgtgcgtccctggttatttgttccatctctagctactttatcatcggatacacagccttcatcgctatcctgtgctatttgttagtctttccactcgccgtgttcatgacccgaatggcagtgaaagcgcagcaccacacatctgaggtgtccgatcagagaattcgggtaactagcgaggtcctcacctgcattaagcttattaagatgtacacctgggaaaagccatttgctaaaatcattgaagacctgaggagaaaagagagaaaactgttggaaaagtgtgggctagtgcagagtctgaccagcattacactgttcataattccgacagtggccacagctgtttgggtgctcatccacactagcctcaagcttaaactgaccgcatctatggccttctccatgctggcttcacttaatcttttacggcttagcgtgttttttgtgcccatcgcagtgaagggtctcacaaattccaaaagcgccgtcatgaggttcaaaaagttttttctccaggaatctcccgtcttttatgttcagacgctgcaagacccttcgaaggcactggtgtttgaggaggcgacactgtcctggcagcagacctgtcccgggatagtgaacggcgccttggaactggagagaaatgggcatgccagtgaagggatgacaaggccgcgcgatgctttggggccggaagaggaagggaacagcctgggaccggagcttcataagatcaatttggtagtgtctaaaggcatgatgctgggagtgtgtggcaacacaggtagcggaaagagtagtctgctgtccgcaatcctggaagaaatgcatctattggagggatccgtgggggtgcagggttccctcgcatatgtgcctcagcaagcctggatcgtaagcggaaacattagagagaacattttgatgggtggtgcatacgataaagcccgctatctgcaagtcctccattgctgctccctcaacagagatttggaactcctgcctttcggcgatatgactgaaatcggcgagagagggctcaatttgtctgggggccagaagcagagaatttcattggcacgcgccgtgtactccgatcgccagatatacttactggacgatcccttgtcagccgtggacgcacacgtcgggaagcacatttttgaagaatgtattaaaaagacgctgagaggaaagactgtggtgttagttactcaccagttacagtacctggagttttgcggacagatcatcctcttggagaatgggaaaatctgtgagaatgggacacacagtgaactgatgcagaaaaagggaaagtacgctcagctgattcagaagatgcataaagaagcgaccagcgacatgctccaggataccgcgaaaattgccgaaaagcccaaagtggaatctcaggctctggctacgtctttagaagaatccttgaatgggaacgctgtgccggagcaccagctcactcaggaagaagaaatggaagagggctcactctcttggcgggtgtatcaccactatatccaggccgcaggcggatatatggtcagctgcattatctttttttttgttgtgctaatagtatttttaaccatattcagcttttggtggcttagctactggttggagcaggggagtggcacaaacagctcccgagaatccaacggcaccatggctgacctggggaacattgccgacaaccctcaactttcattctatcagctggtttacggactaaatgctctcctgctaatttgtgttggagtgtgctccagcggcatctttactaaagtgacaagaaaagcttccactgcactgcacaacaagctgttcaacaaagtcttccgatgccctatgtcgttttttgacactataccaattggacgcctgcttaattgttttgcgggagacttagagcagctagatcagttactgcctattttctccgaacagttcctggttttgagtctgatggtgatcgcagtgctgctgatcgtgtcagtcttgtcgccctacattctcctcatgggcgccatcatcatggtcatatgtttcatctactatatgatgtttaagaaggccatcggcgttttcaagcggctcgagaactactctcgatcccccctattttcacatatcctgaatagtctgcaaggcctttcaagcatccatgtgtacggtaagacggaggatttcatttctcagttcaagcgccttacagacgcgcaaaataattaccttctgcttttcctgtcctcgacacggtggatggctctgcgcctggaaattatgacaaatctggtgacactggctgtggctctttttgtggcctttggcatatcctcaactccctactctttcaaagttatggccgtgaatatcgtgctccagctagcctcaagttttcaggccactgctcgtattggtcttgagacggaagcccagtttaccgcggtagaacggattttgcagtatatgaaaatgtgcgtgtccgaggccccactccatatggagggaacctcttgtccacagggctggccccagcacggcgaaataatcttccaagactaccatatgaagtacagagataacacccctacggttctgcacgggattaacctcaccatccgaggacacgaagtcgttggtatcgtggggcgtactgggagcggtaaaagttctctggggatggccctatttcggctggtagaacccatggccggtcgcatactgatagatggcgtcgacatctgttctatcgggcttgaagacctgcggtctaagcttagcgttattcctcaagaccccgttctgttaagcggcacaattcgctttaatttggatccattcgacagacatacagatcagcagatctgggacgccctcgagcggacgtttttaaccaaggcaatcagcaaattccctaagaaactccacacggacgtggtggagaatggtggcaatttcagcgttggggaacggcagctcctgtgcatcgctcgggccgtgcttagaaacagcaaaattattttgatagatgaggcaacagcaagtattgacatggagaccgataccttgatacaaagaacaatcagagaagccttccaagggtgtaccgtcctcgtgatcgcacaccgagttaccaccgtgctgaattgtgatcatatactcgtcatgggaaatggaaaagttgttgaattcgaccgccccgaggtgctccggaagaaacccggttctctttttgccgccctaatggcaaccgcgacatccagcctgcggtag

SEQ ID NO: 180001 - DNA, 4149 bp, synthetic construct
  misc_feature 1..4149: note = Description of Artificial Sequence: Synthetic coding sequence
  source 1..4149: mol_type = other DNA
atgacccggaagcggacctactgggtgcccaacagcagcggcggcctggtgaacaggggtatcgatatcggagacgatatggtctctggcctcatttataaaacatataccctgcaggacggaccgtggtctcagcaggaaaggaaccccgaagcccctggacgggccgccgtacccccctggggaaaatacgatgctgcactaaggacaatgataccctttcgaccaaaaccgcggtttcctgccccccagccactggacaatgcagggctgttcagttacttgacagtctcttggctgaccccgcttatgatccaatccttgagatcgcgactggatgaaaataccattcctcccctaagcgtacatgatgcctcagacaagaacgttcagaggctccatagactttgggaggaggaggtctcaagaagaggcatcgaaaaggccagtgttcttctggttatgctgcgattccagcgcacacgtttgatcttcgatgccctgctgggcatatgcttctgcattgctagtgtgctcgggcccatcctgattattccgaagatcctggagtacagcgaggagcaattaggaaacgtcgtgcacggcgtgggcctatgtttcgcgctgttcttgtcggagtgcgtgaaatctctgagcttcagttcaagctggataatcaatcaaagaacagcaattcgctttagggctgccgtgtcttcctttgcctttgagaagcttatccaatttaagagcgtaatacatattacgtctggagaagccatctcctttttcaccggcgacgtgaattacctcttcgagggcgtgtgttatggtcctctcgtgctgatcacttgcgcctcactggtgatatgctctatctcctcttactttatcatcggctacactgcattcatagcaatcctttgttacctacttgtctttccgctggctgtctttatgacgcgcatggccgtcaaagcgcagcatcacacatcagaagtatccgaccagaggatacgggtgacgtccgaggtgctgacttgcataaagctgatcaagatgtatacttgggagaagcctttcgccaaaattattgaggatcttagaagaaaggaacgcaaattgctggagaaatgcggccttgtccagtccttaacatcaatcaccttgttcattatcccaactgtcgctacggcagtctgggtgcttatacacacctcccttaaactcaagcttaccgccagcatggccttctccatgcttgctagtctgaacctgctgcggctctctgtgttcttcgtgcccatcgcagtcaagggcctgaccaactccaagagtgcggtaatgcgatttaagaagttttttcttcaggaatcacccgttttttatgtgcagacactgcaggatccatctaaggccctcgtttttgaagaagctacactttcttggcaacagacttgtccaggaattgtcaacggagccttggagctagagcgtaatgggcacgctagcgaaggcatgacgcgcccccgcgacgccctcggtcccgaggaggaaggaaactcactgggcccggagctgcataagatcaatcttgtggttagcaaggggatgatgctgggggtctgcggcaacactggtagcggaaagagttccctgctttcagccattctggaggagatgcatctgctagagggttccgtaggcgtgcaaggctctctggcttacgtcccccaacaggcgtggattgtgtctgggaatatccgcgagaatattttaatgggtggcgcctatgacaaagcaaggtacctgcaggtcctgcactgctgcagccttaacagagacctggaacttttgccattcggggacatgaccgagatcggagagcgcggcctcaacctctcaggaggacaaaagcaaagaatctccctggcgcgtgccgtttacagcgacaggcagatctatctcttggacgacccccttagtgccgtggatgctcatgtgggaaagcacatctttgaagaatgtatcaaaaagactctccgtggtaaaactgtggtcctagtgacccaccagttacagtatctagaattttgtgggcagatcattctcctggaaaacggcaagatatgcgagaacggaacacactcagagctgatgcagaagaagggaaaatacgcccagcttatacaaaaaatgcacaaggaggctacatcagacatgctgcaagacactgctaaaatcgcagagaaaccaaaggttgagtctcaggccctggcaacatccctggaagagtctcttaatggcaacgccgtccccgagcatcagctcactcaggaggaggagatggaggagggctctctgtcttggcgggtgtaccaccattacatacaggcagccggcggctacatggtgtcttgtatcattttcttttttgtcgttctgatcgttttcttgacaatctttagtttctggtggttgtcttactggttggaacaagggtctggcaccaacagctcacgtgagtccaatgggacaatggcggatctgggcaatattgcggacaaccctcagcttagtttttaccagttagtgtatggactgaatgctttgttgctgatctgtgttggtgtgtgcagctccggtattttcactaaagtgactcgcaaggcttcaactgcactgcataataagctgtttaataaagtgtttcggtgtccaatgtctttctttgacactattcccatcggcagacttctaaattgcttcgcaggtgacttggaacaactggatcagcttctgccaatcttcagtgaacagtttctggtgctatcactgatggtcatcgcagtgctcctgatagtgagcgtcctgtcaccatacatacttttgatgggagccattatcatggtcatttgcttcatttactatatgatgtttaagaaggccattggggtgttcaaaagactcgaaaattatagccgcagtcctctgtttagtcacatccttaattcccttcaagggctcagcagtattcacgtgtatggcaagactgaagatttcattagtcagttcaagaggctgacagatgcccaaaacaattatctgcttttgtttctgagctcaacacggtggatggcccttcgccttgaaatcatgactaatctcgtgaccctggcagtggcattgttcgtggcattcggaattagttccaccccgtatagttttaaggtgatggctgttaacatcgtgttacaactcgcctcttcctttcaggcaaccgcacggatcgggctggagacagaggctcaatttacggcagtagagagaatcctccagtatatgaaaatgtgtgtgagcgaagctcccctgcatatggaagggacgtcttgtccacaggggtggcctcagcacggcgaaatcatctttcaggattaccatatgaagtatcgcgacaacactccaactgtgcttcatggaattaatctgactattcgaggccatgaagtggtgggaatcgtggggcgaaccgggagcggtaagtccagcctaggtatggccctgttcaggctcgtagaacccatggccggccgcatcctgatagacggagtagacatatgcagcattggcctcgaagacctgcgctccaagttatctgtgatccctcaggaccccgtgctactctccggcactattaggtttaacctggatccttttgaccggcacacagaccaacaaatatgggacgcactggagcgcacctttcttacaaaggctattagcaaattcccaaaaaagctgcacaccgatgtggtggaaaacgggggtaatttttcagtcggcgagagacagctgctctgcatcgcgcgggcagtgctgaggaactctaaaatcatcctcatcgacgaggctacagcgtctattgacatggagaccgacacattgattcagcgcacgatccgcgaagcattccagggctgtaccgttttagttatagcccatcgggtcactacagtgctcaactgtgaccatatcctcgtgatgggcaatggaaaggtagttgagtttgaccgaccagaagtcctaaggaagaaaccaggctctctgtttgctgccctcatggccacggcaaccagctcactgaggtag

SEQ ID NO: 180002 - DNA, 4149 bp, synthetic construct
  misc_feature 1..4149: note = Description of Artificial Sequence: Synthetic coding sequence
  source 1..4149: mol_type = other DNA
atgacccggaagcggacctactgggtgcccaacagcagcggcggcctggtgaaccggggcatagacatcggcgatgatatggtgagtggactcatttataagacatacactctgcaggacggtccctggtcccagcaagagcgtaatcccgaagcgcccgggcgtgcagccgtgccaccctggggcaaatacgacgccgccctccggacaatgattccatttcgaccaaagcctcgattccctgcgccacagccacttgataacgccggcttattctcctatctcacagtgtcatggctcacgccattgatgatccagtcgttgaggtcgcggctggacgaaaataccattccaccactctctgtccatgacgccagtgacaagaatgtgcagaggctacatagactctgggaagaggaggtatctcgacggggtatcgagaaggccagcgtcctcctagtaatgttgagatttcagcggactcggctaatttttgatgcccttctcgggatctgcttctgtatcgcatccgtactggggcctatccttattatccctaagattctggagtattccgaggagcagcttggtaacgtggttcatggtgtcggactatgcttcgctctgtttctctcagagtgcgtgaagtctctgtctttcagttcctcttggataattaatcaacgaactgccattaggtttagggctgcagtaagttcatttgccttcgagaaattaatccagttcaaaagtgttatccacattaccagtggtgaagccatatccttcttcaccggggacgttaattacctttttgagggagtgtgctacggaccattagttttgatcacatgcgcctcactcgtgatctgctccatatcaagctactttattatcggctatacagcctttatagcaatcttgtgctaccttttggtgtttccactggcagtgttcatgacacgcatggctgtgaaagcccagcaccacacctccgaagtgtccgaccagagaatccgagttacttcagaagtcttaacttgtatcaagctcattaaaatgtatacctgggaaaagcctttcgctaagattattgaggacctgaggaggaaagaaagaaagctgttggaaaaatgtgggctcgtgcagagcctgacctctataacactctttatcatccccaccgtagccaccgccgtgtgggtcctgattcacacctcattaaaacttaagcttaccgcgagcatggcgttctcaatgttggcttccttaaacctcttgagactttcagtgttcttcgtccctatcgctgtgaaagggcttaccaatagcaaaagcgccgtcatgcgattcaagaaattctttctgcaggaaagccctgttttctacgtgcaaaccctgcaagatccatcaaaggcactcgtcttcgaagaggcgaccctgagttggcagcagacgtgtcccggtattgtgaacggggccctggaactggagcggaacggtcacgccagtgagggcatgactagaccacgggacgccctgggtccagaggaagagggcaattctttgggccctgagctacacaagattaacttggtcgtgtcaaagggaatgatgctgggggtttgtggcaatactggaagcggcaagtcttccctgctctctgctatcttggaggagatgcaccttctggagggaagcgtgggcgttcagggatctctggcatacgtgccgcagcaggcttggattgtgagcggtaatatcagagagaatatattgatggggggagcctacgacaaagcccgctatctgcaggttctccattgctgctcactgaatagagacctcgagcttttaccattcggtgatatgaccgaaattggtgagagaggacttaacctcagcggcggacaaaaacagagaatctctctggcccgggccgtgtactcagacagacagatctacctgctggacgaccccttatccgctgttgacgcccatgtggggaagcacatcttcgaggagtgcatcaagaagacattacgaggaaaaactgtcgtgcttgtcacccatcagttgcagtacctggaattctgtggccagattattctcctagagaacggaaagatctgtgaaaatggtacccacagcgagctgatgcaaaagaaaggcaagtatgcccagttgattcagaagatgcataaggaggccacgagtgacatgctccaggacactgctaaaatcgctgagaaacccaaggtcgaatcgcaggctctggcaacaagcctagaagagtccttgaatggcaatgccgttcccgaacatcagctcacccaagaagaggagatggaggaaggcagcctcagctggcgtgtctaccatcactatatccaggccgccggaggttacatggtctcatgcatcatcttcttctttgtcgtgttaatagtttttttaacgatcttttcattctggtggctgagctactggctggagcaggggtcaggaacgaattctagcagagagtccaatggaactatggcagaccttggcaacattgcagataacccacaactgagcttctaccagctggtatatgggttaaacgctttgctgctgatctgtgtaggcgtttgcagctccggcatcttcaccaaagttactcgaaaagcctccaccgccctgcacaataagttgttcaacaaggtttttagatgtcctatgtcctttttcgatacgatcccaattggccgcctcctaaactgctttgctggagacctcgaacagctagatcaacttctcccaatcttcagcgagcagttccttgttttgtcgctgatggtcattgctgtccttctcatcgtgtccgttctgagcccctacatactgctgatgggggcaattattatggtcatatgctttatttactacatgatgttcaaaaaagcaattggggtgttcaagcggctggaaaattactctcgttcaccactgttcagccacatcctgaattctctgcaaggactgagctccattcatgtgtatggtaagacagaagacttcattagtcagtttaaaaggctcaccgacgcccaaaataactacctcctgctctttctgtcttccacacggtggatggcgctacgcctggagatcatgacaaaccttgtcacgctggcagtggctcttttcgtggcttttgggattagctctactccttactcttttaaggttatggccgtaaatatagtgctgcagctcgcaagctcttttcaggccacagcccgcatcgggttagagacagaggctcagttcactgctgtggaaaggatcctgcagtacatgaaaatgtgcgtcagcgaggccccactgcatatggaaggtacttcttgcccacaggggtggccccagcatggggaaatcatctttcaggactaccatatgaagtatcgcgacaatactccaaccgtgctccacggcatcaatctcaccatcagaggccacgaggtcgtggggatcgtgggcagaaccgggtccggcaaaagctctctaggcatggccctctttagactggtggagccaatggcaggacgaatcctgatcgatggggtagacatctgttcaattggattagaggaccttcggtccaaactttcagttataccccaggaccccgtactgctgtcaggtacgatccgctttaacctggatcctttcgatagacacactgatcagcagatctgggatgctttagagcgcacctttttgacaaaagcaatttcaaaattccccaagaagctacacactgatgttgtggagaacgggggaaatttctctgtgggagagagacagctcctgtgcatcgcacgagcagtactgcggaacagtaaaattattctgatagatgaggccaccgcttccatagacatggagactgataccttgatacagcggaccatccgagaagcatttcaaggttgtaccgtactggtcattgctcatcgagtcaccacagtgctgaattgcgaccacatccttgtcatgggaaacggcaaggtggtggaatttgaccgccccgaagtgctcagaaagaaacctgggtcacttttcgctgctctaatggccaccgccactagctcactcagatag

SEQ ID NO: 180003 - DNA, 2268 bp, synthetic construct
  misc_feature 1..2268: note = Description of Artificial Sequence: Synthetic coding sequence
  source 1..2268: mol_type = other DNA
atgacccggaagcggacctactgggtgcccaacagcagcggcggcctggtgaacagggggatcgatatcggggacgatatggtctcggggctgatttacaaaacatacacgctgcaagacggtccttggagtcagcaagagcgaaatcccgaggcacccgggagagccgccgtgccaccatggggcaagtatgacgctgccttgaggaccatgatccctttcaggcccaagccccgttttcccgcccctcagcccctggataatgccggattgttctcttatctgacagtctcatggctcacaccactgatgattcagagtctgcggtctcgcctcgacgagaatacaattcccccactgtccgtacatgatgcatccgacaagaacgtccagaggctccatagattgtgggaggaggaagtgagtagacgcggaattgagaaggccagcgtgctcttagttatgttaagattccagaggacaaggctgatttttgacgctctcctggggatctgcttttgtatcgcttccgttctgggccctatcctcatcatccctaagattctggagtattccgaagagcagctgggcaatgtcgttcatggggtgggactgtgctttgcccttttcctgagtgagtgtgtgaagagtctcagttttagttcctcctggatcatcaatcagcgcacagctattcgcttccgggctgccgttagctctttcgcatttgaaaagctaatccagtttaagagcgtgattcacatcaccagtggagaggccatcagctttttcactggagacgtcaactacctgtttgagggtgtgtgctacggcccactagtgctgattacctgtgcttctctcgtgatttgtagcattagctcctacttcattataggatatacagcttttatcgcaatactctgctacttgctagtctttcctctggccgtatttatgacgcggatggcggtgaaggcacagcaccataccagcgaagtgtccgaccagcgcattcgcgtgacttcggaggtcttgacgtgcatcaagctgatcaagatgtacacatgggagaagcccttcgccaaaatcatcgaggatctccgcagaaaggagaggaaactcctggagaaatgtgggttggtacaaagcttaacctccattactctgttcattatacctaccgtcgcaacagcagtgtgggtgcttattcacactagtctcaaacttaaactgaccgcttctatggccttcagtatgctggcctccttgaacctgctgcgcctgtcggttttctttgtgcccattgccgtgaagggcttaaccaacagcaagagtgctgtgatgcggttcaagaagttctttctgcaggagtcaccagtattctatgtacaaacactccaggatccatccaaagccctggtttttgaagaggccacacttagttggcagcagacatgccctggtatagtaaacggtgccctggagttggaaagaaatggacatgctagcgagggaatgactcgcccacgggatgcattggggcccgaggaagagggcaactctctggggcccgagctgcacaagattaacctcgttgtgtccaaaggcatgatgttgggagtctgcggaaacaccgggtccggaaagtcgagcctgctgtccgcgatactggaggagatgcaccttctggaaggaagtgtgggagtgcaaggctccttggcatacgtccctcaacaggcatggatcgtgtcaggcaacattcgggaaaacatactcatggggggcgcctatgacaaagcccgttatttgcaggtgcttcactgctgcagtctaaatagggatttggaattactgcctttcggggacatgacagagattggagaaagaggactaaacctgtctgggggtcaaaaacagcgcatttcactggccagggcagtctactctgacagacagatttatctactagatgacccgctgagcgccgtggacgctcatgttggcaagcacatttttgaggaatgcattaaaaaaacgctacggggaaaaacagtggtgctagttactcaccagttgcagtacctggaattttgtggacaaataattctcttagaaaacggcaaaatctgtgagaatggaactcacagtgaacttatgcagaagaaggggaaatatgctcagttgatacagaagatgcacaaggaggccactagttgtagatctatatcctcgcaccgacgccgccgctggaagaaagccccttag

SEQ ID NO: 180004 - DNA, 4080 bp, synthetic construct
  misc_feature 1..4080: note = Description of Artificial Sequence: Synthetic coding sequence
  source 1..4080: mol_type = other DNA
atggtgggcgagggcccctacctgatcagcgacctggaccagcgggggaggcgaagatccttcgcggaacgttatgacccttccttaaagacgatgattcccgttcgtccatgtgctaggcttgctccaaatccagtcgacgatgccgggctactgtcgtttgctaccttctcttggttaaccccagtgatggtgaagggctacaggcagaggcttaccgtcgatacacttcccccgctgtctacatatgatagctcagacaccaatgcaaaaagattcagggttttatgggatgaagaagtcgccagggttggaccagaaaaggcatctctctcccacgttgtgtggaagtttcaaagaaccagggtgctgatggatatcgtcgccaacattctttgtataataatggctgccatcggcccagtgattctgatccatcagatcttacagcagaccgagagaacttcagggaaggtctgggtggggatcggcctgtgcattgccctctttgccaccgagtttacaaaggtctttttttgggccttggcttgggccatcaattacagaacggccatccgattgaaggtggctcttagcacactggttttcgaaaaccttgtttcttttaaaactctgacccacatctccgtcggagaagtgctgaacatactgtcctccgactcatactcactgttcgaagctgcattattctgcccactgcctgccacaatcccaattctgatggtattctgtgcagcctatgctttcttcatcttaggacccaccgccctcatcgggatcagtgtatatgtgatattcattcctgtacagatgtttatggctaaactcaattctgcatttaggaggtcagctatcctggtgacggataagagagtgcagactatgaatgagttcttaacctgcattcggttaattaagatgtatgcctgggaaaagtccttcacaaatacaattcaagatattagaagaagagaacggaaactgctagagaaggccgggtttgttcagtctggtaacagcgcactcgcaccaattgtgagtaccatcgctatcgtactgacactgtcgtgtcacatcctgctgagacgcaagctgacggcccccgtggccttctcagtaatcgccatgttcaacgtcatgaagttctctattgctattctgcctttctcaataaaggcaatggccgaagccaacgtaagcttacgacggatgaaaaagatcctcatcgataagagtccgccctcatacattactcagcccgaggatcctgataccgtgctgcttctggctaatgccacacttacttgggaacacgaggcctccagaaagtcgacgcccaagaagctgcagaatcagaaacgacacttgtgcaagaaacagcggtctgaagcctatagcgagagaagccctccggcaaagggagccaccggacctgaagagcagagcgacagtctcaaatccgtactgcactcaatcagtttcgtggtgcggaagggaaaaatcctcggtatctgcggaaacgtgggatctggcaagtcctctttgctcgcagctctcctcggccagatgcaactgcagaaaggcgtggtcgccgtcaatggcactttggcctatgttagtcagcaggcttggatcttccacggaaatgtgagagaaaacattctgtttggggaaaaatacgaccatcagcggtaccagcatacggtccgcgtgtgtggcctccagaaagacctgtccaacctgccgtatggcgatctgaccgaaatcggcgaacggggattgaatctgtctgggggacagagacagaggatctcgctcgctcgcgccgtctactccgacagacaattatacctactggatgatcccttgtcagccgtcgacgcccacgtgggcaagcacgtatttgaggagtgcattaagaaaactctgcgcggcaagactgtggtgctggtgacacaccagctccagttcctcgaaagctgtgacgaggtcatactgctggaggacggtgagatctgtgagaaaggtacacacaaagagctgatggaggaaaggggaaggtacgcaaaacttatccataatctacgtggtctgcagttcaaagaccccgagcatctctacaacgccgctatggtcgaggcattcaaagagagcccagctgaaagagaggaagatgccggcattatcgtcctggccccaggaaacgaaaaggatgagggaaaggagtcggaaactggcagcgaatttgtggacactaaggtcccggagcatcagctgatccagacagagtctcctcaagaaggcacagtgacctggaagacctaccacacctatatcaaagccagcggcggatatcttcttagccttttcacagttttcctgtttctactgatgatagggtccgcagcattctcgaattggtggctggggctctggctggataaagggagcaggatgacatgcggcccacaaggtaatcgcaccatgtgtgaggtgggtgcagtgcttgccgacattggccaacatgtgtaccaatgggtatataccgcttcaatggtgtttatgcttgtattcggcgtgaccaagggcttcgtattcaccaaaacaacactgatggcaagttcctccctacatgacacggttttcgacaagatcttgaagtcccccatgtcatttttcgataccaccccaacaggacggcttatgaaccgatttagcaaggatatggatgagctcgacgttcgcttgccttttcacgccgagaacttcctccagcaattctttatggtggtgtttatcttggttatcctagctgccgtgtttccagcagtactgctggtagtcgccagcctggccgtggggtttttcattttgctgagaatcttccataggggcgtacaggaactgaagaaagttgagaacgtctcccgatccccatggttcacgcacatcacatccagcatgcagggcctaggtattatccacgcatacgggaagaaggaatcttgcatcacttatcacctgctgtacttcaactgcgcgctgcggtggtttgccctgcgcatggacgtcctgatgaacatccttaccttcacagtagcgctcctcgtgaccctgtcattcagtagcatttcaacttcaagtaagggtctctccctcagctacattatacaattgagtggtctgttgcaggtgtgtgtccgaacaggtaccgagacacaagccaagtttacctccgtcgaactgctaagagaatatatcagtacatgcgtgcctgagtgtacccaccccctgaaagttggcacatgtcctaaggactggccaagtaggggcgagatcaccttcagggattaccagatgagatacagagataatacccctttggtgctagattccctcaacctgaatatccaatcaggtcagaccgtcggtatcgttggtcgaacaggtagcggcaagtccagtcttgggatggccctgtttagattggttgagcccgcttcgggcacaattttcatcgatgaagtcgatatctgcatcctctccctcgaagacctgagaacgaagctaacggtgattccgcaggatccagtcctctttgtgggcacagtgaggtataatctggatccattcgagagccacaccgatgaaatgctctggcaggtgctggagaggactttcatgcgggacactattatgaagctcccggagaaattgcaagcagaagtcaccgaaaacggagagaactttagcgtcggggagcgccaacttctgtgtgtggcccgggctctgcttcgcaatagcaagattatcctgttagacgaggcaacagcctccatggacagtaagacggatacgctggtgcaaaacaccataaaggatgcttttaaaggttgcaccgtgcttacaatcgcccatcgcctgaacaccgtgctgaattgcgatcatgtactggtgatggagaacggcaaagtgattgagttcgacaagccagaagtcttggctgagaagcctgattctgcatttgccatgctgctcgccgccgaagttcgcctttag

SEQ ID NO: 180005 - DNA, 1902 bp, synthetic construct
  misc_feature 1..1902: note = Description of Artificial Sequence: Synthetic coding sequence
  source 1..1902: mol_type = other DNA
atggtgggcgagggcccctacctgatcagcgacctggaccagcggggcaggcggcgtagttttgctgaacggtacgatccctccctcaagacgatgatccccgtgagaccctgtgcacgtctcgcccctaatcctgtcgatgatgctgggctcttgtctttcgccaccttttcttggttaacacccgttatggtgaagggttatagacaaaggttgacggttgatacattgccaccattgtctacatatgatagctcagatactaacgccaaacgctttcgcgtcctctgggacgaagaggtggcgagagtggggcccgaaaaagcgagtttaagccacgtggtttggaaatttcagcgtactcgcgtattgatggatattgtggcgaatatcttgtgtatcataatggcagctattggtcccaccgttctgattcaccaaatcctccaacagactgagcgtacaagtggcaaagtgtgggtcggtattggcctatgtattgccctcttcgctactgaattcacaaaggtgttcttctgggcccttgcctgggccattaactatcgcacagcgattaggctgaaggtggctctgtctacgctggtattcgagaatctggtgtccttcaagaccctgacacacatcagtgttggggaggttctgaacatcctctccagcgactcctactccctgtttgaggctgctctgttttgtcctctccctgccacgatacctatcttgatggtgttctgtgctgcctacgctttctttatcctgggaccaaccgctctaatagggatctctgtctatgtaatattcattcccgtccagatgttcatggcaaaactgaatagtgccttcagacggtctgccatcctggtcaccgacaagagggttcagacgatgaacgaattcctgacctgtatccgcctcattaaaatgtatgcatgggagaaatcctttaccaacacaattcaggacattaggcgccgggagcgtaaactgctggagaaagccgggttcgtacagtctggtaattcggcgctggcgccgatagtgtccacaatagctattgtgctaaccctatcctgtcatattttgctccggcggaaacttaccgcaccagtggccttctcagtgatagcaatgtttaacgttatgaaatttagtattgccatcctgccttttagcatcaaggccatggccgaggctaatgtgtcactccgcaggatgaaaaaaatcctgatagacaagtcaccaccctcttacataacacagccagaggaccccgatacagtactgctgcttgctaatgctacactgacttgggagcacgaagcttccagaaaatctacacctaaaaaactccagaatcagaagagacatttgtgcaaaaagcagcggagcgaagcttattcggaacggtcacctcctgcaaaaggcgcaaccgggccagaggaacaaagcgacagtctgaagagtgtcttacacagcatctctttcgttgtgcgcaaaggcaaaatcctgggaatctgcggtaacgtgggttctggcaaatcctcgttactcgctgctttgcttgggcagatgcaacttcagaagggggttgtcgcggtgaacgggaccctggcctacgtgtcacagcaggcttggatcttccacggaaatgtgcgtgagaatattctgttcggagagaagtacgatcatcaacgtctagggtctggggcttcgacttccctaggcggcaggggaagggggctggcttggccagctctttctaccccgaccgttagtagcacctgctggaccactccatgtagaccttggacgccaacttgggggtcaacttccctccggtccgccctacggaggcggtccggcgaacggcagagctcttggtag

SEQ ID NO: 180006 - DNA, 2808 bp, synthetic construct
  misc_feature 1..2808: note = Description of Artificial Sequence: Synthetic coding sequence
  source 1..2808: mol_type = other DNA
atggtgggcgagggcccctacctgatcagcgacctggaccagcggggcagaagacgatcgttcgccgaaagatacgacccatcccttaaaaccatgattcccgtacgcccatgtgctagactcgccccaaaccctgttgacgatgccggtcttctgtcctttgccaccttttcatggttgacccccgttatggtgaagggataccggcagcggctgaccgtcgatacattgcctccactttctacttatgactccagcgatactaacgcaaaacgtttccgggtgctgtgggatgaggaagtggctcgggttgggccagagaaggcgtccctgtcccacgtcgtctggaagttccagcgtactcgcgtgcttatggacattgtagccaacatcttatgcattatcatggcggctatcgggccaaccgttctcatccaccagatcttgcaacaaaccgagaggacgtccgggaaggtctgggtaggcattgggctttgtatcgcattatttgctactgagtttacgaaggttttcttttgggccctagcctgggccatcaattatagaacagccattcggctgaaggttgcattgtccactctggtttttgaaaatctggtgagctttaaaactctgactcatatttccgtgggcgaggtgctgaacatactctcttccgattcgtactccctgttcgaggccgctcttttttgccccttgcccgccacaatcccaattctgatggtgttctgcgcagcctacgcctttttcatcttaggtccgactgccctgataggcatttctgtatacgtgatctttattcctgtgcagatgttcatggctaagctaaattcagcgttcagacgatcggccattctcgtgacagacaagcgcgtccagaccatgaatgagttcctgacctgcatcagactcatcaagatgtatgcctgggaaaaatcattcacaaacacaatccaagatattcggcgccgggagcgcaaactgttggagaaggccggatttgttcagagtggcaattccgcgctggcgcccattgtgagcacaatcgctatagtactgacgctgagctgtcatatactcctgaggaggaagctcactgctcctgttgcctttagcgtgatcgcaatgttcaatgtgatgaagttttccatcgccatactaccattctccattaaggctatggccgaggccaacgttagtctacgcagaatgaaaaagatattgatagacaagtcgcctccctcctatataacccaaccagaagaccccgacaccgtcttgctgcttgccaatgctaccctgacctgggagcacgaggctagccgcaagtcaactcccaagaaactgcagaatcagaagcggcatctgtgcaagaagcagcggtccgaggcgtatagcgaaagatcaccacctgctaaaggtgccacgggacctgaggaacagtccgacagtttgaagagtgtccttcactccataagtttcgtcgttaggaaggggaagatcctcgggatctgcggaaacgtgggctccggaaaaagttcattgctggcagccttactggggcagatgcaactgcagaagggcgtggtagctgtcaatggcacactagcttacgtctcccagcaggcttggatcttccacggcaatgtgcgagagaacatcctgtttggcgagaagtacgaccatcagcgttaccagcataccgtcagggtctgtggacttcaaaaggacctgtcaaacttgccctatggggaccttactgaaattggagagagagggctcaacctgtccggcggccaacgccagcgcatttcattggccagggccgtttactcggatagacagctatatctacttgacgatcctctgtcagccgtggatgcccacgttgggaaacacgtgtttgaagagtgtattaaaaagacccttcgcggtaagactgtggtgctggtcacacaccagctgcagttcctagagtcttgtgacgaggtgattctgctggaggatggggagatctgcgaaaagggaactcataaagagctgatggaggagagggggcggtacgcaaagctcattcacaacttgagagggcttcaatttaaagatcccgaacatttgtataatgcagcaatggttgaggcattcaaggaatctccagcagaaagagaagaagacgccgtcctcgcccctggaaacgaaaaagacgaaggaaaggagtccgaaactggatccgaattcgtggacaccaaagtgcctgagcaccaactgatccagaccgaaagtccacaggaagggacagtgacgtggaaaacttaccatacctatataaaggctagcggtggatatctcttatccctgtttaccgtgtttctgtttctcctgatgattggatcggccgcttttagtaattggtggctgggcctgtggctcgataaggggtcccgcatgacgtgtggccctcagggtaatcggactatgtgcgaggtgggcgctgtcctcgctgatatcgggcaacacgtctatcagtgggtatatacggcgtccatggtctttatgctggtgttcggcgttaccaagggattcgtgttcacgaagacgactctgatggcctcctcatcactgcacgacaccgttttcgacaaacacttccctcagcggtctccaggggcccaggagggaggcgaatgccagcctgtgaccctagtgcaccctcatcatctgttacacgctgggcccggccaccattctaggctttggcaagagggtgagctccaccacctcgtttag

SEQ ID NO: 180007 - DNA, 2793 bp, synthetic construct
  misc_feature 1..2793: note = Description of Artificial Sequence: Synthetic coding sequence
  source 1..2793: mol_type = other DNA
atggtgggcgagggcccctacctgatcagcgacctggaccagcggggcaggcgacgtagtttcgctgagagatatgacccttccctgaagacgatgattcccgtgcgtccctgcgcacgtctggcccctaacccggtcgatgatgccgggcttctttcctttgccaccttcagttggctcaccccagtgatggtcaagggatataggcagcgccttaccgtcgacacacttccgccactgtcaacgtatgacagcagcgacacaaacgctaaaagattccgggtcctttgggatgaggaagtggcccgggtaggccccgaaaaagccagtctgagccacgtcgtgtggaagttccagcgcacccgggtgctgatggacattgtagctaatatactgtgtattatcatggctgccattggccctaccgtcctcattcatcagatcctgcagcagacagaacgtacatctggcaaggtttgggtaggcattggattatgcatcgcgctgttcgcgaccgagttcactaaggtgtttttctgggccctagcatgggcgattaactaccgcacagctatcaggttaaaagtcgctctgtcgaccctggtgttcgaaaacctcgttagctttaaaacactcactcacatctcagtgggcgaaatgtttatggccaaactaaattcagcgtttagacggtccgccattttagtgaccgataagcgggtccagacaatgaacgagttcctgacctgtataagactgattaaaatgtatgcatgggagaaatcatttactaatacaatccaggatatacgacggcgggagcggaagctgctggaaaaggctggctttgttcagagcggtaattccgcacttgcccccatcgtttcaacaatcgccatcgtactgactctcagctgccacattttgctgcgccgcaagctcaccgcccccgtagcgttctcggttatcgccatgttcaacgtgatgaagttttccatcgctattctgcctttcagtatcaaggcaatggctgaagccaacgtaagtttaaggagaatgaaaaagatcttaattgacaaaagtcccccctcctatatcacccagccggaggaccctgacactgtcctgctgctggctaatgccacgctgacatgggagcacgaagctagcaggaagtccaccccaaagaagttgcagaaccagaaaagacatctctgcaaaaagcagagatcagaggcatactctgaaaggtcgccacccgcaaaaggcgccaccggacctgaggagcaaagcgactccttgaagtctgtgttacatagcatatctttcgtggtgcggaagggaaagattctggggatctgcggtaacgtaggatctggaaaatcatccctcctagctgccctcctgggtcagatgcaattacaaaaaggggttgttgcagtcaacggtacccttgcctatgtgtcacagcaagcctggatttttcacggtaacgttcgcgaaaatatcctgttcggggagaagtatgatcatcagaggtaccaacacaccgtgagagtgtgcggtctccagaaggatttgagtaacctgccttatggcgatctcactgagataggggagcggggcctaaacctcagcggcggtcagcgtcaacgcatcagcctggcacgcgcagtatacagcgacaggcagctatatttgttagacgatccactctctgccgtcgatgcccacgtaggaaagcatgtttttgaagaatgcattaagaaaacccttcggggaaagaccgtggtgcttgttactcaccagctacagtttttagaatcttgcgatgaggttattctcctcgaggacggggaaatttgcgagaaaggaactcacaaagagttgatggaagagcgcggtcgatatgccaaactgattcacaacctccgaggcctccagttcaaagatcccgaacatctatacaatgcggccatggtggaagccttcaaagaatcccccgcggaacgtgaggaagacgccgggattattgtgcctgaacatcaactgattcaaactgagtcaccgcaggaaggaacagtgacctggaagacctaccatacctatatcaaggctagtggagggtacctgctttcacttttcacagtctttttattcctgctgatgattggctctgctgcgttctcgaactggtggcttggtctctggctggacaagggcagtagaatgacttgcggtccacagggcaataggacaatgtgcgaagtcggagctgtgctcgccgacattggccagcacgtttaccagtgggtctataccgcctctatggtcttcatgctcgtgtttggggtaacaaagggatttgtgtttacaaaaaccaccctgatggcttcatcttccctacacgacaccgtgttcgataaaatcctgaaaagcccgatgtcttttttcgacactacccctactggccgactgatgaaccgtttcagtaaggatatggacgagttagatgttagattgccattccatgccgaaaatttcttacaacagttcttcatggtggtcttcatcctcgtgatcctcgccgctgtgttccctgcggttctgctggtggtcgcgtccctggcagtgggcttctttattcttctgcggatattccacaggggcgtgcaagagcttaagaaggtcgagaacgtgagtagatccccctggttcacccatataacaagctcaatgcagggtttgggtataatccatgcttacgggaaaaaagagagctgtattacttag

SEQ ID NO: 180008 - DNA, 321 bp, synthetic construct
  misc_feature 1..321: note = Description of Artificial Sequence: Synthetic coding sequence
  source 1..321: mol_type = other DNA
atggtgggcgagggcccctacctgatcagcgacctggaccagcggggtcgacgacgaagcttcgctgaacggtatgatccaagtctgaaaacaatgatccctgttcgaccatgcgctaggctcgcacctaatccggtggatgatgcgggcctacttagcttcgccacttttagttggctcactcccgtgatggtgaagggttatcgccagcggctcaccgttgatactcttcctcctcttagcacgtacgactccagcgataccaacgctaaacgcttccgggtgttgtgggacgaagaggttgccagagtgggtccatag

SEQ ID NO: 180009 - DNA, 858 bp, synthetic construct
  misc_feature 1..858: note = Description of Artificial Sequence: Synthetic coding sequence
  source 1..858: mol_type = other DNA
atggtgggcgagggcccctacctgatcagcgacctggaccagcggggccgaaggcgctcttttgcagaaaggtatgatccatccctcaagactatgatccccgtgagaccttgcgctcgactcgctcctaatccagttgacgacgcaggcctgctgagtttcgctacatttagttggctgaccccagtcatggtgaagggctaccgccaaagactgacagttgatacactgcctccgttaagtacatacgactcttccgacaccaatgcgaagcgattcagagttctttgggatgaggaagttgcccgggtgggccctgaaaaggccagtctgtcgcacgtggtgtggaagtttcaacgcacgcgtgttctgatggatatagtggcaaatattctgtgcattatcatggcagcgatcggccctaccgtgctcattcatcaaattctccagcagaccgagcgcacgagcggcaaagtctgggtggggattgggctgtgtattgctctctttgcaacggagttcactaaagtcttcttttgggcactagcgtgggcgatcaactaccgtacagcaatcaggcttaaagtcgcccttagcaccttggtgttcgagaacttggtctctttcaaaactctcacgcacattagtgtcggcgaagtgctgaacatcctttcttccgattcctactcgctgtttgaagccgctctgttttgcccattgcctgccaccatccctatcctaatggttttctgtgccgcttatgccttctttattctgggccctaccgctctgattggcatctccgtgtgtctgtggccaagttccattcagttatccgaaggacagcaattctggtag

SEQ ID NO: 180010 - DNA, 882 bp, synthetic construct
  misc_feature 1..882: note = Description of Artificial Sequence: Synthetic coding sequence
  source 1..882: mol_type = other DNA
atgctggagaagttctgcaacagcaccttctggaacagcagcttccttgattcccctgaggctgacctgcccctttgtttcgagcagaccgtcttggtgtggattcccctaggatatctgtggctgttagccccatggcaattattgcatgtttacaaatcccgcacgaaaagatcctcaacaactaagctatacctagcaaagcaggtctttgtcggcttccttctgattcttgcagccatagaacttgccctggtactcacagaggatagcggccaggccaccgtccccgctgtccggtatactaatccaagcctttatcttggaacatggctgttagtcttgctcatccagtattccaggcaatggtgtgtccagaaaaattcttggtttcttagtttgttttggattctctctattttgtgtggtactttccaatttcagaccctgattcggacacttctccaaggtgataactcaaatctggcatactcatgcttgttctttattagctacgggtttcagatcctgatactgattttctcagcattctctgagaacaatgaaagttccaataacccgtcctctatcgcttcgtttctgtcgagtatcacatatagctggtatgattcaataattctgaagggatacaagcgccccctgacactggaggatgtgtgggaggtggacgaagagatgaaaacgaagactctggttagtaaattcgagactcacatgaaacgggaactgcaaaaagcgcggagggcacttcagcgccgccaggaaaagtcgtctcagcagaacagcggggcgaggttacccggacttaacaaaaatcagtcccagagtcaagacgcgctggtacttgttaccttcccctag

SEQ ID NO: 180011 - DNA, 4638 bp, synthetic construct
  misc_feature 1..4638: note = Description of Artificial Sequence: Synthetic coding sequence
  source 1..4638: mol_type = other DNA
atgctggagaagttctgcaacagcaccttctggaacagcagcttcctggactctcccgaagccgatctacccctgtgctttgaacaaactgtactcgtctggatccccttgggttacctgtggctactggcgccatggcagttactgcacgtatacaaatcaagaaccaaacgcagtagtacaactaagctttatctcgctaagcaggtgtttgtaggatttctgctgatattggctgctatcgagctggctctggtactgacagaagacagcgggcaggctacggtccccgccgtcaggtatactaacccatccctgtacctgggtacctggctgctggtgctgctgatccaatactccaggcagtggtgtgtccagaagaacagttggttcctatctttgttctggatcctgtcaatcctgtgtggtacttttcagttccaaactctcatcaggaccctgcttcagggtgataattctaacttggcgtactcctgtctgttcttcatttcatacggctttcagatcctgatcctgattttctccgctttcagcgagaacaacgagtcttcaaataacccctcctctattgcaagttttctgagttctattacctactcgtggtacgacagcatcatcctgaagggatacaaacggcctctgacactggaggatgtgtgggaagtagatgaggaaatgaaaaccaaaactctggtgtccaaatttgaaacccatatgaagcgcgagctgcagaaggcccgtagagcccttcaaagaaggcaagagaagagctctcagcaaaatagtggtgcacgcttgccgggccttaacaagaaccagtctcaaagtcaggatgcactcgtgctggaagacgtggaaaaaaagaaaaaaaagtcaggaacaaagaaggacgtgccgaaaagctggctgatgaaagccctgttcaaaaccttttatatggtcctgctaaagtcattcctgctcaaactggtgaatgacatcttcacatttgtaagcccacaactgcttaagttgctaatctcatttgcttccgatagggacacttacctgtggatcggctacctgtgcgcgattctcctatttaccgccgccctcatccagtcgttctgtcttcagtgttattttcagctgtgcttcaaactgggggtgaaagttaggacagctatcatggcctccgtctataagaaggctctgactctgagcaacctcgcacggaaggaatacactgtcggagagaccgtgaatctgatgtctgtggacgctcagaagttgatggacgtgaccaattttatgcacatgctgtggagctccgtgctgcaaatcgtcctgagcattttctttctctggcgtgagctgggacccagtgttctcgccggcgtgggggtgatggtgctagtaattcccatcaacgccatactcagcaccaaaagcaagaccatccaggtgaaaaacatgaaaaacaaggataaaagacttaaaataatgaacgagatcctcagcggcatcaagattctaaaatactttgcttgggagccaagcttcagggaccaagttcagaaccttcgaaaaaaggagttgaagaatctgctcgccttcagccagctgcaatgtgtggtcatctttgtatttcagcttaccccagtcttggtgagcgtcgttactttctctgtgtatgtattggtggactcaaacaatattcttgacgctcagaaggcctttacatccatcaccctgtttaacatccttcgatttcctctaagcatgctgcccatgatgatctccagcatgttgcaggccagtgtatctactgagaggctggagaaatacttgggaggggatgacctggatacatccgctataagacatgattgcaattttgacaaggccatgcagttctcggaagcttcgtttacatgggagcacgactcagaggcgacggtgagggacgtgaatttggacatcatggccgggcagctcgtggctgttattggccccgttggctccggaaagagctctctgattagtgctatgcttggcgagatggagaatgtacatggccacatcacgataaagggcacaaccgcttatgtgccgcaacagtcctggattcagaacgggacgataaaagacaatatactgttcggaacagagttcaacgagaaacgatatcaacaggtcctggaggcatgtgccctgctgcccgacttggaaatgctcccaggcggcgacctggccgagattggggagaagggaataaacttaagtggaggccaaaaacagcgcatatctttggccagagctacttatcaaaacttagatatttatctgctggacgatcctctgagtgccgtagatgcacacgtcgggaagcacatcttcaacaaagtactcggccccaatgggctcctcaagggtaagacgaggctactcgtgacacattcaatgcactttctgccccaggtggatgagattgtcgtcttgggtaacggtaccatcgtcgagaagggctcttattctgctttattagctaagaagggagagtttgctaagaatcttaaaacgttcctaagacacactggacccgaagaagaagctaccgtgcatgacggcagtgaggaagaggatgacgactatggacttatatcaagcgtggaagagatccctgaggacgctgccagcattacaatgcgcagggaaaactcctttaggcgtaccctttcacggagctcccggagcaatggacggcacctgaagagtttaagaaatagcttaaagacaagaaacgtcaattccctgaaagaagacgaggagttggtgaaaggccagaaattgattaaaaaagaatttatagaaacaggtaaggtgaagttttctatctacctagagtaccttcaggcaatcggactgttttccattttttttatcatcctggcttttgtgatgaatagtgtagctttcatcggatctaatttgtggctaagtgcttggaccagcgattccaagatcttcaattccaccgactatcccgcctcccagagagatatgagagttggagtctatggcgctttagggctagcccagggaatattcgtgtttattgctcacttttggtccgctttcggctttgttcacgctagtaatatcttgcataaacaacttttaaataatatccttcgagctcctatgcggtttttcgacaccacacctaccggacgtatcgtaaaccgatttgcaggagatatctctacagtggatgacacgttgccacaatcgctccgcagctggattacgtgtttcctggggatcattagtaccctcgtgatgatctgtatggccactcccgtttttacgattattgtgatccccctcggaattatttatgtctcagtgcagatgttctacgtgtctacctcccggcagctcaggcgccttgatagtgttacacgatcacccatatattctcatttcagcgaaacagtgtctggcctaccagtgatacgggcttttgaacaccagcagcggttcctgaagcacaacgaagtgcgcatcgacacaaaccagaagtgcgttttttcttggattaccagcaataggtggctggccatccgactggaactggtgggcaaccttaccgtcttttttagcgccctgatgatggtgatctaccgggacacgctctcgggcgacaccgtggggtttgtcctgagcaacgctctcaacataactcagacactcaactggctggtacggatgactagcgagatcgagacaaatatcgtggccgttgaacgaatcaccgagtacaccaaagttgaaaatgaagccccgtgggtgaccgacaaacggccacctcccgactggccatcaaaaggtaagatacagttcaacaactaccaggtccggtatcgcccagagttggacctcgtgcttcgaggcatcacttgtgacattggctcgatggagaaaatcggagttgtggggaggacaggagctggaaagagctcactgaccaactgcctatttcgaatcctcgaggctgcaggcggacagataatcatcgacggagtggatatagccagtatcggattgcacgacttgcgcgaaaagttaactatcattccacaggaccccatattattctccggctccctgcgcatgaacctggatcctttcaataattactcagacgaggaaatatggaaagccctcgaactggctcatctcaagtcctttgtagctagcctccagttggggctgagtcatgaggtcaccgaggcgggtggcaacctgtccataggacaacgacaactgctgtgtctcggacgcgccctgctacgcaagagtaagattctcgtgttggacgaggccaccgctgcagtagatctggagacagacaatctgatacaaacgacgatacagaatgaatttgcccattgcaccgtgataactattgcacatcgcctgcataccattatggactctgacaaggtgatggtgttggacaacggcaagattattgagtgtgggtccccagaagagctcctgcagattcccggccctttctacttcatggctaaggaagctggtatcgagaatgtgaactctactaaattttag

SEQ ID NO: 180012 - DNA, 4584 bp, synthetic construct
  misc_feature 1..4584: note = Description of Artificial Sequence: Synthetic coding sequence
  source 1..4584: mol_type = other DNA
atggacgccctgtgcggcagcggcgagctgggcagcaagttctgggattcaaacctcagtgtgcacaccgagaatcctgaccttactccttgttttcagaacagcctgctggcctgggtcccctgcatctacctgtgggtggctctgccctgctatttgctctatctccggcaccactgtcgtgggtacattatattgtcccatttgagcaagctgaaaatggtcctgggggttctcttgtggtgtgtctcctgggccgacttgttttatagcttccatggtctggtccatggccgggccccagccccggtgttcttcgtcaccccactagtggtgggcgtgaccatgttgctagctactttactgatccagtatgaacggctgcagggcgtccaatcaagcggcgtcctcattatcttctggttcctgtgcgttgtgtgtgctattgtccccttccggtcaaaaattctgctcgctaaggcggagggggaaataagtgaccctttcaggttcacaactttttacattcacttcgccctggtgctcagtgccctgattttggcctgtttcagggagaagccaccgttcttctctgccaaaaatgtggatcctaatccttacccggagactagcgcggggtttttgtccaggctttttttctggtggtttacaaagatggctatctatggatatcgtcaccctctagaggaaaaagatctgtggtcactgaaggaagaagacagatctcagatggtggtgcagcagttgctggaggcctggcggaaacaagaaaagcagacagcacggcacaaggcatcagctgccccaggcaagaacgctagtggcgaggatgaagtgctcctcggggctcgccctagacccaggaaaccgtcatttctgaaggccttactcgcaaccttcggctcctcattcctcataagcgcatgcttcaagttgatccaggacctgctgtcgttcataaacccacaactgctgtcgattctgattcggtttatttctaaccctatggccccatcttggtggggattcctggtcgctggactgatgtttttatgctcaatgatgcaatcgctcatattgcagcactattatcattatatttttgtaacgggggtgaaattcagaactggtatcatgggcgtgatttacagaaaggcattggtaatcactaattctgtgaagagagcaagcactgtgggcgaaatagtgaacctcatgagcgtcgatgcacagaggttcatggacctcgcgccctttctaaacctgctgtggagtgcgccgcttcagattattcttgccatctacttcctgtggcagaatttgggcccttctgtgctggctggggtggccttcatggttctccttatcccccttaacggcgccgttgccgtgaagatgagagcttttcaggtgaagcagatgaagctcaaggattctcgtattaagctcatgtctgagatcctcaacgggataaaggtcctaaagctttacgcttgggagccctctttcctcaagcaggttgagggtatccgccagggtgagctccagctgctaaggacagccgcctatttacatacgaccacgacgtttacctggatgtgtagcccattcttggtgaccctcatcacgctgtgggtctacgtgtatgttgaccctaacaatgtgctggatgctgagaaggcctttgtcagtgtgagtctctttaacatcctaagactacccctgaatatgctcccccagctgatttctaatctgactcaggcttctgtgtccctcaaaagaattcagcagttcttgtctcaggaagagctagaccctcaatcagtagagagaaaaactatctctccggggtacgcaataaccattcacagcgggaccttcacctgggcccaagatctgccacccaccctccatagcctcgatatccaagtacccaaaggtgcattggtggcagttgtcggtcctgtgggctgtgggaaatcttcgctggtgagcgctctattgggagaaatggaaaaactcgaaggcaaagttcacatgaaaggttctgtcgcttatgtgccacaacaggcctggatccagaattgtaccttacaggagaatgtgttgttcggaaaagcactcaacccaaagaggtaccaacaaacactcgaagcgtgcgccctactcgccgaccttgagatgctgcctgggggtgatcaaaccgagataggggagaaaggaattaatcttagtggcgggcagagacaaagagtcagcctggctagagccgtgtatagcgatgcggatatcttcttgctcgatgaccccctgtccgccgtcgattcccacgtcgcgaagcacattttcgaccatgtgattggtcctgagggagtgcttgccggtaagaccagagtcttggttacccatggcataagcttcctgccccagaccgattttattatcgtcctggcagatggccaagtttcagagatgggcccatacccagccttgctgcagcggaacggttcctttgccaacttcctttgcaattacgcccctgatgaggaccaaggtcatctggaggattcctggaccgccctggaaggagccgaagacaaggaggcgttactaattgaggataccctgtcgaatcacaccgatttgaccgataatgaccccgtgacgtatgttgtacagaagcagtttatgagacagctgtctgccctgagttcagatggggaaggccaggggagacctgtgcctcggcgccacctgggaccctcggaaaaggtacaggtgaccgaagcaaaagccgacggggctctgacccaggaggaaaaagccgccattgggacagtagagctgagcgttttctgggattacgcgaaggccgtgggcctatgcaccacactggccatctgtctgctctacgtcggtcagtcggctgccgctattggagcgaatgtctggctgtctgcctggactaatgatgccatggcggattctagacagaacaacacatctcttcgactcggtgtgtatgcagctctcgggattctgcaaggcttcctggtgatgttagccgccatggcaatggcggctggtgggattcaggcggctcgggtcctgcaccaggcgttactgcacaacaaaatcaggagccctcagtcattttttgatactactccaagtggtaggatcctgaactgcttctccaaagacatctacgtggtggatgaagttcttgcacccgtgatcttaatgcttctgaactcgttctttaacgccattagtaccctggtggtgatcatggcatccactcctctctttactgtggtgatccttcccctggccgtgttatatacactggtacagagattttacgccgccacttccaggcagttaaagaggctggaatctgtctcacgaagccctatttactcccacttctcagaaacagtgactggagcctccgtgatccgtgcgtacaatagaagtagagatttcgagattatctccgacaccaaggtagatgccaaccagcgtagctgctatccctatattattagcaaccgctggctctccatcggcgtggagtttgtcgggaattgtgttgtactatttgcagcactgttcgcagtgattgggagatcctccctgaatcccggattggtcggcctttccgtatcctattctctccaggtcacattcgctctgaattggatgatccggatgatgtcagatcttgagtctaacattgtggctgttgagagggtaaaggaatactctaagactgagacggaggctccatgggtggtggagggctctagaccccctgagggatggccaccaagaggagaggtagaattcagaaactacagtgtacggtatcgaccaggcctggacctcgtcctgagggatttaagtctgcacgtgcatggtggcgagaaagttggcattgtgggcagaacaggagcaggaaagtcctccatgactctgtgcctttttagaattctggaagctgctaagggagagatcagaatcgatgggttgaacgtggccgacatcggcctccatgatctgagaagtcagctgacaataattccacaggacccaattctgttttccggcactctgcgaatgaatctcgaccccttcggctcctactcagaggaggatatttggtgggccctggaactttcacacctccacactttcgtgtctagccaaccagccggcctggacttccagtgttctgaaggtggggaaaatttaagtgtcggccagcggcaactcgtgtgcttggctagggccctgctgcgcaagtccaggatcctggtcttagacgaggccactgccgcaattgatctagaaactgacaacctgatccaggcaactatacgcacccaattcgacacgtgtactgtactgacaatcgctcaccggttgaacaccatcatggactatacccgtgttttggtactggacaagggcgtagttgccgagttcgactccccagccaatttgatcgcggccagaggcattttttatgggatggcccgggacgcagggctcgcctag

SEQ ID NO: 180013 - DNA, 1719 bp, synthetic construct
  misc_feature 1..1719: note = Description of Artificial Sequence: Synthetic coding sequence
  source 1..1719: mol_type = other DNA
atggacgccctgtgcggcagcggcgagctgggcagcaagttctgggactctaacctgtcagtccacacagagaatcccgacttgacgccttgttttcagaatagcctgctagcatgggtgccatgcatttatctctgggtggcacttccatgctatctgctttacctcagacatcattgcagagggtacatcatactttctcacctctcaaagttgaaaatggtgcttggagtactcctctggtgcgtctcttgggccgatctgttctacagtttccacgggctggtgcatggtcgggcccctgcccccgtcttctttgtgacaccactggtggtaggagtgaccatgctgctggctactctgctcatccaatatgagagactgcagggtgtccagtcctccggtgtgttgatcattttttggtttctctgtgtcgtctgcgccatcgtgccatttcgatccaagatcttgctggccaaggccgaaggcgagatttctgatccctttaggtttacgaccttctacatccactttgcccttgttctttcggcactaattctggcctgcttcagggaaaagccaccttttttttctgcaaagaacgtggaccctaacccctatcccgaaacttcagccggatttctgtctcgcctgtttttctggtggtttactaagatggcgatctatggctatcggcatcccctggaagaaaaagacctttggtccttgaaggaagaagataggagccagatggtggtccaacaactcctcgaagcttggaggaagcaggaaaagcagactgcacgacataaggcgtctgcggcgcccggtaagaatgcaagcggcgaagacgaagtcttactgggcgcaaggcctcgccctagaaaaccatcattcctaaaggccctcttagctacttttggctctagttttctcatatcagcatgttttaagctgattcaggatctgctgtctttcattaatcctcaattgctctccattctgattaggttcatttccaaccctatggcaccttcatggtgggggttcctggtggctggattaatgttcctgtgctctatgatgcagagcctgattttgcagcactactatcactatatcttcgttacaggcgttaaattccggacagggatcatgggggtgatttaccgaaaggccctagtcatcactaattcagtcaaaagggcaagcaccgtgggggagatcgtcaacctcatgtcagtggacgcccagaggttcatggacctggcccccttccttaacttactttggagtgcgcctttgcaaatcatcttggccatttactttctgtggcagaacctcgggccatctgtcctggcaggcgtcgcctttatggtgctccttattcctctgaacggcgctgtggcagtgaaaatgcgtgctttccaagtcaaacaaatgaagctgaaggactcacggataaagctcatgtctgagatacttaatggaatcaaggtgctcaagctttatgcttgggaacccagttttcttaaacaggttgaaggtatcaggcagggcgagttgcaactgctcaggaccgccgcctacctgcataccacaaccaccttcacttggatgtgcagcccgttcctggtacgcctgggcactggtttaggaccttgcctgcaaggatctggatgtccaggaatggccagagctcattggactctgccttag

SEQ ID NO: 180014 - DNA, 3717 bp, synthetic construct
  misc_feature 1..3717: note = Description of Artificial Sequence: Synthetic coding sequence
  source 1..3717: mol_type = other DNA
atggacgccctgtgcggcagcggcgagctgggcagcaagttctgggactctaatttgtctgtccatacagaaaatcccgatctcacaccgtgctttcagaacagccttctcgcctgggtgccctgtatttatctctgggtggcactgccatgctacctgctgtatctgcgacatcattgccggggatacataatcctgtctcacttatctaaactcaagatggtactaggggttttgctgtggtgcgttagttgggccgatctgttctattcctttcacggacttgtgcacgggcgggcgccagcccctgtgttcttcgtgaccccactcgtggtgggggttaccatgctcctcgccactctgcttatccaatatgaacgtttgcaaggagttcagagctctggcgtgctcattattttctggttcttatgcgtagtttgcgccatagtccctttcaggagtaaaattttattggcgaaggctgaaggggagatctcagatccatttagatttacaacattttacattcacttcgcgctcgtcctgtcggcactgatcctcgcctgttttcgagagaagccccccttcttttcagccaagaatgtagatcccaacccgtacccggagacatctgcaggcttcttgtcgcggctgttcttctggtggttcacaaagatggcaatttacgggtaccgccacccacttgaggagaaagacttgtggagcctgaaggaggaggaccggagccagatggtagtccagcaactcttggaagcgtggaggaaacaggaaaagcagacggccaggcataaggcgtccgcagccccagggaaaaatgctagcggagaagatgaggtacttctgggcgcacggcctaggcctcgcaaacccagttttctaaaagccctgctcgccacgttcggttcctcgttcctgatatccgcttgctttaagctcatccaagacctactgagcttcatcaacccacagctgttatcgatcctcattcgcttcataagcaaccccatggccccttcgtggtggggatttctcgtggccggattgatgtttctgtgctcaatgatgcagtccctgattttgcaacactactatcactatatcttcgtcaccggagtcaagtttcgcaccggcattatgggggtgatctatcgcaaggccttggttattaccaatagcgtcaagcgggccagcacagtgggcgagattgtgaatctgatgagcgtcgacgctcagcggtttatggacctggctccctttctgaacttgttatggtccgcccctctgcagattatactggctatctatttcctgtggcagaatctgggccccagcgtgttggcaggagtcgcgttcatggtgttgctaattcccctgaatggtgctgtggccgttaaaatgcgggcctttcaggttaagcaaatgaaactgaaagactcacggataaaattgatgtccgagatcctaaacggaatcaaggtgctgaagttatacgcttgggagccttcattcctcaagcaagtcgagggtatcaggcagggagaactgcagttactcaggactgccgcctacctccacacaactacgacatttacatggatgtgttcccctttcctcgtcacgctgatcacgctgtgggtatacgtatacgtggaccctaacaacgtgctggacgctgagaaggctttcgtgtctgtctccctgtttaacatattaaggctgccccttaacatgctcccccagctgattagcaacctgacacaggcctctgtgagtttgaaacgaattcagcagttcttatcacaggaagaattggacccacagtctgtcgaacggaaaaccatctccccgggctatgctataacaatccacagtggtacatttacgtgggctcaggacctgcctccaacattacacagcctagacatccaggtgccaaagggggcactggtcgccgtcgttgggccagtaggctgcgggaagagctctctcgtcagtgccttgttaggggaaatggaaaagctggagggcaaagtccacatgaaagggagtgtggcatatgtgccacagcaagcgtggatccaaaactgtacactgcaggagaacgtactgttcggcaaagctctgaaccctaagcggtaccagcagacgctggaggcatgcgccttgctcgccgacctggagatgttgcctggcggcgaccagacggaaatcggcgagaagggcataaacttgagcggtggccagcggcaacgagtatccttggcccgcgcagtgtactctgatgccgatatctttctcctcgatgatccactgtctgccgttgactctcatgtggccaagcacatattcgaccatgtgataggcccagagggcgtgcttgccgggaagactagagtgctcgtgacacatggcatctcattcctgcctcaaaccgacttcatcattgttctggccgatgggcaagtctcagaaatggggccatatcccgcgctgttacagcgtaatggctctttcgctaattttctgtgcaactacgctccggatgaagaccagggccatttggaggactcatggactgccttggagggagccgaagataaggaagccctgcttatcgaagacacgttgagcaaccatacagaccttacggacaatgatcccgtcacctatgttgtgcaaaaacagtttatgcggcagctgagtgctctgagttcggacggtgagggtcagggcagaccagttccaagaaggcaccttggaccatcggagaaggtgcaagtgactgaggctaaagctgacggcgccctaacccaagaagagaaggccgccatcggaactgtagagctgagcgtgttctgggactatgccaaagccgttggcctgtgcactactcttgcgatctgtctactgtatgtaggccaatcggcagccgctatcggtgctaatgtgtggctcagcgcatggacaaacgatgcaatggccgattcaaggcaaaacaatacatctctccggctgggcgtttatgccgccttgggcattcttcagggttttttagtaatgctggcagccatggcaatggctgccggcggaatacaggctgcacgcgtgttgcatcaggcactgttgcataacaagatccgcagcccgcagtcctttttcgacacaaccccttctggcaggatcctcaactgcttttcgaaggacatctacgtggtcgacgaggttctcgccccagtgattttaatgctcttgaactccttttttaacgccatcagcactctagtcgtgattatggcctccacaccactatttactgttgtcattctgcccctggcagttctctacactctcgtgcagcgattttacgcagctaccagccgacagctgaaacgcttggaatctgtcagcagaagccccatctactctcacttctcagagactgtgacaggcgcctccgtgatccgcgcttataatcgatctcgcgattttgaaattatctctgatactaaggtggacgccaatcagcggtcttgctacccgtatatcattagcaaccgctccgaggcagcgtctctcgcgccctgctcctcgcgcaatagccagcaagctctttggtgtagcgggtctttaagcctgctaagcccaaagcagaagacgggccctgcgctccccctgccacattttctcctcatatag

SEQ ID NO: 180015 - DNA, 3978 bp, synthetic construct
  misc_feature 1..3978: note = Description of Artificial Sequence: Synthetic coding sequence
  source 1..3978: mol_type = other DNA
atgctgcccgtgtaccaggaggtgaagcccaaccccctgcaggacgccaatctgtgttctcgggtcttcttttggtggttgaaccctctgtttaaaatcggacacaagagaagattagaggaagatgacatgtatagtgtgcttcctgaagataggagccagcatttgggagaggaactacagggcttctgggataaggaggtgctccgtgctgagaatgacgcacagaagcccagcttaactagggccatcatcaagtgctactggaagtcttacctcgtcctgggcatctttaccctgattgaagagtccgcaaaagttatccaacccatcttcctaggaaagattattaattactttgagaactacgatcccatggattcagtggctctgaacacagcatacgcctacgccacagtgctgactttttgcaccttaatcctagccatcttacaccacctgtatttctatcatgtgcaatgcgcaggcatgaggttgagagtcgctatgtgccacatgatatataggaaagccctcagattgtccaacatggctatggggaaaactacaacggggcaaatcgtgaacctattgagtaacgatgtgaataaatttgatcaggtgaccgtgtttctccattttctatgggcaggccctctgcaggcgattgccgtcacagccctcttgtggatggagatcggcattagttgcctagcggggatggcggtcctcattatcttgcttcctttgcagtcctgctttggaaagctgttctcctcactgagatcgaaaaccgcgaccttcactgacgcacgcattcggacgatgaatgaggtcatcaccgggatcaggatcatcaagatgtatgcctgggaaaaaagctttagtaacctgatcacaaacctaaggaaaaaggagatttcgaagattctgagatcttcatgtctgagaggtatgaatctggcatctttcttttctgccagtaaaatcatagttttcgtgacatttaccacgtacgtccttttaggctccgtgatcaccgcatcccgggtgttcgtggccgtgactttgtatggcgccgtgagattgacagtgactttgttcttcccatctgcaatcgagcgcgtttccgaggcaattgtcagcatccgcaggatccagacattcctcctactagacgagatctcacagaggaatagacagcttcctagcgatggcaaaaagatggtgcatgtgcaggacttcaccgctttctgggacaaagctagtgagactcccactctgcagggcttatctttcacagtacggcccggagaactccttgccgtcgttggcccggttggagcgggcaagagttccctgctgtctgccgttctgggcgagctagctccttcccacggcctggttagcgtgcatggcaggattgcttacgttagccagcagccctgggtgttttccgggaccctgagatcaaacattctcttcgggaagaagtacgagaaagaaaggtacgaaaaggttatcaaagcttgcgcgcttaagaaagatctgcagttgcttgaagatggagatctgacagtcataggcgaccggggaaccaccctcagcggggggcagaaggctagagtgaacctggcacgcgcagtttatcaggatgcagacatttacctcttggacgatcccctgtcagccgtggatgctgaggtatcacggcacctgtttgagctgtgtatctgtcagattctacacgaaaaaataacaattttagtgactcaccagctgcagtatttgaaagcggccagtcagattctaatcctgaaagacggcaaaatggttcaaaagggcacttatacggagtttcttaaatctggtatcgactttggttcccttcttaaaaaggacaacgaggagtctgaacagcctcctgtccccggaactccgacacttagaaacaggactttttctgagtccagcgtgtggagccagcagagcagtcggccttctctgaaggatggggcattagagagtcaagacaccgaaaatgtccccgtaaccttatctgaggagaatcggagtgagggcaaggtgggcttccaagcctacaaaaattactttagggcaggggcccattggattgtgttcatctttttaattttgttaaatactgccgcccaggtggcttacgtgctccaggactggtggctgtcatattgggcaaacaagcagagcatgcttaatgtcacagtcaacggaggggggaatgtgactgaaaagctggatctcaactggtacctcgggatatatagcggccttactgtagcgactgtgctgttcgggattgcgcgttctctgctggtcttctatgtcctggttaacagctctcaaacacttcacaataaaatgtttgaaagcatactgaaggccccagtgttattcttcgatcggaacccaatcggcaggatcctcaatcgttttagcaaagacataggccaccttgatgacctactgcctcttactttcctggatttcatccaaacactcctgcaggtggtaggggttgtctcagtggccgtggccgtcatcccatggatcgccatcccactggtacccctgggcattatctttattttcctccgccgctatttcctggagacaagcagagatgtgaaacgactggagagcacgacccgctcacccgtgttttctcatctgtcgtcctcactgcagggcctttggaccatcagggcatacaaggccgaggagagatgtcaggagctcttcgacgcacaccaagacctccactccgaagcatggttcttgttcctcaccacatcgcgctggtttgccgttcgattagatgccatctgcgccatgttcgttatcatcgtggcatttggcagcctaatactggccaaaaccctagacgcgggtcaggttgggttggccctctcctatgctctgacactgatgggcatgttccagtggtgtgtgcggcagtccgctgaagtggaaaatatgatgatctcagtcgaacgagtgattgaatatactgacctcgaaaaagaagccccatgggaatatcagaaaagaccacccccggcctggccacacgaaggggtgatcatcttcgataatgtcaatttcatgtatagccctggagggccattggtgttgaagcatctaaccgccttgatcaaatcacaggaaaaggtgggtatcgtgggccgaactggtgccggtaagagctccctgatcagcgccttgttccgtctgagcgaacctgagggcaaaatctggatcgataagatactgaccacagaaattggactgcacgatctgcgtaaaaagatgtcgattatcccccaggagcctgtcctctttacagggaccatgagaaagaatcttgaccctttcaatgaacacacagacgaggaactctggaacgcccttcaagaagtgcagcttaaggagactattgaagatctgcctggaaagatggatactgagctcgccgagagcggctctaatttttctgtcggccagcgacagctggtttgtttagctagagccatattgcgcaagaaccagatcctgattatcgacgaagccacagctaatgtggatccacggaccgatgagctgatccagaagaaaatccgggagaagttcgctcactgcaccgtgttgaccattgcacaccgcctgaacactatcatcgatagcgataaaattatggttctggatagtggtagacttaaggagtacgacgagccttatgttttactgcagaacaaagaatcgttgttctataaaatggtgcagcagctgggcaaagcagaggcagctgccctcactgagaccgccaagcaagtgtattttaagcgcaattacccgcacattggccacaccgatcatatggtgacaaacacctcgaacggacaaccaagcaccctgactatttttgagacagccttatag

SEQ ID NO: 180016 - DNA, 3837 bp, synthetic construct
  misc_feature 1..3837: note = Description of Artificial Sequence: Synthetic coding sequence
  source 1..3837: mol_type = other DNA
atgctgcccgtgtaccaggaggtgaagcccaaccccctgcaggacgccaacctatgcagcagggtgtttttctggtggctgaatcctctttttaagatcggccacaagaggcgcctggaagaagatgacatgtacagcgtgctgcctgaggaccgaagtcaacatttgggcgaagagctccaggggttctgggacaaggaggtgttacgagctgaaaacgacgcccagaagccctccctgactagggctatcattaagtgctactggaagtcgtatctcgtactgggcattttcaccctgattgaagagtctgccaaagtcatccagccaattttcctgggcaaaattattaactattttgagaactacgacccaatggatagcgtcgccctgaacacggcttatgcctatgctacagtactcacattttgcactcttatcttggccatactccatcacttatacttttaccacgttcagtgcgccggaatgaggctccgtgtagccatgtgtcacatgatctacagaaaggccctaagattaagcaatatggccatggggaagaccacaacaggtcagatcgtgaatctgctttcaaacgatgtgaataagtttgatcaggtcacagtgttcctccacttcctgtgggctggacctctccaggcaatcgcagtcacagcgttgttatggatggagatcggtatatcttgtctcgcgggaatggctgtgctgattattctcctccctctgcaaagttgctttggaaagctattttccagcctacgcagcaaaaccgccacattcaccgatgctcggatacggacaatgaacgaagtaatcactggtattcggattatcaagatgtatgcttgggaaaagagttttagtaacttgattactaacctcagaaaaaaggagataagcaagattcttagatcctcctgtctgaggggcatgaacctagccagcttcttttcagctagcaaaattatcgtatttgtaacctttactacatatgtactcctgggttccgtcattacagcatcacgtgttttcgtggcagtcaccctctacggggctgtccgacttacagtgaccctatttttcccgtctgcaattgagcgggtgagtgaagccatcgtcagcatccggcgaatccagacgttcctccttctggatgagatttcccagcgcaatagacagttacccagtgacggtaagaagatggttcacgttcaggacttcaccgccttttgggataaggcatcagaaacaccaactttacaggggctgagcttcacggtgcgccccggggagttgctggctgtggtgggaccagtgggcgccggcaagagcagcctactttccgccgtcctcggagaattggctccgagccatgggcttgtcagtgtccacggccgcattgcatatgtttcacagcagccttgggtgttctcgggcacgctccgctcgaacattttgttcggcaagaagtatgagaaagaaagatacgagaaggtcattaaagcgtgtgccctgaaaaaggatttacagctactcgaggacggtgatctaactgttattggagatcgaggaacgaccttgtcaggggggcagaaagcacgtgtaaaccttgccagagctgtgtaccaggatgcggatatatatctgctggacgacccactgtccgccgtggacgctgaagttagtcggcatttatttgagttgtgtatatgtcagattctgcacgaaaaaattactattctggttactcaccagctgcagtacctcaaggccgccagccaaatactcatcctgaaagatggcaaaatggtccaaaaggggacatataccgaattccttaagagtggtattgactttggcagtctgcttaagaaggataatgaagagagcgaacagcccccagtgcctggaacaccaaccctgcggaacaggaccttttctgagtcatccgtctggtcccagcaatcctcaagaccctcccttaaagacggagcgctagagtcacaggatgtggcctacgtgttacaagactggtggctgtcctattgggcaaacaaacagagcatgttgaatgtgaccgttaatgggggaggtaacgtaaccgaaaaactcgatctgaattggtacctgggcatctattctggtttgactgtcgcaacagttttattcggcatcgcccggtctttactagtgttctatgtgctggtgaatagctcacagaccctgcacaataagatgttcgagtccatattaaaagctccggtgctgttctttgacagaaaccccattggtcgcattctaaatcggttctccaaagacataggtcacctggacgacctgttgccactcacctttcttgactttatccagaccctactgcaggtggtcggggtagtctcggtagcggtcgcagtcatcccatggatcgccattcccttagtgccattaggcataattttcattttcttgaggcgatactttctcgaaacaagcagagacgtaaaacgactcgagagtactacgaggtccccagtattttcacacttgagctcctcattgcaagggctgtggactatccgtgcctataaagcggaagaacgctgccaggagctgttcgatgctcaccaggacctccattcggaggcctggtttctgttcctcacgacctccaggtggttcgccgtccggctggacgccatttgcgcgatgtttgtgatcatcgttgcctttggcagtctcattctcgccaaaacgctcgatgcggggcaggttgggctcgctctatcatacgccctgaccctcatgggcatgttccagtggtgcgtgagacagagtgctgaggtggaaaacatgatgatcagcgttgagcgcgtaatcgagtacacagatttggagaaagaagctccctgggaatatcagaagcgaccccctcccgcatggccccatgagggagtcatcatctttgacaacgtcaatttcatgtattcccccgggggacccctcgtgcttaagcatcttactgcgctaatcaagtctcaagagaaagtgggaattgtcggaaggaccggcgccggaaagtcaagcctgatttccgcactctttcgtctgtccgagccggaaggtaagatctggatcgacaaaatcttgacgacagagattggactacacgatctgcgaaagaagatgagcattattccgcaggagccagttctgttcaccggaaccatgcggaaaaacctagacccattcaatgagcacactgatgaagagctgtggaatgctctgcaagaagtgcagcttaaggagaccatcgaagaccttcccggaaagatggatacagagctagccgaatccggttctaacttctcagtcgggcagcgacagctcgtgtgtctcgctagagccattttgagaaaaaaccagatcttaattattgacgaggccacagcaaacgtggatcctaggacagatgaattaatccagaagaagatccgggagaagtttgctcactgcacggttctcaccatcgcccacaggctcaacacaattatcgactccgacaagatcatggtacttgactctgggagactgaaggaatatgacgaaccctatgtgctcctgcagaacaaggagagcctgttttataaaatggtgcagcagttagggaaggctgaagccgcagcattaacggagaccgccaaacaggtgtattttaaacggaattaccctcacattggccatactgaccatatggtgacaaacacgagtaatggccagccttccacactgaccatcttcgaaacagctctgtag

SEQ ID NO: 180017 - DNA, 2580 bp, synthetic construct
  misc_feature 1..2580: note = Description of Artificial Sequence: Synthetic coding sequence
  source 1..2580: mol_type = other DNA
atgctgcccgtgtaccaggaggtgaagcccaaccccctgcaggacgcaaatctgtgtagtcgcgtctttttttggtggctgaaccccctattcaaaataggtcacaaacgccgtctggaggaagatgacatgtacagtgtcctgcctgaggaccgctctcagcatcttggggaggaactccagggattctgggacaaggaagtgctgagggcagaaaacgacgcgcagaaacctagtctgacccgcgcaataattaaatgttattggaagagctatctggtgttagggatttttactttgattgaggagtccgccaaggttatccaaccaatttttctcggcaaaatcattaattacttcgagaactatgatccaatggactcagtcgctctcaacacagcctatgcatatgcaactgttttaaccttctgcaccctgatcttagctatcctacatcatctttatttctatcacgtccagtgcgcaggcatgcgactcagggtggcgatgtgccacatgatctatagaaaggcattgcgcttgtcgaatatggctatgggcaaaaccacaaccggacaaattgtgaaccttctgtccaatgatgtgaataagtttgaccaggtgaccgtttttctgcattttctgtgggccggccccctgcaggctatcgccgttacggcgctgctgtggatggagatagggatcagctgcctagccggcatggcagtactgattatcttgctccccttgcagtcctgttttggaaaactgttttccagcctacggagcaaaactgccacctttactgatgcgagaatccgcacaatgaacgaagtgatcaccggcattcgaattataaaaatgtatgcgtgggagaagtcattcagcaatctcatcactaatctaagaaaaaaggaaattagtaagatactccggtcttcttgcctgagaggtatgaaccttgcgagcttctttagtgcttcgaagatcatcgtgtttgtcacctttactacctatgtgttgctcggaagcgttatcacagcatctagagttttcgtcgccgtgaccctgtatggggcagttaggttgacagtcacactgttctttccctcagccatcgagagggtgagcgaggccatcgtctctattcggagaatacagacatttcttcttctcgatgaaatttcacaaaggaacaggcagctgccgagcgacggcaagaaaatggtccatgtgcaggactttaccgctttctgggacaaggccagcgagaccccgacacttcagggactcagtttcactgtccgccctggagaacttctagcagtggttggccctgtgggagcaggtaagagttccctgctgtctgctgtactgggagagctggctccatctcatggcctggtatccgtgcacgggagaatcgcgtacgtcagccagcagccttgggtgtttagtggtacactacgttcgaacattctcttcggcaagaagtacgaaaaggaacgctacgagaaggtgataaaggcttgtgcactcaagaaggatttgcaactcttagaagatggcgacctgactgtgattggcgatcgcggcaccaccctgtccgggggacagaaagccagagtgaacctggcgagggctgtctaccaggatgcagatatctatctcctggacgatccactatccgccgtggatgcagaagtctcacgtcacttgtttgaactctgcatttgccaaattcttcatgagaagattaccatcctggtgacgcaccagctgcagtacctgaaggcggcctcccagatcttgattctgaaggatggaaagatggtgcagaagggcacttatactgagtttctaaaaagcggtatcgacttcggcagccttctgaaaaaggacaatgaggagagtgagcagcccccggtcccaggtacacccacacttcgcaacagaacattctccgaatctagtgtttggagccagcagtctagccggccctctctgaaggacggcgcattggagtcccaggataccgagaacgtccccgtgaccttgtctgaggagaacagaagtgaaggcaaggtcggtttccaggcgtacaaaaattattttagggccggcgctcactggatagtctttatcttcctgatattgctgaatactgcagcacaagtcgcctatgttctgcaagattggtggcttagctattgggctaataagcagtcaatgttgaatgtgaccgttaacggaggagggaatgtcacagagaagcttgacttgaattggtatctgggcatatacagtggcctgactgtggcaacagtgcttttcggcatcgcacgcagcctgcttgtattttacgtcctggtaaattccagtcagaccttgcataataaaatgttcgaatctatcttgaaggcgcccgtcctgttttttgatagaaatcctattgggcgaattcttaaccgcttcagcaaggatattggccacctggatgatctgctcccattgaccttcctggactttatccagagatgggacctcgcagtgctctcctggctggtttcgaattcttag

SEQ ID NO: 180018 - DNA, 2355 bp, synthetic construct
  misc_feature 1..2355: note = Description of Artificial Sequence: Synthetic coding sequence
  source 1..2355: mol_type = other DNA
atgctgcccgtgtaccaggaggtgaagcccaaccccctgcaggacgctaatctgtgctcccgggtgttcttctggtggctgaacccactgtttaaaattggccataagcggcgcctggaggaggacgacatgtatagtgttctacctgaggatagaagccagcatttaggcgaggaactgcaaggattttgggataaggaggttctgcgcgctgaaaatgacgcgcagaaaccctcactcacacgggccatcatcaagtgttattggaagtcatatctcgtccttggcatttttacacttatagaagccttgagactgagcaatatggctatgggaaagacaacgacaggacagatcgtgaatctcctctctaacgatgtcaataaatttgaccaggttacagtctttctgcacttcctttgggctgggccactccaggcaattgcagtgacagctctgttgtggatggagatcgggatatcatgcctggccggcatggccgtcctgattattctcctgcccctgcaatcatgtttcgggaaactgtttagctctctaagatcaaaaaccgcaaccttcaccgacgccagaattcggactatgaacgaagtgatcaccggtatcagaatcattaagatgtatgcatgggaaaagtccttctccaacttgatcaccaatctgaggaagaaggagatcagtaaaattctgcggtcttcttgtttgcgagggatgaatcttgccagttttttctctgcctccaagatcattgtcttcgtaacgttcacgacatacgttttgctcggaagcgtgatcacggcctcgagagttttcgtggccgtgactctgtacggcgctgtgcgccttaccgtcaccctcttctttccatccgcgatagagcgcgtgtctgaagccatcgtgagcatcagaagaatacagactttcttgctcctcgatgaaatctcccaacgcaatagacagctgccttctgatggcaagaagatggtgcacgtccaggactttactgcattttgggataaagcctccgaaacacccacactgcagggcctgagcttcaccgttcgacctggcgagcttctggccgttgtgggtcccgttggcgccgggaagagctcgctgctctcagctgtgctcggagagctggcaccaagtcatggattggtttctgtgcacggacgcattgcatacgtgtcacagcagccatgggtcttctctggtacactccgcagcaacatcctcttcggaaagaaatatgagaaggagaggtacgagaaagtcatcaaggcttgtgcgttaaagaaggatctgcaacttctcgaagacggcgatctgactgtgatcggtgacagaggcaccactttgtccgggggccagaaggcccgtgtgaacctggcaagagccgtctaccaagacgccgatatttacctcctggatgatccactatcagccgtagacgcagaagtctcaaggcacttgttcgagctgtgcatctgtcagattttgcacgagaaaattacaattctagtcactcaccagctacagtatctcaaggcagcgtcacagattctgatcctgaaggatgggaagatggtacagaaggggacttacaccgagttcctgaaaagtggcatcgatttcggatccctgctaaagaaggataatgaagagtctgagcaaccaccagtgccggggacccccacactcagaaaccgcaccttctctgagagcagcgtttggtcacagcagtcctctcgcccaagcctgaaggatggggcactggagtcacaggacactgaaaacgtgcctgtgactctgtccgaggagaacaggtcagagggtaaggtgggattccaggcctataagaattattttcgagccggggcgcactggattgtgttcatctttttaatcttgttgaatacagctgctcaggtagcctacgtgctgcaggactggtggctcagctactgggccaacaagcagtctatgcttaacgtgaccgtcaatggaggggggaacgtcaccgaaaaactcgacctaaactggtatctgggtatctattccggactgacggtcgccactgttttgtttggcattgcccggagtttgctggttttctatgtccttgtgaatagctcacagacgttgcacaacaagatgttcgaaagcatcctgaaggcgccagtccttttcttcgatcgtaaccccatcgggcgaatcctgaaccgcttctctaaagatatcgggcaccttgatgacctgctgccattaacgttcctcgattttatacagagatgggacctggccgtgctcagctggcttgtgtcaaattcatag

SEQ ID NO: 180019 - DNA, 75 bp, synthetic construct
  misc_feature 1..75: note = Description of Artificial Sequence: Synthetic coding sequence
  source 1..75: mol_type = other DNA
atgctgcccgtgtaccaggaggtgaagcccaaccccctgcaggacgctaacttatgtagccgagtgttcttctag

SEQ ID NO: 180020 - DNA, 4185 bp, synthetic construct
  misc_feature 1..4185: note = Description of Artificial Sequence: Synthetic coding sequence
  source 1..4185: mol_type = other DNA
atgaaggacatcgacatcggcaaggagtacatcatccccagccccggatacagatcagtgagagagcgtacttccaccagtggcacccaccgggaccgcgaggattcaaagtttcgccgcacaaggccgctcgaatgccaggacgctctagaaacagcagcacgcgccgaggggctatccctcgacgcatcaatgcacagccagctccgaattctggacgaggaacatcccaagggaaaataccaccacggccttagtgcccttaagcccatccgcacgacttctaaacatcagcaccccgtggacaatgctgggttgttcagttgtatgacctttagctggcttagctctctggcaagggttgcacacaagaagggcgaactgtctatggaagatgtttggtctctgtcgaagcacgagtctagtgacgtgaactgcaggcgactggaaaggctgtggcaggaggagctaaacgaagttggcccagacgccgcctctctgcgacgagtggtgtggatattttgtcgtactagacttattttgtcaatagtttgtctcatgataacgcagctggctgggttcagcggtcctgctttcatggttaagcacctgctggaatatacccaggctaccgagagcaatctgcagtactccttgttgctggtgctgggtctgctgttgacagaaattgtgcggtcgtggagcctcgccctgacctgggcccttaactatcggacgggcgtgcggcttagaggcgcgatactaaccatggccttcaagaaaattctgaaacttaaaaatataaaagagaagtcactaggtgagctaatcaatatttgtagcaatgatggccagaggatgtttgaggcagccgccgtcggctcactgctagctggggggccagtggtggctatactcggtatgatttacaacgtgattatattgggtcctactgggtttctcgggtctgccgtgttcatattgttctaccccgctatgatgttcgcctcccgactgacagcctactttaggcgtaaatgtgtagccgccactgacgaacgcgttcagaaaatgaatgaggtactgacatacatcaaattcattaaaatgtacgcctgggtgaaggcattctcacagagcgtccagaaaatccgcgaagaagaaaggcgcatcctggagaaggctggctacttccaatccattaccgtgggtgtggccccgatagtggtcgtaatcgctagcgtggtcaccttttccgtgcatatgacgctcggttttgatctcaccgccgcccaagccttcactgtggtgaccgtttttaatagcatgacatttgcgctgaaggtcaccccattctctgtgaaatctttaagcgaagcctcagttgctgtggacaggtttaagagcctattcttgatggaagaggtgcacatgatcaagaacaagcccgctagcccacatattaaaattgagatgaagaacgctactttggcctgggatagctctcactcatccattcagaacagccctaagctgacacctaagatgaagaaggataagcgcgccagcaggggcaagaaagagaaagtaagacaactccaacgcacagagcaccaggcggtgctggcggagcagaaaggccatctgctgctggattcggatgagcggcctagtcccgaggaggaggagggtaagcacattcacctcggccatctgcgcttacagcgtaccctgcactcaatcgatctggagatacaagaaggtaaactggtaggtatctgcgggtctgttggctctggcaagacctccctaatcagtgctattctggggcagatgacgctgctcgaaggttcaatcgcaattagcggaacattcgcatacgtggcacagcaggcttggattctgaacgccacattgcgcgacaatattttgttcggcaaagaatacgacgaggagcggtacaactcggtactaaattcctgctgcctccgtcccgacctggccattctgccttccagcgacctgaccgagataggggagaggggggccaatctttctggaggacagcgccagaggataagccttgctcgggcactgtatagtgatcgctctatctacatcctcgatgatcccttaagtgctctggatgcacacgtcggtaaccatattttcaacagcgccataagaaaacatttgaagtccaagacggtgcttttcgttacacatcaattacaatacctggtggactgtgacgaggtgatcttcatgaaggaggggtgtattacagaacgaggtacccacgaggaactgatgaacctgaacggcgactacgctacaatatttaataacctgctcctcggggagacacctcccgtcgaaataaattcaaaaaaagaaacctctgggagccagaagaagtcccaagacaaagggcctaagactgggagcgtgaagaaagagaaagccgtgaaaccagaagagggacaacttgttcagttagaggaaaaaggacaaggaagcgtgccatggagtgtgtatggagtctacatccaggcagcagggggcccactggccttcctggtcatcatggcccttttcatgcttaatgtgggctcgacggcattttccacgtggtggctttcatattggatcaagcagggcagtggcaatacgaccgtaacccggggaaacgaaacttccgtgagtgactctatgaaagacaacccacatatgcagtactatgccagtatttatgccctgtccatggccgttatgctgatccttaaagcaatccgtggagtggtgtttgtaaagggcacgcttagagcaagctctcgattgcacgacgaactgttccgtagaatattacgaagtcctatgaagtttttcgatactactccaacaggcagaatcctcaataggttcagcaaagatatggatgaagtggacgtgcgtctgccgttccaagcggaaatgttcatacagaatgtgatcctcgtgttcttctgcgtgggaatgatcgcaggggtattcccttggttcctggtggccgtgggaccgctagtgatcctgttttccgtgttgcacattgtgtcaagataccaggaactgctggatgataatcaggcgccattttttctgttcacctgcgccatgcgctggttggccgtgcggctcgacttgattagcatcgccctgattactacgactggcctgatgattgtgttaatgcacggccagatcccccctgcatatgcggggctggccatctcctatgcagttcagttaacaggactgtttcaatttaccgtgaggctggcctccgagacagaggctcgtttcactagcgtggaacgtatcaatcactatattaagacacttagcctggaggcacccgcaagaattaaaaataaagctccgtcccccgattggccccaggagggcgaggtcacatttgaaaatgcggaaatgagatatagggaaaatctccctctggtgctgaagaaggtgagctttaccatcaagccaaaagagaagattggaattgtgggcaggacagggagcggaaaatcatccctgggcatggccttgtttaggctggtggaactgtcgggcggatgtatcaaaatcgacggcgtgagaatctcagacattggtcttgccgatttacgatccaagctttccatcattccccaggaacccgtgttattttccggaaccgtcagaagcaatttggatcctttcaaccagtacacagaggaccaaatctgggacgctttagagcgaacacacatgaaggaatgcatcgcacaactgcccctgaaactcgaatctgaggtgatggagaacggggataatttcagcgtcggtgagaggcagttgttgtgtatcgctagggcactgcttaggcactgcaagatcctgatcttggatgaggctacagccgccatggataccgaaacagatctgctgattcaggagaccatcagagaggccttcgccgactgtactatgctgaccattgcacataggttgcacaccgtgctgggctccgaccgcatcatggtactggctcagggccaagtcgtagagttcgacaccccatccgtactgctctctaatgatagctcacggttttacgccatgttcgcagccgccgagaacaaggtggccgtcaaaggatag

SEQ ID NO: 180021 - DNA, 4314 bp, synthetic construct
  misc_feature 1..4314: note = Description of Artificial Sequence: Synthetic coding sequence
  source 1..4314: mol_type = other DNA
atgaaggacatcgacatcggcaaggagtacatcatccccagccccggctacaggtccgtacgggagaggacttctacttctggaacccaccgggacagggaggacagcaaatttcgccggactaggccccttgagtgccaagacgccctcgagacggcggcccgggcagaggggcttagtcttgacgcttccatgcacagccagttgcgcattctcgatgaagagcaccctaagggtaagtaccaccatggattgagtgcgcttaaacccatccgcaccacctcaaaacaccagcatccagtggataacgccggtctcttttcatgcatgacatttagttggttgtcatctctagccagggtggcccacaagaagggcgaactgagcatggaggacgtgtggagcctcagcaaacacgagtcaagtgacgtgaattgtagacgcctcgagcggctgtggcaagaagaacttaacgaggttggccctgatgccgccagccttaggagagtggtttggattttctgcagaacgagactgatcctgagtattgtgtgtttgatgatcacgcagttagctggtttctcgggtcccgcattcatggtgaagcacctgctggaatacacccaagctactgagagcaacttacaatacagcctgttgctggtgctgggacttcttcttacagagattgttaggtcctggtcacttgccctaacatgggcattgaactacaggactggcgtccgactgcgaggagccatcctcaccatggccttcaaaaagattctcaagctcaaaaacatcaaagagaagagcctgggcgagttaattaatatctgtagcaatgatggccagcggatgttcgaggctgccgcggtaggctctttactcgcggggggaccagtggttgctatcctgggcatgatttacaacgtgatcattctgggcccaaccggctttcttggctcagccgttttcattctgttctatccagccatgatgtttgcatcacggttgactgcctatttccgccggaagtgtgtcgcagccacggacgaaagagtccaaaagatgaacgaagtgttgacatatataaagttcatcaagatgtatgcatgggtaaaagctttctcacagtcggtgcaaaagatccgagaggaggaaaggcggatcctggagaaggccggctatttccagtcaataacagttggggtggccccgatcgtggtcgtgatcgcttctgtcgtgacttttagcgtgcacatgacgctagggtttgatcttacagccgctcaggctttcacagtcgtgacagtgtttaacagcatgacctttgctctcaaagttacgcctttttccgtgaagtcattgtctgaagcgtccgttgccgtggatcggtttaaatctttgtttctcatggaggaggtgcatatgatcaagaacaaacccgcctcccctcatattaagatcgagatgaaaaatgctaccctggcctgggacagttcacatagctcaattcaaaattctccaaaactgacacccaaaatgaagaaggacaaaagggcttcccgtggaaagaaggaaaaggtccgccagctgcagaggactgaacatcaggcggtccttgccgaacaaaaaggccacctcctcctggacagcgatgaacgcccgtctcccgaggaagaagaagggaaacatatccacctaggacatttgcgcctccaacgcacccttcatagcattgatctcgaaatccaagaagggaaactggtgggtatatgcgggtctgtgggatccggaaagacgtcgctcatctccgcaattctagggcaaatgactctactggagggtagtatagcaattagcggaacttttgcttatgtggcccagcaggcttggattctgaacgccacacttagagataacattctgtttggcaaagagtatgacgaagagcggtacaactctgtgctgaactcgtgctgtctaagaccggatctcgccatcctcccctcatctgacttgacagagattggggagcgcggtgccaatctcagcggaggccagaggcaaaggatctcgcttgcccgtgcactgtattccgacaggagcatctatatccttgatgaccccctcagtgctctggacgcccatgtgggtaatcacatctttaactcggccatcagaaaacaccttaaatctaaaacagtcctctttgtgactcaccagcttcagtatttggtcgactgtgatgaggtgatcttcatgaaagagggctgcataacagagagaggaacccatgaggagctgatgaatctgaatggcgactatgctacgatcttcaacaatctgctcttaggtgagacaccgcccgtcgaaatcaacagcaagaaggagaccagcgggtcccagaaaaagtcacaggataagggacccaagaccggatctgtcaaaaaggagaaggcggtaaaacccgaagaagggcagctggtgcagctggaggagaaaggacagggcagtgtgccctggtctgtgtatggcgtgtacatccaggctgctggcggtccactcgcctttttagtaattatggctctgtttatgctgaatgtagggagtacagcatttagtacctggtggctgagttactggattaaacagggttcaggtaacactaccgtcactagaggcaacgaaacatcagtgtccgacagcatgaaggataacccgcatatgcaatattacgctagcatctatgccctgtcgatggctgtcatgctcatccttaaggctatccgaggggtggtgtttgtcaagggaaccctgagggccagttcaaggctgcacgatgaactctttaggaggattttgcgttccccaatgaaattctttgatactacacccaccggacgcattcttaaccggtttagcaaggacatggacgaagtcgacgtgcgactcccgtttcaggccgaaatgttcatccagaatgtgatcctcgtgttcttttgtgttgggatgattgcgggagtgttcccctggttcctagtggccgtgggccctctggtcatcctgtttagcgttcttcacattgtctctagggttctgattcgcgagcttaagcgcttggataatataacgcaatcaccatttttgtctcatatcacgagcagtattcagggtcttgctaccattcacgcctacaacaagggtcaggagttcttgcacaggtaccaggaactcttggacgacaaccaggcaccattcttcctgtttacttgtgccatgagatggctcgctgttaggctcgaccttatctcgattgcactcattactaccacagggctcatgatagtgctgatgcatggacagatcccacccgcgtatgccggacttgcaatttcatatgcggttcagctgaccggactgtttcagtttacagttcggctcgccagtgagactgaggccaggtttaccagcgtcgagcgaattaaccactacattaagacactgagcctggaggctccagcgcggattaagaacaaagctcccagccccgactggcctcaggagggagaagtgacctttgagaacgccgaaatgaggtaccgcgagaatttaccactagtgctcaagaaagtgtcatttactatcaaacccaaggagaaaattggaattgtcggacgaaccggatctgggaagtcaagccttgggatggccctgttcagactcgtagagctatccggcgggtgtattaagattgatggagtccgaatttccgatataggcctcgctgatcttaggtccaagctatcaatcatcccccaagagcctgtgctttttagcggtacagtgaggagcaacttagacccattcaaccagtacaccgaggatcagatttgggacgccttggagcggacccatatgaaggagtgcattgcccagctgcctctaaagctggaatcagaggtaatggaaaatggcgataacttttctgtgggtgagcgccagttgttgtgcattgctcgggccctccttaggcattgcaagatccttatcttggacgaggcgaccgctgctatggacaccgagacagacctgctaattcaggaaacgatccgggaagcgtttgctgactgcaccatgctgaccatcgcacacagattacacacagttctcggcagtgaccgcatcatggtgttggcccaaggtcaggtggtcgaattcgatacaccttccgtacttttgtccaatgacagctcccgattttatgctatgtttgccgcggccgaaaataaagtcgcagttaaagggtag

SEQ ID NO: 180022 - DNA, 627 bp, synthetic construct
  misc_feature 1..627: note = Description of Artificial Sequence: Synthetic coding sequence
  source 1..627: mol_type = other DNA
atgaaggacatcgacatcggcaaggagtacatcatccccagccccggctacaggagcgttagagagcgaacctctacgagtggcacccatcgcgaccgcgaagattccaagtttcggcggacacggcccctcgaatgtcaggacgctctggaaaccgcagctcgggccgagggcttgagtttggacgcctcaatgcatagccagctgagaatcttagatgaggaacatcccaaaggcaaataccaccacggtttaagcgccctcaagccaatcaggacaacgtctaaacaccagcacccagttgacaacgccggcctcttctcttgtatgactttcagttggctgagctccctcgcccgtgttgcacataagaaaggtgaactgtctatggaggacgtgtggtccctatcgaaacacgaaagttcagatgtaaactgccgcaggctggagcggctctggcaggaagagcttaatgaggtcgggcccgacgccgccagcttaaggagagtcgtttggattttttgcaggacaaggcttattttatcaattgtgtgtcttatgataactcagctggcaggattctccggccctaatttccaagacggatgtatcctccgctccgagtag

SEQ ID NO: 180023 - DNA, 2511 bp, synthetic construct
  misc_feature 1..2511: note = Description of Artificial Sequence: Synthetic coding sequence
  source 1..2511: mol_type = other DNA
atgcacagccagctgcggatcctggacgaggagcaccccaagggcaaatatcatcacggcctgtctgccctaaagcccattcgcaccacaagcaagcatcaacatccggttgacaacgctggactgttcagctgcatgacattttcttggctcagtagccttgcccgggtggcccataagaaaggggagctcagcatggaggacgtctggagtctttccaagcacgagagttccgacgtgaactgtcgacgcttggagagactgtggcaggaggaactgaatgaagttggaccggacgcggcatcgctgaggcgggtcgtgtggatcttttgcagaacacgactcatactgagtatcgtgtgtctaatgatcactcagctggctggatttagcggacccgcgttcatggtgaagcatctcctggagtatacccaggccactgaaagcaatctgcagtactctcttcttcttgtgctaggtctgttgctgactgaaattgtgaggtcctggtcccttgcactgacctgggcgctgaactaccgtactggggtgcgactaagaggcgctatcttaacaatggcatttaagaaaatacttaagcttaaaaatattaaggagaagagcctgggtgagctcattaatatatgttccaatgacggccagaggatgttcgaggctgcggccgttggctctctcctggccggaggaccagtggtggcaatcctgggaatgatctataatgttataatcctcggtcccactggatttctgggatcagccgttttcattctgttctaccctgccatgatgtttgcatctagactcaccgcttacttccggcggaaatgcgttgcagcaacagatgagcgggtgcaaaagatgaatgaggtcctcacatacattaagttcattaagatgtacgcttgggtgaaggccttctctcagtctgtgcagaagattagggaggaagagcgtagaattctggaaaaggccggctactttcagtcaattacagtaggggtggccccaatcgtggtcgttatcgcgtccgtggttaccttttctgtccacatgacattgggattcgacctcactgcagcacaggctttcactgtcgtcactgtcttcaactctatgacattcgcgctcaaggtgactccattctcagtcaagtcattgtcagaggcatcggtggctgttgataggttcaaatctttgtttctgatggaagaggttcacatgatcaagaacaagcctgcttccccacacattaagattgaaatgaagaatgctactctcgcttgggacagctcacactctagtatccaaaattcacccaaacttactcctaaaatgaagaaagacaagcgtgcgtccagaggcaagaaagaaaaggtgcggcagctgcaacgaactgagcaccaggccgtgctggccgaacagaaaggacatctgctgctggacagcgacgaacggccttcacccgaagaagaggagggcaaacatatacatctgggtcacctccggttacagcggacactgcacagcatcgatctcgagattcaggagggaaagcttgtgggaatttgtggaagtgtggggagcggaaaaacttccttgatttctgccatcttggggcagatgacgctccttgagggcagcatcgcgatcagtggcaccttcgcctacgtcgcccaacaggcctggatactgaatgcgactttacgtgataacatcctgtttggcaaggaatatgatgaagaacggtataatagcgtgctcaatagttgttgcttgaggcctgacctcgctatcctgccttcctcggacctgacagagatcggagagcggggcgcaaacctgtcaggtggtcagagacagcgcatctcgctggccagggcactgtatagtgatcgttcaatttacattttggacgatccactgtcggccttagacgctcatgttggaaaccatatcttcaacagcgccataaggaagcatctgaaatccaagactgtgttattcgtcacccaccagctacagtacctggtagactgtgacgaagtcatttttatgaaagaaggctgcatcacagagcgaggaactcatgaggagctgatgaatctcaatggtgactatgcgacaatcttcaataacctgctgttgggagagactcctccggtcgagattaattccaaaaaagagacatctgggtctcaaaaaaagagtcaagataagggaccaaagactggaagtgtgaagaaagagaaggccgtcaagccggaggaggggcagctggtccagctggaagagaaagggcagggatctgtgccttggagtgtgtatggccaccccggctgctggggcccgttgggcattccaggttattacggtccctttcatgccgagtgtaggcagcaccggctccagcatctagtcgtcgagctcctggatcaagccaggaaacgcgaacaccactgcgattctcgggagcgggacctcggggaatag

SEQ ID NO: 180024 - DNA, 678 bp, synthetic construct
  misc_feature 1..678: note = Description of Artificial Sequence: Synthetic coding sequence
  source 1..678: mol_type = other DNA
atgaaggacatcgacatcggcaaggagtacatcatccccagccccggatataggtctgtgcgcgagcgaacatcgacgtccggaacacacagagatagggaagattccaagtttagacggacaagaccactcgagtgtcaggatgctttggagacagccgctcgggctgaaggcctgagcctggacgcgtctatgcatagccagctgaggatcctggacgaggaacatcccaagggcaaatatcatcatgggttgtctgccttgaagcccattaggaccacatcaaagcaccagcacccagttgacaacgccggtctcttcagctgcatgaccttcagctggcttagctctctggcccgggtagctcataaaaaaggagaactgtcaatggaggacgtttggagtctgagcaaacacgaaagcagcgatgtcaactgtagacggttggaacgattgtggcaagaagagcttaatgaggtgggacctgacgccgcatctctgaggcgcgtcgtctggattttctgtagaacccgactgattttatctatcgtctgcctgatgataacacagctcgccgggttctccggtcctccatcattcggtgactgctccattagcgccgaagtatgcggcaaccggttgcattgtacagctatccttctctcttgtttcacctag

SEQ ID NO: 180025 - DNA, 696 bp, synthetic construct
  misc_feature 1..696: note = Description of Artificial Sequence: Synthetic coding sequence
  source 1..696: mol_type = other DNA
atgaaggacatcgacatcggcaaggagtacatcatccccagccccgggtatcgcagcgtgcgcgaacgaacttcaactagcggcacacaccgtgaccgggaggacagcaagtttcgtagaactcggccactcgaatgccaggacgctctggaaacagccgcccgtgccgagggactttccctggacgcgtctatgcattcccaactgcgaattctcgatgaggagcatcctaagggaaagtaccaccacggcctgagcgccttaaagcctatccggaccacctccaaacaccagcaccccgtcgacaatgcgggattgttttcttgtatgacttttagttggctgagctctctggcaagagtggcacacaagaagggtgaactctctatggaagatgtctggtctctctcaaaacatgagagtagtgacgtcaattgtcgccgcttggagagattgtggcaggaggagctgaatgaagtggggcccgacgccgcctcactgcgcagagtggtgtggattttctgccgaacaagactgatactgagtatagtgtgcttgatgattacccagctcgcaggtttttcaggcccagtcagtagtaaccacccgttccgacagtcgccgggagcccgcccacgaccggcacttacccttctgttttgttgcagagggtgcgcccagctgtgggctagatag

SEQ ID NO: 180026 - DNA, 444 bp, synthetic construct
  misc_feature 1..444: note = Description of Artificial Sequence: Synthetic coding sequence
  source 1..444: mol_type = other DNA
atgaaggacatcgacatcggcaaggagtacatcatccccagccccggttaccgcagtgttagggagcgcacttccacctctggcacccatcgcgaccgagaagacagtaaatttagacgtacgcggccactggagtgccaagatgccctcgagactgccgccagggcggaggggttgagcctcgatgcctcaatgcatagtcagctccgtattttggacgaggagcatcccaaaggaaagtaccaccacggacttagcgctctgaagcccattcggaccacctccaagcaccagcacccggtggataacgccggtttgttcagttgcatgacctttagttggctcagttctttagcacgcgtggctcataaaaaaggagagttgtctatggaggatgtctggtctttgagcaaacatgaatccagcgatgtcaactgtaggtag

SEQ ID NO: 180027 - DNA, 639 bp, synthetic construct
  misc_feature 1..639: note = Description of Artificial Sequence: Synthetic coding sequence
  source 1..639: mol_type = other DNA
atgaaggacatcgacatcggcaaggagtacatcatccccagccccgggtacagaagcgttcgagagcggacctccactagcggtacacatcgagatcgcgaagacagtaaatttcgccgcacacgtcctctcgaatgtcaagacgctctcgagacagccgctcgtgccgaaggcctgtcactggacgcgagcatgcattcccagctaaggattctggatgaagaacaccccaagggtaagtaccatcacgggttgtctgcactgaaacccattagaacaacatcaaaacaccagcatccggtggataatgcagggctgttttcatgcatgacattttcatggctctcttctctcgcacgcgtggcgcacaaaaagggcgagttgtctatggaggatgtgtggtccctcagcaaacatgaatcttctgacgtcaattgtcgtcgcctggaaaggttatggcaggaagaactgaacgaggttggccccgacgctgcaagcctccgtagagtggtgtggattttttgtcgtactcgcctgatattgagtatcgtgtgcctgatgattacccagctagccggatttagcgggcccctggcatggtgttgtcaggacctggatctgggcggagtgtcactttag

SEQ ID NO: 180028 - DNA, 1530 bp, synthetic construct
  misc_feature 1..1530: note = Description of Artificial Sequence: Synthetic coding sequence
  source 1..1530: mol_type = other DNA
atgcagagctggagccgggtgtactgcagcctggccaagcggggccactttaatcgaatttcccatggtttgcaaggtttgtccgccgtaccgctgagaacctatgcagatcagccaatcgacgctgacgtgacagtgatcggctccgggccaggaggctacgtagcagccatcaaggccgctcaactcggttttaagacagtgtgcatagaaaagaacgaaacgcttggcgggacttgtctgaacgtaggctgtatccctagcaaagcgcttctgaacaatagccactactatcatatggcacatggaaaagattttgcttcccgaggaatcgaaatgtccgaagttcggctgaacctcgacaagatgatggaacagaagagcacagccgtgaaagcacttactggcggcattgcacatctgttcaaacagaacaaggttgttcatgttaacggctacggaaaaatcactggcaagaatcaggttaccgccacaaaagcagatggcggtacccaggttatagacactaaaaatattctaatagcaaccggttccgaggttacacctttccccgggatcaccattgatgaagatactatcgtaagttccaccggtgcactctccctgaagaaggtccctgagaaaatggttgttataggggcaggggtgatcggagtcgagctaggctcagtctggcaacgccttggggccgacgtaaccgctgtggaatttctagggcacgtgggtggagtaggcattgatatggaaatttctaaaaacttccagaggatcttgcaaaaacaaggatttaagttcaaactcaacacaaaggttaccggagctaccaagaaaagtgacgggaaaatcgatgtaagcatcgaagcagcctctggcggaaaggccgaggtaataacttgcgatgtcctgcttgtctgtattggccgcagaccctttacaaagaaccttgggctcgaagagctgggaatagaactggatccacgcgggagaattccagtcaacacccgctttcagactaagattcccaacatttacgccatcggggatgttgtggctggtccaatgctcgctcataaagcagaagatgaaggtatcatctgcgtggagggaatggctgggggggccgtccacatagactataactgtgtaccctcggtgatatatacccatcccgaggtcgcgtgggtaggaaaaagcgaggaacagctgaaggaggaaggaattgagtataaggtcggcaagtttccattcgccgccaactcacgtgccaagactaacgccgacaccgatgggatggttaagattctgggccagaaaagtaccgatagggtgctgggcgctcatatcctaggtcccggtgccggcgagatggtgaatgaggccgcattagccctggagtacggtgcgagttgcgaagacattgcgagagtatgccatgcacatccaacgctgtccgaggccttccgcgaggcgaacctggctgcttcttttggtaagtctatcaatttctag

SEQ ID NO: 180029 - DNA, 4512 bp, synthetic construct
  misc_feature 1..4512: note = Description of Artificial Sequence: Synthetic coding sequence
  source 1..4512: mol_type = other DNA
atggccgcccccgccgagccctgcgccggccagggcgtgtggaaccagacggaaccagagccagcggccacatcacttctatccttgtgctttctgcgaaccgctggagtttgggtgccacctatgtacctttgggtcctcgggcctatttacctcttgttcatacaccaccatgggagaggctacctgaggatgtccccactatttaaagccaaaatggtgctggggttcgctctgatcgtgctctgtacatcttctgtggcagttgctctgtggaaaatccagcagggaactccagaggcaccggagtttctgatacatcccaccgtttggctaacaacaatgagctttgccgtcttcttgattcacaccgaacggaaaaagggagtgcagagtagtggtgtcttattcgggtactggttgctgtgcttcgtgctgcccgctacgaacgccgctcagcaggccagtggagcaggctttcagtccgatccggtaaggcacctgtcgacttatctgtgcttgagtctagtagtcgcccaatttgtcctgtcttgcctagctgatcagccaccgtttttcccagaagaccctcagcagtcaaacccttgcccggaaacgggcgcggcctttccctcaaaagctaccttctggtgggtttcggggttggtgtggagaggatatcgccgaccactgagacctaaggatttgtggtctctcggaagagaaaattcctctgaagagctggtaagcaggctagaaaaagagtggatgaggaacaggagcgccgcccggcggcacaacaaggcaatcgccttcaagagaaaaggcggcagcggaatgaaagctcctgagactgaaccttttctgaggcaggaaggaagccaatggcgtcctttgctgaaggccatatggcaagtgttccactccactttccttttgggcaccctgtccctgattattagtgatgttttccggtttactgtacccaagctgctgtcgctgttcctggagtttattggtgatcccaagccaccagcctggaagggttacttgctcgctgtgttaatgttcctcagcgcttgcctccagaccctgtttgagcaacaaaatatgtatagactaaaagtgctccagatgaggctccgctccgctatcacagggctggtgtaccggaaagtactggccctatcaagcggatcgcgaaaagcatcagctgtgggtgatgtggtcaatctggtttccgttgatgtgcagcgcttaaccgagtctgtcctctatctgaacggactttggctacccctggtctggattgtagtctgcttcgtgtatttgtggcagctattaggacccagtgctctgactgcaattgccgtgttcctatccttgctccctctaaatttcttcatctccaaaaagcgtaatcaccaccaggaagaacaaatgagacagaaggattcccgagcacgcctgactagttctatccttcggaactccaaaacgatcaagtttcatggatgggaaggagccttcctggatcgtgtgctggggattcgtggccaggaactaggagccctccgcacctccggactgctattttcggtgtcactcgtgtcatttcaggtgtctaccttcctggtggctctggtggtctttgcggtccatacactcgtcgccgaaaatgccatgaatgctgagaaggccttcgttacactcaccgtgctcaatattcttaacaaggcccaagcttttttgcctttcagcatccacagcctcgtccaggctagagtctccttcgatcgcctcgtgacgttcctgtgtctggaagaggtggatcccggggtggtggacagcagcagcagcggcagcgccgctgggaaggactgtattacgatccattctgctacctttgcctggagtcaggagagcccgccatgcttgcataggatcaacctgacggtgccacagggctgcttgctggcagtagtgggccccgtcggcgccggaaaaagctctctcctctctgctctcctgggcgagttgtccaaagtggagggattcgtgtcaatcgaaggagccgtggcctatgttcctcaggaggcatgggtccaaaacacttccgtagtggagaacgtgtgctttggtcaggaactcgatccgccgtggcttgagagggttctggaagcatgcgctctgcagccagacgtagactcgtttcccgagggcattcacacctccatcggcgagcagggcatgaacttaagcggaggacagaaacagagacttagtctcgcccgggctgtctacagaaaagccgcagtgtacctgcttgacgaccccttggccgcgctggatgcacacgtggggcagcacgttttcaatcaggtgattgggcctggtgggcttctgcagggtacgaccaggatcttggtcacgcacgccctgcacattctcccgcaggcagactggattatagtgctcgccaacggggccatcgccgaaatgggcagctatcaagaactgttacaacgcaaaggcgctttaatgtgtctgctggatcaggcccggcagcctggcgaccgaggcgaaggggaaacagagcctggtacctcaaccaaggatcctcgtggaacatcagcagggcgccgaccggagttgagacgcgagcggagtatcaagtcagtcccggaaaaagacagaaccacatctgaggcccaaactgaggtcccgctggacgatccggatagagccgggtggccagctgggaaagattctattcaatacggaagagtgaaggcgacagtgcacctcgcgtatttgcgggcagttggcacacctctctgtctctatgctctgtttctattcttgtgccagcaggttgctagtttttgccgagggtattggctgagcttgtgggccgacgaccctgccgtggggggccagcaaacccaggctgccctccggggcggaatctttggactgctgggatgcctccaggctataggactgttcgctagcatggccgctgtgttactgggtggcgctagagcttctcgactgctgttccaaagattgctatgggacgtcgtccggagccccattagtttttttgagcgcacccctattggccacctcctgaatcggtttagcaaagagacagacactgtggatgtggacatacccgacaagttgagaagcttactgatgtacgcctttgggcttcttgaggtgtctctggtggtcgccgttgctaccccgctggcaactgttgccattttgcctctcttcctcctctacgccggattccagtccctttacgttgtctcgtcttgtcaactcaggcgtttagaatcagcatcgtacagttccgtgtgcagtcatatggcggagacgttccagggctcgaccgtggttcgcgccttccgcacccaggccccgtttgtggcccagaacaacgccagagtagacgagagccagaggatcagttttccgagattggttgctgataggtggctggccgcaaacgtagagctgctcgggaacggcctagtgtttgcggctgcaacgtgtgccgttttgagcaaagcccacctatctgctggtttggtgggcttcagcgtcagtgccgcactgcaagtcacacagacactccagtgggtcgtgagaaactggacagaccttgagaattccatcgtaagcgttgaaaggatgcaggattatgcttggactcctaaggaggcaccatggcgcctgccaacctgcgcagcacagcctccctggcctcaagggggacaaatcgagttccgcgattttggactgaggtaccgtcccgaacttccgctcgcggtgcagggggtgagcttcaaaattcatgctggcgaaaaagtcggtattgttggcaggaccggggcagggaagagtagtctcgcaagtggactgctccggttgcaggaggcggctgaggggggaatttggattgacggagttcccatagcacatgtgggactgcacaccctacgaagcaggatttctataattcctcaggaccccattctgttccccggatccttacgcatgaacctggacctgctgcaagagcattcagacgaggccatctgggccgccttggagacagtgcaacttaaggccctggtagccagcctgcccggacagctacagtacaagtgtgctgacagaggggaggacttgtccgtgggtcagaagcagttgctctgcctggcccgagccttactgcggaagacacagatactgattcttgatgaagcaaccgcagcagtggacccaggaaccgagttacaaatgcaggctatgttgggctcctggttcgcccaatgtactgtgctgctaatcgcacaccgactccgctcggttatggactgtgcccgggtgctggttatggacaagggacaggtcgcggagtctggcagccccgctcagctgcttgcgcagaagggtttgttttatagattggctcaggaatccgggttggtatag

SEQ ID NO: 180030 - DNA, 2616 bp, synthetic construct
  misc_feature 1..2616: note = Description of Artificial Sequence: Synthetic coding sequence
  source 1..2616: mol_type = other DNA
atggccgcccccgccgagccctgcgccggccagggcgtgtggaaccagacagagcctgagcccgccgcaaccagtctcttgagcctttgcttcctgaggactgcaggtgtgtgggttcctcccatgtatctgtgggtgttgggccctatctacctcctatttatccatcaccacggccgagggtatttgcgcatgtcccccttatttaaggcaaagatggtcctgggctttgccttaattgtgctctgcacgtcgagcgtggccgttgccctgtggaaaatacagcagggaacacccgaggccccggagtttctcatccatccgacagtgtggctcacaacgatgagtttcgccgtgttcctcatacatacagagcgaaagaaaggagtgcaaagctcaggggtcctctttgggtattggctgctatgctttgttcttcccgcaacaaacgccgcccaacaagcttcgggagcagggtttcaatccgatcctgtaaggcatctctcaacctacctttgtctgtctttggtggttgcgcaattcgtgctttcatgcctcgcagatcagcctcctttcttcccggaggacccgcagcagagcaacccctgccccgaaacaggggcagcgttcccttcaaaagcgaccttctggtgggttagtgggttagtctggagaggctatcggaggccgctgcgccctaaggacctctggtctctgggaagagagaatagtagcgaagagctcgtttcccggctcgaaaaggagtggatgcggaatagatccgccgctaggcgccacaataaggcaatcgctttcaagaggaagggaggtagtgggatgaaagcccctgaaaccgaaccattccttcgtcaagaggggtctcagtggaggccactcctcaaggctatctggcaggtgtttcatagcacgttcttactgggaacactgagcctgatcatctcagatgtgttccgcttcacggtgcctaagttactcagcctgtttctggaattcatcggtgaccccaaacccccggcttggaagggttacctattggctgtgcttatgttccttagcgcttgtctccaaaccctgtttgaacagcagaatatgtatcgccttaaggttctacagatgagattgagatcagccattactggtttggtgtacagaaaagtgctcgcactatctagcggaagcaggaaggcctccgcggtcggggatgtggtgaatctggtttccgttgatgtgcagagattgacggagtccgtgctgtatctgaacggactttggctgccccttgtttggattgtggtgtgttttgtatatctatggcagttgttgggacccagcgcccttactgccatcgcagtttttctctcactgctgccccttaactttttcatttctaagaagcgcaaccaccaccaagaggaacaaatgcggcagaaggacagccgggcccgccttacttctagcatcctgagaaatagtaagaccatcaaattccatgggtgggagggcgccttcctggacagggtcctcgggatcagaggtcaagaactgggggccctcagaacctctgggcttctatttagcgtttcactggtgtcctttcaggtaagcacttttcttgtggcacttgtggtgttcgcggtgcacaccttggttgccgaaaacgcaatgaatgccgagaaagcgttcgtaactttgaccgtgctgaacattctcaacaaagctcaggcctttctgccatttagcatccattccctggttcaggccagagtttccttcgacagacttgtgaccttcttatgtctcgaggaagtggaccccggtgtagtggacagctcttcttcgggaagcgctgcgggaaaagactgcataactatccatagcgccactttcgcatggtcccaggagtcccctccatgtctgcatcgtattaacctcacagtcccccagggctgtcttttagctgttgtgggccccgtgggcgccggaaagtcttctctgctgtcagccctcctcggggagctaagcaaagtggagggattcgtgtctatcgagggagctgtagcttacgtgccccaggaggcatgggtccagaatacttcagtggtcgagaatgtgtgctttggacaggagctagaccccccctggctggagagggtcctcgaagcctgtgctctccagcctgacgtagattccttcccggaaggcatccatacctctatcggggagcaaggaatgaacctatcagggggtcagaagcagaggttatccctcgcacgggccgtgtatagaaaggccgctgtttatctcctagatgaccctctggctgcactggacgctcatgtcggtcaacatgtattcaatcaggtgattggcccaggcgggttgctgcaggggacgaagcaaaatctgggccccgcacctcggactccagaggcaccgctgcaggccgggggccccagcttagatgctagaggcccctccagtcagagccttagaagaacggtacctctgcaaaaacctcgtcagagattcttatggatgaccctcactgggcaggacggacaacaggaaaggaccgcctctaatacagcgggttag

SEQ ID NO: 180031 - DNA, 2019 bp, synthetic construct
  misc_feature 1..2019: note = Description of Artificial Sequence: Synthetic coding sequence
  source 1..2019: mol_type = other DNA
atggccgcccccgccgagccctgcgccggccagggcgtgtggaaccaaacggaaccagagccagctgcgacttctcttctgtctctgtgtttcttgcgcaccgccggggtttgggtgccccccatgtacctgtgggtgttgggccctatttacctgctcttcatccaccaccacggtagggggtacctacgaatgtcacctctattcaaggctaagatggtagctgcaatacccggctctttggagcccggcaatgtgctcggcttcgccctaatcgtgctgtgtacctcatccgtcgctgtggcactttggaaaattcagcaggggactcccgaggctcccgaatttttgattcacccaactgtttggctgacaacaatgagctttgctgtcttcctcattcacacagagcgaaaaaagggcgtgcagagttcaggagtcctgttcggatactggctcctgtgctttgtgctcccagctaccaacgcagcccagcaggcctctggcgccggctttcagtccgaccccgttcgccacttgtccacctatttgtgcttgagcctggtagtggctcagttcgtactgagctgtctggctgaccagccccctttttttccagaggatccacagcagtccaacccttgtcctgagacaggagccgctttcccatccaaggcgaccttttggtgggtgagtggattggtgtggcgcgggtaccgtagacctctgcgaccaaaagacctttggagccttgggcgggagaactcttccgaggaactcgtgagccggcttgaaaaagagtggatgcgcaatagatctgctgcccggcgtcacaataaagccatagcattcaagcgaaagggtggatccgggatgaaggcgcctgagaccgagccttttcttcgacaggaggggtcacagtggagacccctccttaaagccatctggcaagtgtttcactcaacctttctccttggcacacttagtctgattatctcagatgttttccggtttaccgtgccaaagctgcttagcctctttctcgaattcatcggtgaccctaagcctccggcatggaagggttacctcctcgccgtcctgatgttcctaagcgcctgtttacagacgctcttcgaacagcagaacatgtatagacttaaggtattgcagatgcgcctacgaagtgccatcactggtcttgtgtataggaaagtgctcgccttgagctctggtagccggaaagccagcgcagtgggcgacgtggtcaatctcgtgtcagtggacgtacaacgtttgaccgaatcagtgttatatctgaacggtctttggctacccctggtctggatcgttgtgtgctttgtgtatctgtggcagttgctggggccctctgccttaaccgctatagcagtgtttctctctttgctacccctcaacttttttatcagcaagaagcggaatcaccatcaagaggaacaaatgcggcagaaggacagccgcgcgcggctgacgtcctcaattctcagaaatagtaaaaccatcaagtttcacggctgggagggagcttttttggatagagtgctggggattagaggacaggagctgggggccctgcgcacatctgggctcctgttcagcgtaagcctggtctccttccaggttagcacgtttcttgtcgcccttgtggtatttgctgtccacaccctcgtcgcggaaaatgctatgaatgctgagaaggctttcgttactctcacagtattaaacattctcaataaagcccaagcgttcctgccgttctccattcacagcttggttcaggcaagagtctcgttcgatcgattagtaactttcctctgcctcgaggaagttgacccaggcgtggttgactcttcttccagtggctcggctgccggaaaggattgtattactattcatagcgccacgttcgcttggtcacaggagtcccccccctgccttcaccgcgttctgctatatcacgctggttggtcagctatggcctag

SEQ ID NO: 180032 - DNA, 4650 bp, synthetic construct
  misc_feature 1..4650: note = Description of Artificial Sequence: Synthetic coding sequence
  source 1..4650: mol_type = other DNA
atgagcctgagcttctgcggcaacaacatcagcagctacaacatcaatgatggtgtacttcagaatagttgtttcgtggatgcgctcaatcttgtaccccacgtattcctactcttcattaccttccccatcctcttcattgggtggggttctcagagcagcaaggtccagatacaccataatacgtggctccactttcccggtcacaaccttcgctggattctcacatttgccctactgtttgtgcacgtctgtgagatcgcagagggaattgtctctgacagtcgacgtgagagccgccatctccacttatttatgcccgcagtgatgggattcgtggctacaacaacaagtatcgtgtattatcataacatcgaaacctctaattttcccaagctcctgttggctctcttcctgtactgggttatggcctttataaccaaaacgattaagttagtgaaatattgccagtctggcctcgacataagcaacctgcgtttctgtatcaccggaatgatggttattctgaacgggctgcttatggcagtagagatcaatgttattagggtgcgtcggtatgtcttcttcatgaacccacagaaagtcaagccccctgaggatctgcaggatttaggggtgcgtttccttcagcccttcgtgaacctgttgtctaaggctacatactggtggatgaacacactgatcatatccgcacataagaagccaatcgatctgaaagcaattggaaagcttcctattgctatgcgggccgttaccaactatgtgtgcctgaaggacgcttacgaggaacagaaaaagaaagtagccgaccacccaaacagaacccctagtatttggctcgcgatgtaccgcgcttttggccgtcccatcttgctttcatctacattcagatatctcgccgacctactgggtttcgcagggccactctgcatctcaggcatcgtgcagagggttaacgaaacccaaaatggcacaaacaataccactggcattagcgagaccctaagcagcaaagaatttctggagaacgcctacgtgcttgccgtgctcctgttcctcgccctgatccttcaacgcacttttctgcaggcgagttattatgtgaccattgagaccggcatcaatctaaggggcgcattattggcaatgatatataacaagattctcaggctgagtacaagcaacttatccatgggggaaatgaccctgggacagatcaataatctcgttgcgatcgagactaaccaattaatgtggttcctgttcttgtgcccaaacctttgggccatgccggtgcagatcattatgggggttatactcttgtataacctgcttggttcgtccgctttggtgggagcagccgtcatcgttctcttagccccgatacagtattttattgctaccaagctggccgaggctcagaagtcaacactcgattactctaccgaacgactcaagaagaccaatgagatcctcaagggcatcaagcttctgaaactgtacgcgtgggagcacatcttttgtaaatccgtggaagaaacgaggatgaaggaactgagtagtttgaagacattcgccctgtataccagtttatcaatctttatgaacgccgccatcccaatcgctgcagttctggcaacatttgtgactcacgcgtacgcctccggaaacaaccttaagcccgctgaggcgttcgcgagccttagtctctttcacatcctcgtgacccccctcttcctactctccacggtggtgaggttcgccgttaaggctatcatctctgtccagaagcttaacgagttcttgctgagtgacgagattggcgacgatagctggcgcaccggcgagtcttccctgccatttgagtcatgtaaaaagcataccggtgtgcagccgaagacaattaaccgtaaacagcccgggcggtatcatcttgattcttacgagcagtccacacgcagactcaggcccgccgagaccgaagacatcgcgattaaggtcaccaacggttacttctcatggggaagcgggctggctactcttagcaatatcgacatccggatcccaaccggtcaactgacaatgatcgtcgggcaggtcggctgcggtaagtcctccctgctccttgcaatacttggcgagatgcagaccctggaggggaaagtgcactggtctaacgtgaacgagagcgagccatcatttgaggccacacgctccagaaaccgttatagtgtggcttacgcggctcagaaaccatggctgctcaacgctacggttgaggagaacattactttcggttccccatttaataaacagagatacaaagccgttacggacgcctgctcgctgcagcctgacattgatcttctaccattcggcgatcagactgagatcggtgagagggggatcaacctgtccggggggcaaaggcagagaatctgcgtggcacgcgcactctaccagaataccaatatagtgtttcttgacgaccctttctccgccctggatattcacctatccgaccacctgatgcaggaaggtatcctaaagtttcttcaggacgataaacgcacccttgtgttggtgactcacaaactgcagtacctcacccacgccgattggatcatcgccatgaaggacggatccgtgctgagggagggcactctcaaagatatccaaacgaaggacgtcgagctgtatgagcactggaaaaccctcatgaaccgccaggatcaggaactcgagaaggacatggaggccgaccaaacaacgctggaacggaagactctgagacgcgctatgtatagtagagaggctaaagctcaaatggaagacgaagatgaagaggaggaggaggaggaggacgaggacgataacatgtccacagtaatgcgcctaaggactaagatgccctggaagacgtgttggaggtatctgacctctggcggattcttccttttgatactcatgattttctccaaactattgaaacactcagtgatcgtggccattgactactggctggccacgtggacaagcgaatactctataaacaacaccgggaaagctgaccagacttattatgtcgccggattttctatactgtgcggagcggggatatttctttgtctggtgacttctcttaccgtggagtggatgggattaactgccgctaaaaacctgcatcacaatctgctaaataagatcatcttgggccccatccggttcttcgacacaactccactgggactcatactgaaccgcttttctgcggataccaacattattgaccagcacatcccccccacgcttgaatctctgacaagaagcactctgctttgtttaagcgccataggcatgatttcatatgcaacacccgtttttttggtagccctgctgcctttaggcgtggcgttctatttcatacagaaatatttcagagtcgcctctaaagacctgcaggagctggacgacagcactcagctcccccttctttgtcacttctccgaaactgctgaaggacttacaacaatccgcgcctttaggcacgagacacggttcaagcagagaatgctggaactgactgacacaaacaacatcgcctacttatttttgtctgcagccaacagatggctcgaagttagaactgattacttgggcgcgtgcattgtgctcaccgcgagcatagcatccatctccgggtcctccaactccgggctagtgggtctaggccttctgtatgccctgacaattacgaactacttgaactgggttgtgcggaacctggctgacttggaagttcagatgggagctgtgaaaaaggtaaactctttcttgactatggaatccgagaactatgaaggcactatggatccatctcaggttccggagcactggccgcaggagggtgagatcaaaatccacgacttatgtgtaaggtatgagaataatctcaaacctgttctgaagcacgtcaaggcttacattaaacctgggcagaaggtgggaatctgcgggagaacaggtagcggaaagtcttctctgtctttagcattttttcgaatggtcgatatttttgacggcaaaattgtgattgacggcatcgatatctctaagctgccactgcatactctccggagccgcctgtctataatcctccaagacccaattctgttctccggttccatccggtttaacctggatccggagtgtaagtgtactgacgaccgactgtgggaggcactcgagatagcacagctgaaaaacatggtaaagtcactgcccgggggcttggacgctgtggtcaccgaggggggcgaaaattttagcgtgggacagagacaacttttctgtcttgctcgggcctttgtccgcaagagcagtatactcatcatggatgaggcgactgcctcaatcgatatggccactgagaatatactgcagaaggtcgttatgactgctttcgccgataggacggttgtaacaattgcccatagggtccatactattctaaccgctgacttagtgattgtaatgaaaagaggtaatattcttgaatatgatactcctgaaagtctgcttgctcaagaaaacggcgtgtttgccagttttgttcgcgctgatatgtag

SEQ ID NO: 180033 - DNA, 4650 bp, synthetic construct
  misc_feature 1..4650: note = Description of Artificial Sequence: Synthetic coding sequence
  source 1..4650: mol_type = other DNA
atgagcctgagcttctgcggcaacaacatcagcagctacaacatcaatgacggagtgctgcagaactcctgcttcgtcgacgccttaaacctggtccctcacgtgtttctgctgttcatcacatttcccatcctgttcatcggctggggctcccaatcgagtaaggtccaaatccatcacaatacttggctgcatttccccgggcacaacctacggtggatccttactttcgctctgctgtttgtacatgtgtgcgagattgcagagggcatcgtgagcgattcacggagggagtctaggcatctacacttgttcatgccagccgtgatgggctttgtagccactactacctccatcgtttattaccacaatatagagactagcaattttcccaaactgttgttggctctcttcctatattgggtgatggcctttatcacaaaaacgataaaactcgtcaagtattgtcaatctggactggacatttccaatctccggttttgtatcaccggcatgatggtcattctgaacggtctcctgatggccgttgagattaatgtgatccgggtaagacggtatgtctttttcatgaaccctcagaaggtcaagcctcctgaagacttgcaagatcttggggtgcggttccttcagcccttcgtgaacctattatctaaagcaacctattggtggatgaacaccctcattatttcagctcataaaaagcccattgatctgaaggcgatcgggaagctgcctattgcaatgcgtgccgtaacgaactatgtatgcttgaaggatgcttatgaggagcaaaaaaagaaagttgctgaccacccaaatcggacaccttccatctggctggcgatgtatcgcgcatttgggagacccattcttctgagtagcaccttcagatacctggcagacctgttaggtttcgctgggcccctgtgcatctccggtattgttcaaagggtgaatgaaacccagaacggcacaaataataccactggaatcagcgagactttgtctagtaaggagttccttgagaacgcttacgtgctggccgtgctgctgttcctggctctcattctgcaaagaaccttcctgcaagcttcatattacgtgactatcgagactggcatcaatctgcgcggggccttgctagccatgatctacaataagattctgcggctaagcaccagtaatctgtccatgggtgagatgaccttgggccagattaacaatcttgtggccatcgagactaatcagctcatgtggttcctgtttctgtgccctaatctatgggcaatgcccgtgcaaattataatgggcgtaattctgctgtacaatctgctgggctcctccgcgttggtaggtgctgctgtgattgtgttgctggcacccatccaatacttcattgccacgaagctggccgaggcacagaagtctaccctggactacagtaccgaaaggctgaagaagaccaacgaaatacttaagggaatcaagctcctcaagctgtatgcctgggagcacattttctgtaagtctgtagaagaaacccggatgaaagagctgtcctccttgaaaacctttgcactgtatacgtctctatctatctttatgaacgctgccatcccaatagcggctgtcctcgccaccttcgtcacccatgcctatgcctctggcaataacctgaagccagccgaggcgtttgccagtctgtctctcttccatattttggtgacacctctgtttcttctgtctaccgtagtacggtttgccgtgaaagccatcatcagcgttcagaaacttaatgaattcctgctctcagatgaaatcggtgatgacagctggcgtactggagagagtagcctgcctttcgagagctgtaaaaaacatacaggggtccaaccgaaaaccatcaaccggaagcagccagggaggtatcatctcgactcctatgaacagagcacaagacgcttgagacccgcagaaaccgaagatatcgccatcaaggtaacgaatggatatttctcctggggttcggggttggcgacgctgtcaaatatcgatattcgaatccctactggtcaactcactatgatagttggacaagtcggttgcggaaaatccagtctgcttctcgcaatccttggagaaatgcagacacttgagggaaaagtccattggagcaacgtgaatgagagtgaaccatcatttgaagcaactagatctaggaatagatattcagttgcttacgccgcccagaagccctggcttctaaacgctaccgttgaagagaacataacctttggcagtcctttcaacaagcagcggtataaggctgtgacagacgcgtgctccctgcagcccgacatcgatctactgccctttggagaccagactgagattggcgagaggggaatcaatctctcaggcggtcaaaggcaacggatttgcgtcgctcgtgccttgtatcaaaatacaaacatcgtctttctggatgacccttttagtgccctggacatccatttgagcgatcacttgatgcaggaggggatcctaaagttcctacaggatgataagaggaccctagttctcgtgacccataaattacagtatctgactcatgcagattggattattgcaatgaaagacggcagtgttctgagggagggcactctcaaggatatccagactaaagacgtggagctttatgagcattggaaaaccctgatgaaccgccaagatcaggagttggaaaaagatatggaagctgaccagaccactctggagcgaaaaactctgagacgagcaatgtacagtcgtgaggcaaaagcccagatggaagatgaagatgaggaggaggaggaggaggaagacgaggatgacaatatgtccactgtgatgaggctgcgcactaagatgccatggaaaacttgctggcgctacctcacctctggcggcttttttctgctcatcctcatgatcttttctaaactgctgaagcatagtgtaatagtggccatcgattattggttggccacatggacaagcgagtatagcatcaacaacacagggaaggccgatcaaacgtattatgtggctgggttctccatcctgtgcggtgcagggatttttttgtgcctggtcacctctctcacagtagagtggatggggctcaccgccgcaaaaaatctgcaccacaaccttctcaataagattatcctgggacctattagatttttcgatactaccccactgggtctgatactgaaccggttttccgcggatacgaatatcatcgaccagcatatccctcccactctcgaatctttgacccggtcgaccttgctgtgtctttccgccattggaatgattagctatgccacccccgtgtttttggtggctctgcttcctctcggggtggctttctactttattcagaaatatttccgggtggccagtaaagaccttcaggaattggacgactctacccagcttcctttattgtgtcatttcagtgaaacagccgaaggtttgactacaattcgcgcctttcggcatgagacacgatttaaacagaggatgctcgaactgacggatactaataacattgcttatctattcttgagcgccgctaaccggtggctggaggtgaggacggattacctgggggcttgcattgtcctcaccgcatcaattgctagcatcagtgggagcagcaattcaggcttggttggcctgggactgttgtacgctctcacaattactaattatctcaattgggtcgtaagaaacctggccgatctggaagtccagatgggtgccgttaaaaaggtaaactcttttctcacaatggagagtgagaactatgagggcaccatggatcccagtcaggtcccagaacattggccgcaggagggtgagatcaagatccatgacctttgcgtaaggtatgagaacaatctcaagcccgtgcttaaacatgtaaaggcctatataaagccagggcaaaaggttgggatctgcggccggaccggatccggaaagagttccctctctttggcttttttcagaatggtggacatttttgacggaaaaatcgtgatcgacggcatagatatctccaagctgcccttacataccttaaggagccgtctgagcattatcctgcaggaccctatacttttcagtgggtctattcggttcaatcttgatcccgaatgtaaatgtaccgacgaccggctctgggaagccctagagatcgcccagctgaagaacatggtcaaaagccttcctggcggacttgatgcagtggttaccgaaggaggcgagaacttcagtgtgggccagaggcagctgttctgcctcgcccgggcttttgtgcgtaagagctccatcctaatcatggatgaggccaccgcgagcattgacatggccaccgagaacatcctacagaaggttgtaatgactgcatttgccgatcggactgttgttaccatagcccacagggtgagttccatcatggacgcgggattggtgctggttttctccgaaggcatcttagttgaatgtgataccgtgccaaatctcctcgcacataaaaacggactgttcagtacactggtgatgactaacaagtag

SEQ ID NO: 180034 - DNA, 450 bp, synthetic construct
  misc_feature 1..450: note = Description of Artificial Sequence: Synthetic coding sequence
  source 1..450: mol_type = other DNA
atgagcctgagcttctgcggcaacaacatcagcagctacaacatcaacgatggtgtgctgcagaacagttgcttcgttgacgccctgaatttggtcccccacgtcttcctccttttcattacattcccaattctgttcataggatggggcagtcagagcagcaaggttcagatccaccacaatacatggttgcatttccccggccataatcttcgctggattctgacgttcgcactactctttgtgcatgtgtgcgaaatcgcggaggggattgtgagcgattctcggcgggagagccgccacctccatttgtttatgccagctgtaatgggcttcgtcgccacgaccaccagcattgtatactatcacaacatagaaacaagcaattttcctaaactgctgttaggtttctcccaccacgaaagtaaaagttgctaccaacactcttag

SEQ ID NO: 180035 - DNA, 4542 bp, synthetic construct
  misc_feature 1..4542: note = Description of Artificial Sequence: Synthetic coding sequence
  source 1..4542: mol_type = other DNA
atgagcctgagcttctgcggcaacaacatcagcagctacaacatcaacgacggtgtcctgcagaactcgtgttttgtagatgctttaaacctcgttcctcacgtcttcctactttttatcaccttccctatcttattcatcggatgggggagccaaagctccaaggtccagatccaccacaatacctggctccatttcccaggacacaacttgagatggatccttacattcgccctgctcttcgtacacgtatgcgagatagccgaagggattgtgagtgacagcaggagggagtcaagacacctccatctgttcatgccagccgtgatggggttcgtcgccaccaccaccagcatcgtgtattaccacaacatagagacgtcaaatttccctaaattgcttttggccctgtttctgtactgggtgatggcattcattaccaagaccataaaattagtgaagtactgtcaaagtggactcgatatcagtaacctgaggttctgtatcacagggatgatggtgatcctgaacggactgttgatggcagttgaaatcaatgtgatccgtgtgcggagatatgtattcttcatgaatccacagaaagtgaaacctccagaggatctgcaggacctcggcgtccgctttctgcaaccctttgtgaacctcttgagcaaggccacttactggtggatgaacacactgatcatctctgcgcataagaagccaatagacctcaaagctatcggaaagttaccaattgccatgcgagccgtcaccaattatgtgtgcctgaaggatgcctatgaggagcagaagaaaaaggtcgcagaccaccctaacaggacccccagtatttggttagctatgtaccgggctttcggccgtcccattttgctgtcttctacctttcgttatctggctgacctgttggggttcgctgggcctctctgtatctccggcatcgtgcagcgggtgaacgaaacccaaaatgggacgaacaacacaaccggaatcagcgagactctgtctagcaaggaattccttgagaatgcctacgttctcgcagtgttgctgtttctcgcacttattctccagaggactttcctgcaagcttcatactacgtcacaattgagacgggcataaacttacggggcgccctcttagccatgatctacaataaaattctcaggctgagcacttctaatctttcaatgggggaaatgaccctggggcaaatcaacaatctggtcgctatcgagaccaaccagttaatgtggtttctgtttctttgtcctaacctatgggctatgcccgtgcaaattatcatgggggttatcctgctgtataacctactcggttcttccgctttagtgggagccgcagttatcgtcttgctggcccccatccagtatttcattgccacaaagctggctgaagcacaaaagtctactttggactatagtactgagcggctgaaaaagactaacgagattttaaaaggcatcaaactactgaaattgtacgcctgggagcatattttttgcaaatcagttgaagagaccagaatgaaagagttgtcctccttgaaaacctttgctctgtacacctcgctctccatcttcatgaatgcggccatccctattgccgctgtgctggcaacattcgtaacacacgcttacgcatctggtaataaccttaagcctgcggaggcgttcgccagcctgtccctgtttcacatcctggttactcccctcttccttttgtcaactgtagtgcggtttgccgtgaaagccatcattagtgttcagaaactcaacgaattcttgctgtccgatgagattggagacgacagttggcggactggggagtcgtccctgccattcgagtcctgtaagaagcataccggtgtcgtgacaaacgggtacttttcgtggggctccggtcttgcgaccctgagtaatatcgatatccggatccccactggccagctcactatgatcgttggtcaggtaggctgcggaaaatcaagtctgctgctcgctattcttggcgagatgcagacgttggagggaaaggtgcactggtcaaacgtgaatgaatccgagccttccttcgaggcgacaaggtcaaggaatcggtactctgtggcctacgcagcccagaaaccctggctgcttaatgcaactgtggaagagaatattacttttgggagccctttcaacaagcagagatacaaggccgtgacagacgcgtgctctcttcaacctgacatcgaccttcttccgtttggtgatcagacagaaatcggtgagcgagggatcaacctgagcggcggtcagcgacagcggatatgcgtcgctagagctctatatcaaaataccaatatcgtctttctggacgaccccttctcagcgctggatatccacttgagcgatcaccttatgcaagaaggaatactgaagttccttcaagatgataagaggactctagtgctggtgacccacaaactgcaatacctaacccacgccgattggatcatagcgatgaaggacggcagtgtactgcgcgagggaacactaaaggatattcagactaaagacgttgagctctacgagcactggaaaaccctaatgaacaggcaagatcaggaattagagaaggacatggaagcagaccagacaacactcgaaagaaagacgcttcgaagggcgatgtattccagggaagccaaggcacagatggaggacgaagacgaagaagaggaggaagaggaggatgaagatgacaacatgagtaccgtgatgaggttacgaactaagatgccatggaagacctgctggagatacctgacgtcagggggttttttcctcctcattctaatgattttctcaaagcttctgaagcacagtgtcatcgtggcaatagactactggctggcgacgtggacaagtgaatactcgatcaataacacgggaaaggccgaccagacttattatgtggccgggtttagcattctgtgcggtgccgggattttcctctgtctcgttacatctttaacagtagaatggatgggattgaccgcagccaaaaatcttcatcacaatctcttaaacaaaattatcctgggccctataaggttctttgacacaacccctctggggctgattttgaatcggttctccgcggacactaatatcatcgatcagcacatacccccaaccctggaatctctcacccgcagcacattattatgcctgagtgccatcggcatgattagctatgccacaccagttttccttgtggcactgctgcccctgggagtggccttctacttcatccagaagtacttccgcgtggcctccaaagatcttcaggaattggacgatagtacccagcttcctttgttgtgtcatttttccgaaaccgcagaagggttgacaacaatacgggcattccgccatgagactcggtttaagcagaggatgcttgagttgaccgatacaaacaacattgcctacctgttcttgtccgctgctaaccgatggttggaagtcaggactgactatttgggagcctgcatcgtgctcaccgcttcaatcgccagcatcagcggcagcagcaatagtgggctggtcggtttgggcctcctgtacgctttgacaattaccaattatcttaactgggtggtcagaaacctcgccgacttagaggtgcagatgggggcagtgaagaaagtcaattccttcctgactatggaaagcgagaactacgaaggcacaatggacccttcacaagtgccagaacattggccacaggaaggcgaaattaagatccatgatctttgcgttagatatgagaataatttaaaacccgtgcttaaacacgtgaaagcctatattaagccagggcagaaggtgggcatctgcggtcgcacagggtctgggaagagcagtctgagtctggcattctttcgaatggtcgacattttcgatggcaaaattgttatcgatgggatagatatcagcaagctcccattacataccttgcgcagcaggttatccatcatattgcaggatccaatcctgtttagtggctccattaggtttaatctcgacccggagtgtaagtgcacggacgaccggctctgggaagccctggagatcgctcagttgaaaaatatggtgaagtccctgcccggtggactcgacgccgtggtcaccgagggcggcgaaaatttttctgtgggccagaggcagttattctgtttagctcgcgcgttcgttcggaagagctccattctcattatggatgaagccactgccagtattgacatggcaacagaaaatatcctgcagaaggtggtaatgactgccttcgccgaccgaaccgtggtcacgatagctcacagggtgagctcaattatggatgccggattagtcctagtatttagcgagggaatcttagttgaatgcgacactgtgcctaatctgctggcccataagaacgggttattcagtactctggtgatgacaaacaagtag

SEQ ID NO: 180036 - DNA, 1386 bp, synthetic construct
  misc_feature 1..1386: note = Description of Artificial Sequence: Synthetic coding sequence
  source 1..1386: mol_type = other DNA
atgcagcgggtgaacatgatcatggccgagagccccggcctgatcaccatatgtctgctggggtatctgctgtctgcggaatgcacggtgttcctggatcatgaaaatgctaataagattctcaatcggccaaagcgctataattccgggaaactggaggagttcgtccaggggaacctcgaacgtgaatgcatggaggagaaatgctccttcgaggaagctcgggaggtgtttgagaacactgagaggaccactgagttctggaagcagtacgttgatggagaccagtgcgaatccaatccttgcctcaatggcggcagctgcaaagacgatatcaacagctacgaatgttggtgcccttttgggtttgaaggaaagaattgtgagctggatgtgacgtgcaatataaaaaatggaagatgtgaacagttctgcaagaacagtgctgacaacaaagtcgtgtgtagttgcactgagggctatcggctcgcagagaaccaaaaatcatgtgaacccgccgtgcccttcccatgcgggagagtctctgtgagtcagaccagcaaattgacaagagctgagacagtattccccgacgtagactacgtcaactccacagaggccgagacaatcctggacaatatcacacaaagcacgcagtctttcaacgattttactcgggtcgttggcggagaagacgcgaagcctggccagtttccttggcaggtagtgctgaacggtaaagtggacgccttctgcggagggtctattgtcaacgagaaatggatcgtcacagctgcccactgtgtggaaacgggagttaagattaccgtagtggcaggggagcacaacatcgaggagacggaacacacggagcagaagcggaacgtgattcggataatccctcatcacaattataacgccgccataaataagtataatcacgatatcgcgctgctggaactggatgaacccctcgtcctgaactcctacgtgacacccatctgtatcgcggacaaggagtatacaaacatcttccttaagttcggctccggatacgtatctgggtgggggcgcgtttttcataaaggcagatctgcattggtcctgcagtacctgcgcgtgcccctcgtcgacagagctacctgcctgagaagcaccaagtttaccatttacaacaatatgttctgcgcagggttccacgagggggggagagattcctgtcagggagattcaggagggcctcatgtgacagaggtggagggtacaagtttcctgacaggcataatttcatggggagaggagtgcgccatgaagggaaaatatggtatatacactaaggtgtcacgttatgtgaactggattaaggaaaaaacgaagctgacctag

SEQ ID NO: 180037 - DNA, 684 bp, synthetic construct
  misc_feature 1..684: note = Description of Artificial Sequence: Synthetic coding sequence
  source 1..684: mol_type = other DNA
atggacggccggctgcggaaccccgaccagagcctgaccgaggacgtagtggccttcgccgcctcagtcgctcatctttatagtaaccttaccaaaccactgctggacgttgcagttacatcttataccctactgcgtgccgcaaggtctcgcggagccggcacagcatggcccagcgcgatcgctgggcttgtagttttcctgacggccaacgtgctgagagcattttcacccaaattcggagaattagtcgcagaggaggcacggaggaagggcgaacttcgatacatgcatagtcgggtcgtggccaatagtgaggaaatcgcattctatggggggcacgaagtggagcttgcactgcttcagcggtcctatcaggatctcgcaagccagatcaatcttatacttctcgaaagactatggtacgttatgctcgagcagttcctcatgaaatatgtgtggagcgcctcaggactgttgatggttgctgtccctatcattaccgcaaccggatactctgaatccggagaaacacagggttccaaacggatacaggcacggggtctctctccgattcctctgggggccgagctgacaagagcccaactctctcaacctgctgcccacttctgttgcagaggtcataggggaccagccgcctcactggacgctttcaggggttag

SEQ ID NO: 180038 - DNA, 672 bp, synthetic construct
  misc_feature 1..672: note = Description of Artificial Sequence: Synthetic coding sequence
  source 1..672: mol_type = other DNA
tgactgttcagcaccgtggccgcccccttctacctgcccgccagcagtgtggggggatttcatttgtttattgtggcctccaccgatgccgaggcagtcaagaaagcagctctggagaaaaaggaagaggagctggtcagtgagcggacagaagccttcaccattgcacggaatcttcttacagcagccgccgatgcgatcgaacgcatcatgtcatcctacaaggaagtgacagaactggccggatacacagctagggtgcacgagatgttccaggtgttcgaggacgtacagcggtgccatttcaaacggccccgggagctggaagacgctcaggcagggtcaggaacgatcggcaggtccggtgttcgagtcgaaggacccctgaagatacgtggtcaggtggtagatgtggaacaggggattatctgcgagaacattccaatcgtgacgccctctggggaggtcgtggttgcatccttgaatattcgcgtagaggaaggcatgcacctgctaatcactggacctaacggttgtggcaagtcaagcttatttagaattctggggggactgtggcctacttatggcggagtcctgtacaaaccacctcctcagagaatgttctacatcccccagcgaccttacatgtctgtgggctctctccgcgactag

SEQ ID NO: 180039 - DNA, 2223 bp, synthetic construct
  misc_feature 1..2223: note = Description of Artificial Sequence: Synthetic coding sequence
  source 1..2223: mol_type = other DNA
atgacccacatgctgaacgccgccgccgaccgggtgaagtggacccgttcttctgccgccaagcgtgccgcatgtcttgtggctgcggcctacgccctaaagaccctgtaccccattataggaaagaggctcaaacagtcgggccatgggaagaagaaagccgccgcctatcccgccgcagagaacactgagatactacattgtaccgaaacaatctgcgagaagccttccccaggagtgaatgccgacttcttcaagcagttgcttgagctgcgcaaaattttatttccaaaattggtgaccaccgaaaccggttggctgtgcctgcactcagtcgccctgatctccaggactttcctaagtatttacgttgccggcctggatggtaaaattgtgaagagcatcgtggaaaaaaaaccacgtaccttcattattaaacttattaagtggctgatgatagccattcccgcgacttttgtgaactcggcaattaggtatttggagtgcaagctcgcgctggcatttcgcactaggctcgtggatcacgcctatgaaacatactttaccaatcaaacgtattacaaggtgatcaacatggatggcaggctcgcgaatcctgatcagtctctgacagaggacattatgatgttcagccagtccgtcgcccacctttactctaacctgaccaagccaatattggacgtgatgctgacttcctacacgttgatccagaccgccacttctagaggggccagtccaatcggcccgacattgctggccggactggtagtgtacgcgaccgccaaggtgcttaaggcttgtagccctaaatttggtaaacttgtggctgaagaggctcaccggaaggggtacttgagatacgtgcactcgcggatcatcgctaacgtcgaggaaatcgcattttacagggggcacaaagtggagatgaagcagctacagaaatcttacaaagctctcgctgaccagatgaacctgatcctgagcaaacggctatggtacatcatgatcgaacaatttctgatgaagtatgtctggtcatctagcggactcattatggtggccattccaatcatcacggccacaggctttgcagacggggaagatggacagaaacaggtcatggtgtctgagcgcaccgaagccttcaccacagctcggaatcttcttgcatcgggggcagatgccattgagcgcataatgagcagctataaagaagtgaccgaactggcaggctacacagcacgggtgtacaacatgttttgggtgtttgacgaagtgaaaaggggcatttacaaaaggacagcagtgatccaggaatcagaatcccactccaaaaacggggctaaggtagaactgcctctgagcgacaccctggccattaaaggaaaagtgattgatgttgatcatgggatcatctgtgaaaatgtgccaatcatcactcccgctggcgaggtcgtggcatctagactgaatttcaaagttgaggaaggcatgcatctgctcatcaccggccctaatggatgtggcaaatcgtccctgtttcgaatattgagcggcctttggccagtgtatgaaggtgtcctgtacaaacccccgccccagcacatgttctatattccccagcgtccatacatgagcctgggatcactccgggatcaagtgatctatcctgacagtgtggacgatatgcatgataagggctataccgatcaggatctggaaagaattttacataacgttcacctgtatcacatagtgcaacgcgagggtgggtgggatgctgtgatggattggaaagacgtcctgagcggcggggagaagcaacgtatgggaatggcgagaatgttctaccacaagccaaagtacgcgttgttggatgagtgcactagtgcagtgtcaatcgacgtagagggcaagatttttcaggccgcaaagggcgcaggaatctccctgctttctatcacccaccggccatcgttgtggaaataccacacacacctcttacagtttgacggagagggtgggtggcggttcgagcagctggacaccgccattagacttacactttcagaggagaagcaaaaattggagtcccagctagctgggatcccaaaaatgcagcagcgcttgaacgagctgtgcaagatcctgggcgaagattccgtgctgaagaccattaaaaacgaggacgagactagctag

SEQ ID NO: 180040 - DNA, 711 bp, synthetic construct
  misc_feature 1..711: note = Description of Artificial Sequence: Synthetic coding sequence
  source 1..711: mol_type = other DNA
atggccgccttcagcaagtacctgaccgcccggaacagcagcctggcaggcgccgccttcttgttactttgccttttgcataaacgccgcagggcgctcggcctccacggcaagaaaagcggtaagcctccgttacagaacaacgagaaggaaggcaaaaaagagcgggccgtcgtggataaagtctttttcagccgacttatacagatcctcaagattatggttccccgtacgttctgtaaggaaaccgggtacctggtccttattgcggttatgttggtctctcggacatattgcgacgtctggatgattcagaatggcaccttgattgagagtggcatcatcggtagaagcaggaaggattttaaacggtacttgctgaactttatcgccgccatgcccctgatcagcctggtcaataatttcctcaaatacggacttaacgagctcaagctctgctttcgagttcgcctgacaaaatacctctacgaagagtatctgcaggcctttacgtactacaaaatgggaaacttggataatcgcatcgctaacccggaccagttgctgacacaagatgtcgagaagttttgtaattctgttgtcgatctctactctaatctatccaaaccgttccttgacattgttctttatatatttaagttaacatctgccatcggagctcaggtacttggaaaaatcctctggcactag

SEQ ID NO: 180041 - DNA, 1980 bp, synthetic construct
  misc_feature 1..1980: note = Description of Artificial Sequence: Synthetic coding sequence
  source 1..1980: mol_type = other DNA
atggccgccttcagcaagtacctgaccgcccggaacagcagcctggctggtgctgctttcttgctcctctgtctgctgcacaaacgacgtcgggccctgggcctgcatggaaaaaagtcaggcaagcctccactccagaataatgagaaagaaggtaaaaaagagcgggcggtggttgacaaagtgtttttctcccggttgatccaaatcctcaaaattatggtgccaaggaccttctgcaaagagacgggttatctggtactcattgccgtgatgttagtttcacgcacatactgtgacgtctggatgatccaaaatggaactctgatcgaatcaggcattattggacggtcccggaaggactttaaacgctatctgcttaactttatagctgccatgccgctgatttcgctggtgaataacttcctgaaatatggtctgaatgaacttaaattgtgcttcagagtgaggctcacaaagtacctttacgaggagtatctccaggctttcacgtattacaagatgggcaacctagataaccgaattgctaatccagaccagttgctgacgcaggatgtcgagaagttttgtaattcagtggtcgatctttatagtaatctgtcaaagcccttcctcgatattgttctgtatatctttaagctgacatctgcgatcggggcgcaaggcccagcttcgatgatggcatatctcgtagtgtcaggcctgttcttaacacggctaagaagacccataggaaagatgaccatcactgagcagaagtacgagggtgagtacaggtatgtgaactctcgccttatcacaaactctgaagagattgccttttataatgggaataaacgggaaaagcagaccgtgcacagtgtcttccgaaaattggttgagcacctgcataactttattctgtttcgtttttctatgggcttcatcgactctatcattgcgaaatacttagctactgtggtcgggtaccttgtggtctcgaggcctttcctggacttaagtcaccctagacatttgaagtcaacacattcagaactgctggaggattattaccagtccgggaggatgctgcttcgaatgtcacaagcgctagggcgcatagtgttggcgggcagagagatgactaggctggcaggcttcaccgctcgcatcactgagctgatgcaggtcttaaaagaccttaatcatggcaagtatgaaagaacaatggtcagtcagcaggagaaggggatcgaaggggttcaggttatccccctgatcccaggcgcgggagagattattatcgctgataatatcattaagttcgaccacgtgccgctggctactcccaacggtgatgtcttaatacgggatctcaactttgaggtccgtagtggagcaaatgtcttgatctgcggacccaatggctgcgggaaaagttctctatttcgcgtcctcggggagttgtggccgctgtttggaggacggctcaccaaacccgaaagaggtaaactcttctatgtcccacagaggccgtatatgacactggggacactgcgggatcaggtcatttatcctgatggaagagaggaccaaaaacgcaaaggcatctcagacctggtcctcaaggagtacttggacaacgtccaactggggcacattctagagcgggagggcgggtgggatagcgtacaggactggatggacgtgctttctggaggggaaaaacagcgcatggccatggcccgtctcttctaccacaagccccaatttgccatcctcgatgagtgcacatcggctgtatctgtcgacgtggagggttacatctactctcattgtcgaaaggttggcatcactctttttacagtgagtcatagaaagagtctttggaagcatcacgagtattatctccatatggatggcagaggaaactatgagtttaaacagattacagaggacacagtcgagtttggtagctag

SEQ ID NO: 180042 - DNA, 1650 bp, synthetic construct
  misc_feature 1..1650: note = Description of Artificial Sequence: Synthetic coding sequence
  source 1..1650: mol_type = other DNA
atggccgccttcagcaagtacctgaccgcccggaacagcagcctggcaggagcagccttccttctcctctgtctcctacataaaagacgaagggcactcggactgcatggaaagaagagtggaaaacccccccttcagaataacgagaaagagggaaagaaagagcgggcagtggtcgataaagttttcttcagccggctcatccagattctgaaaatcatggtcccccgcactttctgtaaggagaccggctatcttgtgctgatcgccgtgatgttggtgagcaggacctactgtgatgtatggatgatccagaacggcactctgatcgaaagcggtattataggccgttctcggaaagatttcaaacgatacttgctcaatttcatagccgccatgccgctcatatccctggttaataacttccttaagtatggcctcaacgagcttaagctctgcttccgcgtgagactgactaaatacctgtacgaagagtacctccaggcgttcacttattataagatggggaatctggataaccgtatcgccaatccagatcagctgctgactcaagacgtggaaaaattctgtaatagtgtggtggacctgtattcgaacctgagcaaacctttcttggacatcgtcctgtacatattcaaactaacaagtgcgatcggagcccagggaccagccagcatgatggcgtacctggttgtttcaggccttttccttacaagactgcggcgccccattgggaagatgacaatcactgagcagaagtatgagggagagtatcggtatgtgaacagccgtcttattacaaactcctttaccgcccgtatcaccgaattaatgcaagtgctgaaggatctcaatcacggaaagtatgagcgcactatggtgtctcagcaggagaagggtattgagggggtgcaggtaatccctctgatccccggggccggggagatcattatcgccgacaacataatcaaattcgaccatgtgcccctggccacccccaatggggatgtgctgatccgggatctgaatttcgaggtgagatcaggcgccaacgtactgatttgcggccctaacggttgcggcaagagctctctgttccgtgtgctcggcgagttatggcccttatttggcggcagattaactaagcccgagaggggtaaacttttttatgttcctcagcgtccctacatgacactcggtacgctgcgggaccaagttatttaccctgatggccgtgaggaccagaagcgaaagggcatttcagatctggtgctcaaagagtaccttgacaatgtgcagctgggccatattctggagcgcgaaggagggtgggactctgtccaggactggatggatgttctgagcggaggggaaaagcagcgcatggccatggcccgcctcttttatcacaaaccccagtttgccattcttgacgaatgcacctcggccgtgtcggtcgatgtggagggttatatctactcccattgccgtaaggtaggcatcacactcttcaccgtctctcacagaaaaagtttgtggaagcaccacgaatactatcttcacatggatggcagagggaactacgaatttaaacagattactgaggacaccgtggagttcggatcgtag

SEQ ID NO: 180043 - DNA, 2052 bp, synthetic construct
  misc_feature 1..2052: note = Description of Artificial Sequence: Synthetic coding sequence
  source 1..2052: mol_type = other DNA
atggccgccttcagcaagtacctgaccgcccggaacagcagcctggctggagccgctttcttgcttctctgcctgctacacaagcgtcgtcgagctctcggattgcacggatatttcatggaaacgtggcgcgagaaatctgacgaggtgatgggagaactgaccgaccatgtcactcactgcaaaaagagcggcaagccacccctgcagaataacgaaaaggagggtaagaaagaacgggctgtcgtcgacaaggttttctttagccgcttgattcagattctgaagattatggtgcctcggacattttgcaaagaaacaggttatcttgtgctcattgctgtgatgctggtgagcagaacctattgtgacgtctggatgatccagaatggcacactgattgaatcaggtattatcggccgttctagaaaggactttaagaggtatttgttgaattttatcgcggcgatgccgctgatatctcttgtcaacaatttcctgaaatacggcttaaatgaacttaaactgtgctttagggtccgactaacaaaatatctgtacgaggaatacctgcaggccttcacctattacaaaatgggaaacttagacaacaggattgctaatccggatcagctgcttacccaagatgtggagaagttctgcaactccgttgtggatctgtatagcaacttgagtaaaccatttttggatatcgtactgtatattttcaaactcacatccgccatcggtgcccaagggcctgcttctatgatggcgtatctggtggtctccgggctattcctaaccaggctacgccgcccaatcgggaagatgacaattactgagcagaaatatgagggcgaatataggtatgtgaactctcgcttaatcaccaattccgaagagatagcgttctataacggcaacaagcgtgagaaacagacggtccactccgtatttcgcaagcttgtcgagcatttgcacaatttcattctatttcgcttttcaatgggattcatagacagcataatcgccaagtacttggcgaccgtggtggggtacttggtcgtgtcacgcccatttttggatctctctcacccaaggcatctcaaatcaacacattcagagttacttgaggactactaccagtctgggcgcatgctgttgcggatgtcccaggcattaggacgaattgtgctggcaggtcgcgaaatgaccaggctcgccgggtttaccgctagaattactgagctcatgcaggtgctgaaggacttgaatcacggcaagtatgaacgaaccatggtctcgcaacaggagaaggggatcgaaggtgttcaggttataccgctgattcccggagccggggagattatcattgccgacaacattatcaaatttgaccacgtccccctggcaacacccaacggagacgtgctgattagagatctaaattttgaagtgcggagtggggccaatgtgttgatctgcggacccaatggctgcggtaaaagtagcctgtttcgtgtgctgggcgagctgtggccactgttcgggggccggcttaccaagccagaacggggaaagctgttttacgttccgcaacgtccctacatgactctgggaacattgagagaccaggtgatctatcctgacggccgcgaagaccagaagcgcaaaggaatttcagacctggttctcaaagagtaccttgataacgtgcaattaggccatattctggagcgcgaaggtggctgggactctgtgcaggattggatggatgtcctgtcaggcggcgagaaacagagaatggcaatggctagactgttttatcacaagccccagtttgccatacttgatgaatgtacatcagcagtctctgtggacgtggagggctatatctacagccactgtcgtaaggtgggcatcaccctcttcaccgtctcgcatcggaaaagcctgtggaagcatcatgaatactatcttcacatggacggacgcggaaactatgaatttaagcagatcaccgaggatactgtcgagttcggcagctag

SEQ ID NO: 180044 - DNA, 1761 bp, synthetic construct
  misc_feature 1..1761: note = Description of Artificial Sequence: Synthetic coding sequence
  source 1..1761: mol_type = other DNA
atggtgccccggaccttctgcaaggagaccggctacctggtgctgatcgccgtgatgcttgtgtcccgaacttactgcgatgtgtggatgatccagaacggcactctgatcgagtcaggaattatcggtaggtccagaaaagactttaagcgctacctccttaacttcatagccgccatgccgctcattagtcttgttaataacttcctcaagtacggactgaatgagctgaaactctgtttcagggtgaggctgaccaaatacctgtatgaggagtacctccaggcattcacatattataagatgggcaacctagacaacaggattgctaacccagaccagctgctcacccaggacgtagaaaaattctgtaactccgtggtggatctgtacagcaatttaagcaagcccttccttgatattgtgctgtacatatttaagctgacgtccgcaatcggagcacaggggcctgcaagtatgatggcctatctcgttgtgtccggactgtttctgactcggctcagaagacctatcggaaaaatgacaattactgagcagaagtacgagggcgaataccgttacgttaacagtagattgattactaattccgaagagatcgctttctataacggaaataagcgggagaagcaaacagtgcactccgtctttaggaaactggtcgagcacttgcataactttatactctttagattcagtatgggattcattgactccataatcgccaagtatctagccaccgtggtgggctatctcgtcgtgtcgagaccatttctggacctcagccatcctcggcacctgaaaagcacacattcagagctgctggaggattattatcagagcggacgcatgcttttgagaatgtctcaggccctgggcaggattgtgttggctggcagagaaatgacccgcttggcaggatttactgctcggatcaccgagctcatgcaggttctaaaggatttgaaccatggtaaatatgaaaggacaatggtttcccagcaagaaaaagggatcgaaggcgtgcaggtaatccccctaattccaggtgccggcgagattatcatagctgacaatatcatcaagttcgaccatgtccctctggctacaccaaacggagacgtgttaatcagagatctcaattttgaggtgaggagtggcgcaaatgttttaatttgtggacccaacggctgtgggaagtcaagtctcttcagggtgctcggcgagctgtggcccttatttggtgggagattgactaaaccagaaaggggtaaactgttttatgtccctcagagaccttacatgactctcggaacactgcgcgatcaggtcatataccccgacggccgtgaagatcagaaaaggaaggggatttctgatctagtgttaaaggaatacctggacaacgtgcaactggggcatatactagaaagagaggggggttgggattcagtgcaggactggatggacgtgttgagcggcggggaaaagcagcgcatggccatggcaaggttgttttatcacaagccacagtttgctattctggatgagtgtacctctgctgtctctgttgatgttgagggctatatctatagccattgtcgcaaggtgggcattaccctgttcaccgtaagccaccgcaagtcactgtggaaacaccatgagtactatctccacatggatggcagaggaaattatgagttcaaacaaatcaccgaagacaccgtggagttcgggagctag

SEQ ID NO: 180045 - DNA, 1467 bp, synthetic construct
  misc_feature 1..1467: note = Description of Artificial Sequence: Synthetic coding sequence
  source 1..1467: mol_type = other DNA
atgctgatcgtgctgaacagcaccctgaagagcttcgaccagttcacctgtaacctgctgtacgtttcatggaggaaggatctgaccgagcatctccataggctttattttcggggtagggcttattacacactgaacgttctaagagatgatatagacaaccccgatcagagaataagccaggacgtcgagaggttctgtaggcagctgagcagcatggcgtcaaagctgatcatctctccattcaccctcgtctactacacgtaccaatgctttcagagcacgggctggctaggcccagtgagcatcttcggctacttcatacttggaacggtggtgaacaagactcttatgggaccaatagttatgaaattagtgcaccaagaaaagttggaaggcgactttcgggcaggtcacgtagagcatatgcgaacggatcggcggctccaaagactcttgcagacccagcgggagcttatgtctaaggagctctggctttatattggtattaacacttttgactacttgggcagtattctctcatatgttgttattgctatacccattttcagcggagtatatggtgacctcagcccagccgagctgtcaactctcgtgagtaaaaatgcgttcgtatgtatttatctgatctcatgctttacgcaactgatagacctgagcaccaccctgtctgatgtagctggctacacacaccgaatcggccaactacgggagaccctactggacatgtcactcaaatcgcaagattgcgagatactcggggagtctgagtggggattagacactccaccaggttggcccgccgctgagccggcagatactgctttcctcctggaacgggtgtctatctctgcgcctagctctgacaaacctctgatcaaagatctgagcctgaagattagcgagggccagtcgctgctcattactgggaacacaggcaccgggaagacttctttgttaagggtgcttgggggattgtggactagtacaagaggcagcgttcaaatgttaaccgactttggacctcatggtgtgctattccttccgcaaaaacctttcttcacggacgggacactgagggagcaggtgatctaccccctcaaagaagtttatcctgacagcgggagcgccgatgacgaacgaatactcaggtttctggagttggcgggccttagcaatcttgtggcacgcaccgaaggtttggatcagcaggtggactggaattggtatgatgttctgagccccggggagatgcagaggctctcctttgctcgccttttctatctgcagcccaaatacgccgttctggatgaagctacatctgccttgactgaagaggtggagtcggaattatataggatcggccaacagctcggtatgacttttatctcagtgggccaccggcaatctcttgaaaaggtacctgtcctgactagaatggcctag

SEQ ID NO: 180046 - DNA, 1821 bp, synthetic construct
  misc_feature 1..1821: note = Description of Artificial Sequence: Synthetic coding sequence
  source 1..1821: mol_type = other DNA
atggccgtggccggccccgcccccggcgccggcgcccggccccggctcgatctccagttccttcagcgcttccttcagattctgaaagtccttttcccttcctggagcagccagaacgctttgatgttcctgaccctcctctgcttgactcttcttgagcagtttgtgatttatcaggtcgggctcatcccgtctcagtattatggtgttctgggaaataaggacttagagggtttcaaaaccctgacgttcctggcagttatgctaatcgtgctgaacagcaccctaaagagttttgaccagttcacttgtaacctgctgtacgtgagctggcgcaaggacctgaccgagcatctgcaccgtctgtattttcgtggaagggcctattacactttgaacgtgctgcgagatgacatcgataatcccgaccagcggatttcccaggacgtcgaacgtttctgtcggcagttgagcagcatggcgagcaagctcatcatcagcccatttacactggtgtattatacataccaatgctttcagagtacaggatggctggggcccgtgtcaatttttggctactttatcttggggacagttgtgaacaaaacactcatgggaccaattgttatgaagttagtccatcaagaaaagcttgagggggacttccgattcaagcacatgcaaatccgcgtgaatgccgagcccgcggccttttatagggcagggcatgtagaacacatgcggaccgatcggcgccttcagaggctacttcaaacacagcgggagttaatgtctaaagagctgtggctctacattggtatcaacactttcgattatctcggtagtatcctgtcttacgttgtgatcgcgatacctatcttctcaggagtgtacggagacctgtccccagccgagctctccacattggtcagtaaaaatgcattcgtgtgtatctatttaatcagttgttttacccaattgatagatttgtctacgacactgagcgacgtcgcgggctacactcacagaatagggcaactaagggagacactgttggacatgagcctcaagagtcaggactgcgagattttgggcgagagcgaatggggcctagataccccccccgggtggcccgcagctgaacccgccgacaccgcattccttttagagagggtgtcaatctccgcaccgagttcagacaaacccctcattaaagacctgtcactaaagatctccgaggggcagtcactgctcataactgggaacactggaacaggcaaaacttccttgctgcgagtgctgggcggtctgtggacttccactaggggttctgtgcagatgctcacggactttggcccacatggtgttttgtttctgccccagaagccattttttactgacggaactctccgagaacaagttatttacccgctcaaggaagtgtatcctgattctggttcagccgacgatgagcgtattctgagatttcttgaactcgcaggtcttagcaacttggttgccaggacagaaggcctagatcagcaggtcgactggaattggtatgatgtgctgtctccaggagaaatgcaaaggttaagttttgctagattattctacctgcagcctaaatatgcagtgctcgacgaggctaccagtgctctgacggaggaggtcgagtcggagctgtaccgcataggtcagcagctcggcatgacgtttattagcgtcggccaccggcagtccctggaaaaatttcatagtctggtcctgaaactgtgtggaggaggacgctgggagctcatgcgcatcaaagtcgagtag

SEQ ID NO: 180047 - DNA, 297 bp, synthetic construct
  misc_feature 1..297: note = Description of Artificial Sequence: Synthetic coding sequence
  source 1..297: mol_type = other DNA
atgcggagcctgctgctgagcaccgtgggcatcaacaccttcgactatctggggtctatcctgagttatgtggttattgcgattcccattttctctggagtctatggagatctctcgcctgccgaattgtccacactggtgagtaagaacgcgtttgtgtgcatttacctcataagctgtttcacacaactgattgacctgagtacaacactctcggacgtggcagggtacactcacagaattggtcagcttagagaaaccctgcttgacatgtctcttaaatcccaggactgttag

SEQ ID NO: 180048 - DNA, 1800 bp, synthetic construct
  misc_feature 1..1800: note = Description of Artificial Sequence: Synthetic coding sequence
  source 1..1800: mol_type = other DNA
atggccgacaagctgacccggatcgccatcgtgaaccacgacaagtgtaaacccaagaagtgccgtcaagaatgcaagaagtcgtgtccagtcgtgagaatgggcaagctttgtatcgaagtgaccccacaatcaaagattgcctggattagcgaaacactatgcattggctgtggtatatgtatcaagaaatgccccttcggggcgctatcaatcgtgaacctgccttctaacctggaaaaagaaacgacacacagatattgcgctaatgcctttaagctccatagactgcctatccctcggccaggtgaggtgctcggactcgtcggtaccaatggcataggcaaatctactgctttgaagattctcgccgggaagcagaagcctaatcttggcaagtacgatgacccgccagactggcaggaaattctgacctattttcgcggttctgagctccagaactattttacgaagatccttgaggatgatctgaaagccataatcaaacctcagtatgtggaccagattcctaaagccgccaaagggaccgttggttcaatccttgataggaaggacgagacaaagacccaggctatcgtgtgccaacagctggatctcactcacctaaaagaacgaaatgtggaggacctctccggaggcgaactgcagaggttcgcatgcgccgtggtatgcatccagaaagccgacatattcatgtttgatgaacccagctcatatctggacgtgaaacagcggctgaaggctgctatcaccattagaagtttgattaatccagataggtatattatcgtcgtggagcacgacttgagcgtgctggattaccttagcgattttatttgctgtttgtacggggtcccatctgcatacggtgtggtaactatgccgttttctgtgagagagggtataaacattttcttagatgggtacgtgccaaccgagaatcttcgtttccgggacgcttccctcgtttttaaagtggcggaaaccgccaatgaggaggaggtcaagaaaatgtgcatgtataagtacccaggcatgaagaaaaaaatgggcgagtttgagctggccattgttgccggagaatttacagactccgagatcatggtgatgttgggcgagaatggcaccggcaaaacaacgtttatacggatgcttgccggccgcctaaagccagatgaaggcggagaagtgccagtcctcaatgtgagctataagccacagaagatcagtcccaaatccactggttccgtgagacagctcctccatgaaaaaattagggatgcatacacacatccccagtttgtgacagatgtgatgaagcctctgcagatcgagaatatcattgatcaggaagtgcagacactgagcggcggtgagctccagcgcgtcgcactggcgctttgtctcggcaagccagcggatgtctacctgatagatgaaccatctgcctatctggactctgagcagcggcttatggcagcccgtgtggtcaagaggttcattttgcatgcaaaaaagactgcattcgtggtggaacacgatttcataatggccacgtatctcgctgaccgcgtgatagttttcgacggtgtaccgagtaaaaatacagtggccaacagtccacagactcttctcgccggcatgaacaaattcctcagccagctagaaattactttccggcgcgacccgaacaactaccggcccaggatcaataagttaaattccatcaaggacgtcgagcagaaaaaatcaggcaattatttttttctggacgattag

SEQ ID NO: 180049 - DNA, 633 bp, synthetic construct
  misc_feature 1..633: note = Description of Artificial Sequence: Synthetic coding sequence
  source 1..633: mol_type = other DNA
atggccgacaagctgacccggatcgccatcgtgaaccacgacaagtgcaagccaaagaaatgtcggcaggagtgcaaaaagtcatgcccagtcgtgaggatgggtaaattgtgcatcgaggttacgcctcaatctaagatcgcctggataagtgaaacactttgcatcgggtgcggaatctgcatcaagaagtgtccttttggggctctgagtatcgtgaatcttccatccaatctggaaaaagaaacaactcatcgctactgcgcaaacgccttcaagctgcaccgactgcccattccaaggccaggcgaggttctaggtctcgtgggaaccaatggtattggaaaatcaaccgctttgaaaatcctggctggtaagcagaaacctaacttggggaagtacgacgaccctcctgactggcaggagattttgacctactttcggggtagcgaactccagaactacttcaccaaaattctggaagatgacctgaaagccatcattaaaccccagtatgtggaccaaatccctaaggcagcaaaggggactgtaggatccatcctggacaggaaagatgaaaccaagacccaggcaatcgtgtgccagcagctggatctgacacatcttaaatag

SEQ ID NO: 180050 - DNA, 2538 bp, synthetic construct
  misc_feature 1..2538: note = Description of Artificial Sequence: Synthetic coding sequence
  source 1..2538: mol_type = other DNA
atgcccaaggcccccaagcagcagccccccgagcccgagtggatcggggacggtgagtccacttcgccaagtgacaaggtggtgaaaaaaggcaagaaggacaagaaaatcaaaaaaacattctttgaggagctggctgtggaggacaaacaggccggtgaggaggaaaaggtccttaaagaaaaagagcagcagcagcagcagcagcagcagcagcagaagaagaagagagataccagaaaggggcgccgaaaaaaggatgtcgacgatgatggggaggagaaagagttgatggagcggctcaagaagctctctgtgcctacttccgacgaagaagatgaggtgccagctccaaaacctcgggggggaaagaaaactaaagggggcaatgtctttgcggctctcattcaggaccagagtgaggaagaggaagaggaggagaagcaccctccaaagccagccaaaccagagaagaaccggattaataaggctgtaagcgaagagcaacagcctgcgctgaaggggaaaaaaggaaaagaggaaaagagtaaaggcaaggcaaaacctcagaataagtttgctgcactggacaacgaggaggaagacaaagaggaagaaattattaaagagaaggagcctcctaaacagggaaaagagaaagctaagaaagccgaacagggcagcgaggaggagggcgagggtgaggaggaggaagaggagggaggagagagcaaggctgatgatccgtacgctcacctcagcaagaaagaaaaaaagaaactgaagaagcagatggagtatgaacgtcaggtggcgtctctgaaggctgccaatgccgccgaaaatgacttctcagtgagtcaagccgaaatgagctcacgtcaggctatgctggaaaacgctagcgacattaagcttgagaagttttctatatcggctcacggcaaggagcttttcgttaacgctgacctctacatcgttgccggtcgtcggtatggactggtcggtccaaacggtaagggcaagaccactcttctgaagcatatcgcaaacagagcgctctccattccccccaatatcgatgtcttactgtgcgagcaggaggttgtggcagacgaaacacctgccgtacaagcggtgctgagggccgacactaagagactgaagctgttggaggaggagagaagactgcaaggccaattagagcagggagatgatactgcagccgaaagactagaaaaggtatatgaggagcttagagccacaggggccgctgccgccgaggccaaagctcggcggatattggcaggcctgggcttcgatcccgaaatgcagaatcggccaacccaaaaattctcaggcggctggcgtatgagagtttcacttgcccgggctctgttcatggagcctactctgcttatgcttgatgaacctaccaatcatctggaccttaatgcggtgatctggctgaacaactacctgcagggttggagaaagacgctgttgattgtgtcccacgatcagggatttctagatgacgtctgtacagatattatacacctcgatgcccagcggctgcattattatcggggaaactacatgacgtttaagaagatgtaccagcagaaacagaaagagttgctgaaacaatatgagaagcaagaaaagaagttgaaagagctgaaagctggtggaaaaagtaccaaacaagccgagaaacagaccaaggaggcgctgactcgtaagcagcaaaagtgtagacgaaaaaaccaagatgaagaaagtcaggaggccccagagttgctgaagaggcccaaagagtacaccgtccgcttcaccttcccggatcccccccctctgtccccccccgtattgggactacatggagtgacttttggttatcaaggccaaaagcccttgtttaaaaacctggacttcgggatagacatggatagccgaatctgtatcgtgggacccaacggcgtggggaagagcacactgctgctactgctgacaggtaaattaacacctacacatggggaaatgcgtaagaaccaccgtcttaaaattggattctttaaccagcagtacgccgagcaacttaggatggaagagaccccgaccgagtacttacaacgtgggttcaatctgccttaccaggacgcacgaaaatgtttgggccgctttggcctcgaatctcacgctcatactatccagatctgcaaactgtctggaggtcagaaggcacgcgtcgttttcgccgaactcgcatgtagagaaccggatgtgttaattttagatgaacccaccaataacctagacatcgagagcattgatgcactgggggaagctattaacgagtacaagggcgctgtcattgtagtctcccacgatgctcgactaatcactgagacaaattgtcagttgtgggttgtggaggagcagagtgtctctcagatcgacggggacttcgaagattataaaagggaggtactcgaagccctgggcgaggtcatggtgagtcgcccacgcgaatag

SEQ ID NO: 180051 - DNA, 2424 bp, synthetic construct
  misc_feature 1..2424: note = Description of Artificial Sequence: Synthetic coding sequence
  source 1..2424: mol_type = other DNA
atgcccaaggcccccaagcagcagccccccgagcccgagtggatcggggatggtgaatctactagtccatcagataaggtggtaaagaagggaaagaaggacaagaaaatcaagaaaactttctttgaggagttagcagtcgaagacaaacaggcgggagaggaggaaaaagtactgaaagaaaaagagcagcaacagcagcagcagcagcaacagcagaagaaaaagagggacacacggaagggcaggcgcaagaaagatgtcgacgatgatggtgaagagaaggagttgatggagcgactcaagaagctgtcagtgccaacgagtgacgaagaagatgaggtccccgcccccaaaccccgaggcggtaagaaaactaaaggaggtaacgtgtttgctgccctcattcaggaccagtctgaagaggaagaggaggaagagaaacatccccccaagccggcaaaaccggaaaaaaatcgcattaataaagcggtcagtgaggagcagcaacccgctctaaaaggcaagaaaggcaaagaagaaaaaagtaagggcaaagccaagcctcagaacaaatttgctgctcttgataatgaagaagaagataaagaggaggaaattatcaaggagaaggagcctccaaagcagggaaaagagaaagctaaaaaagccgagcaaatggaatatgaacgacaagtggcctctctaaaagccgccaacgcagcagagaacgacttctcagtttctcaggctgaaatgtcttctcggcaagctatgctggaaaatgcctcagacataaagctggagaaattctcaatttcggcccatggaaaggagcttttcgtcaacgccgatctttatatcgtggccggtaggagatatggtcttgtgggcccaaacggcaaagggaaaaccaccctcctcaaacacattgccaaccgagcactatctatcccaccgaatatcgacgtgttattgtgtgagcaagaggtcgtggcagacgaaacacccgctgttcaggccgtgctgagagctgatacaaagcgtctcaagctcctggaggaggagcgccgcctccagggacagctcgagcagggtgacgacacagctgcggagcgattagagaaagtctatgaagaactgcgggcgaccggcgccgctgctgcggaggccaaggctcggagaatcctggctggcctcggcttcgaccccgaaatgcagaatagacccacacagaaattttctggaggatggcgcatgcgggtttcactcgcacgggccctttttatggaacccacactgctgatgctggacgagcccaccaaccatttggatttgaacgctgtgatttggcttaataattatcttcagggctggagaaaaacactcctcattgtgagtcacgatcaggggttcctggatgacgtctgtactgacattatccacctcgatgcacagcgcctgcactattacagaggaaattacatgacattcaaaaagatgtaccagcaaaagcagaaagagttgctgaaacagtacgagaagcaggaaaagaagctgaaggagctgaaagccggcggtaaaagtaccaagcaagccgagaagcagacaaaagaagccttaacacgcaagcaacagaaatgcagacggaaaaatcaggacgaagagagtcaggaggcccctgaactcctcaaacgtcctaaggagtacacggttcggtttacgtttcccgaccccccacccctctcccctcccgtcttaggtctccatggggtcacattcggataccagggacaaaaacctctgttcaaaaacctggacttcggcattgatatggactcccgcatctgtatagtgggtccaaacggtgtggggaaatcgacgctgttgctgctgttaaccggaaaacttactcctacccatggtgagatgagaaagaaccaccgactcaagattggattttttaatcaacagtacgctgaacaactgagaatggaagaaacccccactgaatacctccaaagagggttcaacctgccttatcaggacgctagaaaatgtctgggcaggtttggtttggagtcacacgcacataccatccagatctgcaagctgtccggcggacagaaagccagagtggtgttcgcagagctcgcctgtcgggagcccgacgtactgatccttgacgagcccacaaacaatctggacattgagtctatcgatgccctgggagaagccataaatgaatataaaggggcagtcatcgtagtgagccacgacgcccgactgattaccgagacgaactgccaactatgggtagtggaggagcagagcgtcagtcagattgatggcgatttcgaggattacaaaagggaggtgctggaagcgctgggggaggttatggtctctcgccccagagaatag

SEQ ID NO: 180052 - DNA, 2424 bp, synthetic construct
  misc_feature 1..2424: note = Description of Artificial Sequence: Synthetic coding sequence
  source 1..2424: mol_type = other DNA
atgcccaaggcccccaagcagcagccccccgagcccgagtggatcggagacggcgagtccaccagtccctcggataaggtggtcaagaaagggaagaaagataagaagattaaaaagaccttttttgaggagctggcagtggaggataagcaagccggtgaggaggagaaggtgctgaaagagaaagaacagcagcagcagcagcagcagcaacaacagaaaaaaaagcgcgatactaggaagggcagacgcaagaaggacgtggacgacgatggtgaggaaaaggaattaatggagcgactaaagaaactgtctgtaccaacctccgacgaggaggacgaagttccggccccaaagccccggggagggaaaaagaccaagggcggtaatgtttttgccgctttgatccaggaccagtctgaggaagaagaggaggaggaaaagcacccacccaaaccagctaagccagagaaaaaccggatcaataaggccgtcagcgaagagcagcagcccgcgttaaagggcaaaaagggcaaggaggaaaaatcaaaggggaaggcaaaaccacagaacaagtttgccgccctggacaatgaggaagaggacaaggaagaagagatcattaaggagaaggaaccacctaagcaaggcaaagagaaagccaaaaaggctgagcagatggaatacgaacgtcaggtggccagcctgaaggccgctaatgccgctgaaaatgattttagcgtgagtcaggccgaaatgagttcaaggcaagctatgctggaaaatgcatctgatatcaaattggagaaatttagtataagcgcgcatggaaaagagctctttgttaatgctgatttatacatcgtcgcaggtaggcgctacggccttgtggggccaaacgggaaaggaaagactaccctcctcaagcatattgccaatcgtgccctgtcaatcccacccaatattgacgtccttctgtgcgagcaggaagttgtggccgacgaaacaccggcagttcaggccgtgcttcgggcagataccaaaaggctaaaactgctagaagaggagagacggctgcaggggcaactggaacagggtgacgacacggccgccgaacgcttagagaaggtttatgaagagcttcgggctaccggagctgcggcagctgaggccaaagcaaggcggatcctggcagggttgggatttgatccagagatgcaaaacaggccaactcaaaaattttccggcggatggagaatgagagtttccctggctagggccctctttatggagccgacgctcctgatgctggacgagcctacaaaccacttagatctaaacgcggtaatttggctgaataactacctacaaggatggcggaaaactctgctaatcgtctctcacgatcaggggttcctagacgatgtttgtaccgacatcatccaccttgatgcgcagagactgcattactaccggggcaattatatgacctttaagaaaatgtatcaacagaaacagaaagaactgttgaaacaatacgagaaacaagagaaaaagctgaaagagctcaaagccgggggcaaaagcactaaacaggccgagaagcagaccaaggaagcgttaacgaggaagcagcagaaatgtcggaggaagaaccaagacgaagagagccaagaagctcccgaattgctgaaaaggccaaaggaatacacagtgagattcaccttcccagaccctccaccattgtctccacctgtattgggacttcatggcgtaacctttgggtatcagggccagaagcccctctttaagaatctggatttcgggatcgatatggattcccgaatctgtatcgttggaccaaacggggtcggcaagtcaactctcctactgctgttgaccggcaaactcacccctacacatggagagatgcggaagaatcacaggcttaagatcgggttctttaatcagcagtatgctgaacagctcagaatggaagagacgcctacagaatacctacagagagggttcaacctgccgtatcaggacgctcgtaaatgtctcgggcgatttggcctcgaaagtcatgcccatactatccagatctgtaaactctctggcggacagaaagcaagagtggtttttgctgaactggcctgcagggagccagacgtgctgattctggacgaaccgaccaacaatctggatatagagagtattgatgctctgggggaggcaatcaatgagtacaagggagctgtgattgtggtaagtcacgatgccaggttgataaccgagacaaattgccagctatgggtggtcgaggaacagagtgtgagccagatcgacggtgacttcgaggattacaagcgagaagtactcgaggctttgggggaagtgatggtgtctcgccccagagagtag

SEQ ID NO: 180053 - DNA, 2538 bp, synthetic construct
  misc_feature 1..2538: note = Description of Artificial Sequence: Synthetic coding sequence
  source 1..2538: mol_type = other DNA
atgcccaaggcccccaagcagcagccccccgagcccgagtggatcggcgatggcgagagcacaagtccttctgacaaagtggttaaaaagggcaaaaaggacaaaaagatcaagaagacctttttcgaagagctggccgtggaggataaacaggccggcgaggaggaaaaagtactaaaggagaaggaacaacagcaacaacagcagcaacaacagcagaaaaagaaacgtgacacaaggaaggggcgcaggaagaaagacgtggatgatgacggcgaagaaaaagagctgatggagcgactgaagaaactgagtgtgcctactagtgatgaggaagatgaagtgccagcacctaagcctaggggtggaaagaagacgaagggtggaaatgtcttcgccgctcttatccaggatcagtccgaggaggaagaagaggaagaaaagcaccctcccaaaccagccaaacccgagaagaaccgcatcaacaaagctgttagtgaagagcagcaacctgcccttaaaggaaagaagggaaaggaagaaaaaagcaaagggaaagctaaaccacagaataaatttgcagcactggataatgaagaagaggacaaggaagaggagattattaaggaaaaggagcccccaaaacaaggaaaagagaaggccaagaaggctgaacaggggtcagaggaagagggagaaggcgaagaggaggaagaagaaggaggggaaagcaaagcagacgatccttacgcacatttgtctaagaaagaaaaaaaaaagctgaaaaaacagatggaatatgaacgccaggtggcctccctaaaagccgctaacgcagccgagaacgatttctcggtgagccaggctgagatgagcagtagacaggccatgctggagaatgccagcgacataaagctagagaaattttccatcagcgcccacggtaaagagttattcgttaacgccgacctgtacatcgttgcagggcgacgctacggccttgtcgggcctaacggaaaagggaagactaccctgctgaagcatattgccaacagggctctgagcatccctccgaatatcgacgtgcttctctgcgagcaggaagtcgttgccgacgagacacctgcagtgcaggccgtactccgggccgacaccaaacgtctgaagctcctcgaggaagagcgtcggttgcaggggcaactggaacagggcgacgatacagcagccgagcggttggaaaaggtctatgaagagcttcgtgccaccggagccgctgccgctgaggctaaagctcgccgtattctggctgggttgggttttgatccagaaatgcagaatcgaccaacccagaagttctctggaggatggcggatgagagtgtccctggcaagagcactcttcatggagccgactctcctgatgctggacgagcccactaatcatctagatctcaatgccgtgatctggctcaacaactacctccagggttggcgcaagacccttctcattgtgtcgcacgaccagggctttctggacgatgtgtgcaccgacatcatccacctggatgcccagcgcctgcattactatcgtggcaactacatgactttcaagaaaatgtaccaacagaagcagaaagagctcctgaaacagtatgaaaaacaggagaaaaagctgaaagagctgaaggcgggcggcaagtccacgaaacaagccgaaaaacagacaaaggaagcactgacccggaaacaacagaagtgtcgccgcaaaaaccaagatgaagagtctcaggaagcaccggagctattaaagcgccctaaggagtatacagttcgattcaccttccccgacccgcctccgctcagtccaccagtcctcggcttacacggtgtgacatttggttatcaggggcagaaacccctattcaagaacctggatttcgggatagacatggattccaggatttgtatagtcggtcctaacggagtgggcaagtccacattactgctccttcttacgggaaagcttacccctacgcatggcgagatgaggaaaaatcaccgcttgaagattggcttcttcaatcagcagtatgccgaacaactccggatggaagaaacccctaccgagtatctccagcgaggcttcaatctaccgtatcaggatgccaggaagtgcttagggcgattcggtctggagtcccatgcacatacaattcagatctgtaaactgtcaggaggccagaaagcacgagtggtgttcgctgagcttgcatgccgggaaccagacgttcttatcctggatgagcccactaacaaccttgatattgaatccatcgacgctctgggagaggcgattaacgaatacaagggggctgtgatcgttgtgagccacgatgcacgactgattactgagaccaactgccagctctgggttgttgaggagcagtcagttagccaaattgatggagacttcgaggattacaagcgtgaagtactggaggctttaggcgaagtcatggttagcagacctcgggagtag

SEQ ID NO: 180054 - DNA, 717 bp, synthetic construct
  misc_feature 1..717: note = Description of Artificial Sequence: Synthetic coding sequence
  source 1..717: mol_type = other DNA
atgcccaaggcccccaagcagcagccccccgagcccgagtggatcggagacggtgaatcaaccagcccttccgataaagtggttaagaagggtaagaaggacaagaaaatcaaaaagacattcttcgaggagctcgcagttgaggacaagcaagccggagaggaagagaaggtgctcaaggaaaaagagcagcagcagcagcagcagcagcaacagcagaaaaagaagcgcgacacccgtaagggacggcgcaagaaggacgtggacgatgacggtgaagaaaaagagctcatggagcgcctgaagaaactgagccgggggttcaatctcccataccaagacgcacgcaaatgcctggggcggttcggccttgaaagccacgcccataccatccagatttgcaagctttccgggggccagaaagccagagtcgtgtttgctgaactggcctgccgcgaaccggacgtcctgatactggacgagcctacaaataatctggacatcgagagtattgacgccctgggtgaggctataaacgagtataagggggccgtgattgtggtctcacacgatgcacgactgatcaccgagaccaattgtcagttatgggttgttgaggagcagtcagtgagccagatcgacggagactttgaggactacaagcgcgaggtcctggaagcgctgggggaagtgatggtctctcggcctcgggaatag

SEQ ID NO: 180055 - DNA, 2424 bp, synthetic construct
  misc_feature 1..2424: note = Description of Artificial Sequence: Synthetic coding sequence
  source 1..2424: mol_type = other DNA
atgcccaaggcccccaagcagcagccccccgagcccgagtggatcggtgacggggaatcaacgagcccttccgataaggtggtaaagaagggcaagaaggataagaaaattaagaaaacatttttcgaggagctggccgtggaggataagcaggccggcgaggaggagaaggtcctgaaagaaaaggaacagcagcagcagcagcagcagcagcagcagaagaagaaaagggataccaggaagggtagacgcaagaaggacgttgacgacgacggagaagagaaggagctaatggaacgtctgaagaagctgtctgtgcctacaagcgacgaagaagacgaagtgcccgcaccaaagccacggggcggaaagaagacaaaaggcgggaatgtgtttgctgcactgattcaagatcagagcgaagaggaggaggaggaagagaagcacccgccaaagccagccaagcccgagaaaaatcgtataaacaaagctgtctcagaggaacagcaacccgctctgaagggtaagaaaggcaaggaagagaaatctaagggtaaagccaaaccccagaacaaattcgccgccctcgataatgaagaagaggacaaggaggaagaaattatcaaagaaaaggagccacccaaacaggggaaggagaaagcaaagaaagctgagcaaatggaatacgaacggcaggtcgcctctctgaaggcagctaacgcagctgagaatgatttctcagtgtcgcaggctgagatgtctagcagacaggcaatgctcgaaaacgcctctgatattaagctggaaaaattttcaataagtgcacacgggaaggaactcttcgtgaatgccgatctgtacattgtcgcaggcagaagatatggtctggtgggaccaaacggcaagggtaagactaccttactgaagcacatcgccaaccgcgccctttcaattccccctaatatagatgttctgctgtgtgagcaagaagtggtcgctgacgaaactcctgcggtgcaggccgtgctccgagccgacactaaacgactgaagctcctcgaagaagaaagacggctgcaaggccagctggaacagggcgacgataccgcagctgaaaggctggagaaggtgtacgaagagctgagagctactggcgcagcggctgccgaggctaaagctcgccggatcctggcaggcctcgggttcgaccccgaaatgcagaaccggcctacacagaaattttcaggaggctggagaatgagagtgagtctggcgcgagctttatttatggaacccactcttcttatgttagacgagccaactaaccacctcgatttgaacgcagtgatttggttgaataactatctgcagggttggagaaaaacacttctgatcgtgagccacgaccagggatttctggatgacgtatgcaccgacattatacatctggatgcccagcgcctgcactactatcgcggcaattacatgacctttaagaaaatgtaccaacagaaacagaaggaactgctgaagcagtacgaaaagcaggagaaaaagctcaaagaattgaaggccggtggaaaaagcactaagcaggccgaaaaacagacgaaagaagctctgacgagaaagcagcagaagtgtagacgcaaaaaccaggacgaagaatctcaggaggctcctgagttgctgaagaggcccaaggagtacactgtacggttcacatttcctgaccctccacctttaagccccccagtcctgggcttgcatggtgtcaccttcggctatcagggccaaaagcctctgttcaagaatttagactttggcatcgatatggatagcagaatatgcatcgttggcccgaacggcgtggggaaatcaaccctacttctgcttctcaccgggaagttgactcctacacacggcgaaatgaggaagaaccaccggctgaaaatcggcttctttaatcaacagtacgctgaacagcttcgcatggaggaaaccccaacggaatacctgcagcgggggttcaacttgccctaccaggacgccagaaaatgcctgggtcgctttggtctcgaatcacatgcccatacaatccagatttgcaagttgtctggaggacaaaaggccagagttgtatttgccgaattggcctgtagagaaccagatgtcctgatcctcgatgagcccaccaacaacctcgacattgagagtatcgatgccttgggggaagcaatcaacgagtacaaaggggccgtgatagtggtgtcacacgatgcaaggcttattacagagacaaactgccagttatgggtcgttgaagagcagagcgtgtcacagatcgacggcgattttgaagattacaaaagggaagtgttggaagcactcggagaggtgatggtctcgcgcccgagagagtag

SEQ ID NO: 180056 - DNA, 717 bp, synthetic construct
  misc_feature 1..717: note = Description of Artificial Sequence: Synthetic coding sequence
  source 1..717: mol_type = other DNA
atgcccaaggcccccaagcagcagccccccgagcccgagtggatcggtgacggcgaatctaccagccccagcgacaaggtcgttaaaaaaggtaagaaagataagaaaatcaagaagactttctttgaagaactcgccgtcgaggacaaacaagctggggaagaggaaaaagtgttaaaggagaaggaacaacagcaacagcagcagcagcagcagcagaagaaaaagagagatacacgtaagggtagacgtaagaaagatgttgatgacgacggcgaagagaaggaactgatggaaagactgaagaagctgagccgcgggttcaatttgccctaccaggacgcacggaaatgcctggggcggttcggcctggaatcccatgcacatactatccaaatctgtaaactgtctggaggccagaaagctagagtcgtctttgccgagttagcgtgtcgggaacctgatgtcctgattctggatgaaccgactaacaatcttgatattgaatccatcgacgcactgggcgaggcaatcaacgaatacaaaggagcagtcatcgtggtcagccacgacgcaaggctgataaccgagaccaactgccagctgtgggtcgtggaggagcaaagtgtgtcccagatcgacggggacttcgaagactacaaacgggaagttctggaggctctgggagaagtgatggtgagtcggcctagggagtag

SEQ ID NO: 180057 - DNA, 1023 bp, synthetic construct
  misc_feature 1..1023: note = Description of Artificial Sequence: Synthetic coding sequence
  source 1..1023: mol_type = other DNA
atgcccaaggcccccaagcagcagccccccgagcccgagtggatcggagacggcgagtcaacaagcccctctgacaaggtggtgaagaaagggaagaaggataagaagatcaagaagacattcttcgaggagctggctgttgaagataagcaagctggtgaagaagagaaggtacttaaggaaaaggagcagcagcagcaacaacagcagcaacaacagcagaaaaaaaaacgcgacaccaggaagggtcggcgtaaaaaagacgtggatgatgacggggaggagaaggagcttatggaaagactcaaaaaactctcagttccaactagtgacgaggaagatgaagttccggcccccaagcctcggggggggaaaaagaccaaggggggaaacgtgttcgccgccctgatccaggaccagtctgaagaagaggaggaagaggagaagcacccccctaagcctgcaaaacccgagaagaacagaatcaacaaggctgttagcgaggaacagcagcctgcactcaaaggaaagaaaggcaaagaagaaaagagcaagggcaaagcgaagccgcaaaataagttcgctgcactggataacgaggaggaagataaggaagaagagataattaaagaaaaagagcctccaaaacaggggaaggagaaagcgaagaaggccgagcaggggtccgaagaggaaggggagggtgaggaagaggaggaagagggcggtgagagtaaggcagatgacccctatgcccatttgagtaaaaaggaaaaaaaaaaattgaagaagcagatggagtatgaacgacaggtagcctctttgaaggccgccaatgcagctgaaaacgactttagcgtaagccaggctgagatgagttcaagacaggcaatgctggagaacgcttcagatattaagctggaaaaattttcaatcagcgcacacggcaaagagctgtttgttaatgcagatctgtatattgtggctggaaggcgatatggcctggttggtcctaacgggtag

SEQ ID NO: 180058 - DNA, 2538 bp, synthetic construct
  misc_feature 1..2538: note = Description of Artificial Sequence: Synthetic coding sequence
  source 1..2538: mol_type = other DNA
atgcccaaggcccccaagcagcagccccccgagcccgagtggatcggcgatggcgagagcacgtctccctccgataaagtagttaagaagggaaaaaaggataagaagattaagaagactttttttgaggagctcgccgtagaggataagcaggcaggtgaagaggaaaaggtcctgaaggagaaggagcagcaacagcagcaacagcagcagcagcagaaaaaaaaaagagatactcgcaagggcaggcgcaaaaaagacgtagatgatgatggggaagagaaagaactaatggagcgattgaaaaagctgtctgtcccaacctctgacgaagaagacgaggtacccgcccccaagccccgcgggggcaagaagacaaagggaggcaatgtatttgcagccctgattcaggaccaatccgaagaggaagaagaggaggaaaaacacccgccgaagccagctaaaccagaaaagaaccgaatcaataaggccgtctcagaggaacagcagccggctctgaaaggaaagaaaggaaaggaggagaaatctaaaggaaaggctaaaccccagaacaagttcgctgccctagataacgaagaggaagataaggaagaggagatcattaaggagaaagaaccacccaaacaagggaaggaaaaagctaagaaggcagagcagggctctgaagaagaaggtgaaggggaggaggaggaagaagaaggcggcgaatctaaagccgacgacccctacgctcatctgtccaagaaagagaagaaaaagctcaagaagcaaatggaatacgagcgccaggtggctagtctgaaagccgcaaatgcagcggaaaatgatttcagcgtaagccaggctgaaatgtctagcaggcaggccatgcttgagaatgcatctgacataaaattagaaaagttttccatcagtgctcacggcaaagaattgtttgtgaatgcggacttgtacatagtcgctggccgcagatacgggctcgttggccccaacggaaaagggaaaaccaccctgctgaagcacattgctaatcgcgcactcagtattccacctaatatcgatgttctcctatgcgaacaggaagttgtcgccgacgaaacccctgccgttcaagccgttctcagggctgacactaagaggctcaagctcctggaggaggaacgaagacttcagggacagcttgaacaaggagatgataccgctgccgaacgtttggagaaagtgtatgaggaactgagggccactggagcagccgcagccgaagcaaaagctagaagaatactcgctggccttgggtttgacccagaaatgcaaaacaggccgacgcaaaaattctcaggtggctggagaatgagggtctcccttgctagggcactgttcatggaaccgactttgctcatgctcgatgagcctacaaaccatctggacctgaatgccgtcatatggctgaacaactacctccaggggtggcgtaagaccctccttatcgtgagtcacgatcagggctttttggatgacgtgtgcaccgatattattcacctggatgcacagcgactacattactacagaggcaattacatgacgtttaaaaagatgtaccagcagaagcagaaggaactgctgaaacagtacgagaaacaagagaagaagctaaaggaactcaaagccggaggaaaatctacaaaacaagccgagaaacagaccaaggaagctttgaccaggaaacagcagaagtgcaggcggaagaatcaagatgaggaatcgcaggaggctccagagcttttgaagcgcccaaaagaatacacagtccggtttaccttccccgatccgcccccactctcgccacccgtcctcggtctccacggcgttaccttcgggtaccagggtcaaaagcccctatttaaaaatctcgatttcggcatagatatggattcacgtatttgtatagttggccccaatggcgtcggcaaaagcaccctgttactcctcctcacgggaaaactgactccaacacacggggagatgagaaagaaccaccgattaaagatcgggttctttaaccagcagtatgcagagcagttgaggatggaggaaacccctaccgagtacctccagagaggatttaatttgccatatcaggacgcacgtaaatgtctgggccgcttcggactcgaaagccacgcccacacgatccagatctgtaaactttccggtggccagaaagcccgcgtagtgtttgccgaattggcatgtcgggaaccagacgtactgattttagacgaacctaccaataacctcgatatcgaatctattgatgctttgggtgaagccatcaacgaatacaagggtgcagtcatcgtcgttagccatgacgcaagacttataacagaaacgaactgccagctttgggtagttgaggagcagtccgtgagccagattgacggagacttcgaggactacaagcgggaagtactcgaggccctgggcgaggtgatggtgagcagacccagagagtag

SEQ ID NO: 180059 - DNA, 2424 bp, synthetic construct
  misc_feature 1..2424: note = Description of Artificial Sequence: Synthetic coding sequence
  source 1..2424: mol_type = other DNA
atgcccaaggcccccaagcagcagccccccgagcccgagtggatcggcgacggggagtcaactagcccaagtgacaaggtggtaaagaaagggaagaaggacaagaagattaagaagactttcttcgaggaactcgcagtggaagataaacaagctggagaggaagagaaggtcttgaaggagaaggagcaacagcagcagcagcagcagcagcagcagaagaaaaagagggacacgaggaaaggccgtcggaagaaggacgtcgacgacgacggcgaggagaaggagcttatggaaaggttaaagaagctcagcgtgccgaccagcgatgaagaggacgaggttcccgctcccaaacctcgcggcggcaaaaagactaaaggtgggaatgtttttgctgccctgattcaggatcagtctgaggaagaagaggaggaagagaagcacccccctaagcccgccaagccagagaaaaaccggatcaataaggcagtaagtgaggagcagcaacctgctctgaagggcaaaaaaggaaaggaggagaagagcaaggggaaagctaagccgcagaataagttcgcggcacttgataacgaagaagaggacaaagaagaggaaattataaaggagaaagaacctccaaaacagggaaaagaaaaggcaaagaaggctgaacagatggagtatgaaaggcaagtcgcttcattaaaggctgcgaacgctgccgagaacgatttctctgtctcacaggccgagatgtcgagccgacaggccatgttggagaacgcctcagatattaaactggaaaagtttagtatcagtgcccacgggaaggagctttttgtgaacgcagacctgtacatagtggccggcagacggtacgggctggtagggccaaatgggaaagggaaaaccaccctgctgaagcatattgccaatcgggctctatccattccaccaaacattgatgtgttactgtgtgaacaggaggtggttgcagatgaaacgccagcagttcaggctgtccttcgagcggataccaaaagactgaagctgctggaagaggagcggagactgcaaggacagctcgaacagggagatgataccgccgccgagcgcctcgagaaagtgtatgaagagctgcgcgcaactggggctgcagccgctgaggcaaaagcacgccggattctagccggcctagggtttgaccccgaaatgcagaaccgccccactcagaaattttcaggagggtggcgcatgagggtatcactggcaagagccctcttcatggaacccacacttctaatgctagacgagcccaccaatcacctggatcttaacgcagtcatttggctcaataactacctgcagggctggagaaagacactactcatcgtctcccacgatcagggatttttagatgatgtctgtaccgatattatccatctagacgctcagagattgcactactaccgaggcaattacatgaccttcaagaaaatgtatcaacagaaacagaaagaactactaaagcagtatgagaagcaggagaagaagctgaaagaactgaaggccggagggaagagcacaaaacaggcagaaaaacaaaccaaggaggcactcacgaggaagcagcagaagtgccgaagaaagaaccaggatgaagagtcccaagaagcacccgagctgctgaagaggcccaaggaatacacagttaggtttaccttcccagatccacctcccctcagtcctcctgtgttgggactccacggggtgacttttgggtaccagggacaaaaacctctgttcaagaacctcgatttcggcatcgacatggacagtaggatttgtatcgtggggcctaacggtgttggcaaatctactcttctgttactcctgaccggaaagctcactccaacgcacggcgagatgaggaaaaaccacaggctcaagatcgggtttttcaatcagcagtacgcggagcagcttcggatggaggagacgcctaccgaatatttgcagagaggtttcaacttgccatatcaggacgcccgaaagtgcctcggccgcttcgggcttgagagtcatgcacatactattcagatctgtaaactgtcaggaggacagaaggcacgcgtcgtcttcgcagaacttgcctgccgtgagcccgatgttctaattctcgacgagcccacgaacaatctggatatcgaatcaattgatgcgctgggcgaggccattaacgagtacaaaggcgctgtgatcgtcgttagccacgatgctcggctgatcactgaaacgaactgtcagctgtgggttgtggaagagcagagcgtttctcagatcgatggggacttcgaggactataagcgcgaggtcttagaggcactgggcgaggtgatggtgtcccgccctcgagagtag

SEQ ID NO: 180060 - DNA, 2424 bp, synthetic construct
  misc_feature 1..2424: note = Description of Artificial Sequence: Synthetic coding sequence
  source 1..2424: mol_type = other DNA
atgcccaaggcccccaagcagcagccccccgagcccgagtggatcggggatggtgagtctacttctccaagcgacaaagtcgtaaagaaaggtaagaaagacaagaagatcaaaaaaacctttttcgaagaacttgctgtggaggacaagcaggctggagaggaggagaaagtcctgaaagaaaaagagcagcagcagcagcagcagcagcagcagcagaaaaagaagcgcgacactcgcaaaggacggcgaaagaaggacgttgatgacgacggcgaggaaaaagagctgatggagaggctgaaaaaactgagtgtacctaccagtgatgaagaagacgaggtgcccgcgcccaagccacgggggggcaaaaagactaaagggggaaacgttttcgcggcgttaatccaagatcagtcagaggaggaagaggaagaagagaagcatcctcccaaaccagcgaagcctgagaaaaataggattaataaggccgtgtcagaagagcaacaacctgctctgaaaggaaaaaagggtaaagaggaaaagtcaaaagggaaagccaagccgcagaataagtttgcagccctggacaatgaagaagaagacaaagaagaggagataattaaggaaaaggaacctcctaagcagggtaaggaaaaggcaaaaaaagctgagcagatggagtacgagcgacaggtagctagcctgaaggctgctaatgcagccgaaaacgattttagcgtgagccaagccgagatgtcctcccggcaggcaatgctggagaatgcttctgacattaaactggaaaaattttcgatttcagctcatggaaaggaacttttcgtgaatgccgacctgtatatcgttgcaggacggaggtatggactcgtgggccctaatgggaagggcaagaccaccttgttaaagcatatcgccaatagggcgctgtccattccgcctaatattgatgtgcttctctgtgagcaggaggtggtcgccgatgagaccccagctgtgcaggccgtccttcgcgccgacaccaagagactcaagcttttagaggaagaaaggcgactgcagggccaacttgagcagggcgatgacaccgcagccgaacgtctggagaaggtgtacgaggagctgcgcgctaccggcgccgccgccgctgaggccaaggcacgacgcatcctggcgggcctgggatttgacccggagatgcagaatagacccacgcaaaagttctcagggggatggcgaatgcgagtgagtcttgctcgggccttatttatggaacccactctattaatgctcgacgagccgactaatcacttggacctgaatgcggtaatttggctgaataactacttgcaagggtggcgcaagaccctgctgatcgtatctcacgatcaggggttcttagacgacgtgtgtacggatattattcacctggacgctcaacgcctccactactataggggcaactatatgacctttaagaagatgtatcagcagaagcagaaggagctcttgaaacaatatgagaagcaggagaagaaactgaaagaattgaaggccgggggcaaatccacgaaacaggccgagaagcagaccaaagaggccctgactagaaaacaacaaaaatgccggaggaagaatcaagacgaggaaagtcaggaagctcccgagctgcttaaacgtcccaaggagtacaccgtgcgatttaccttccccgatcccccaccactgtctcctccagttctcggactccacggggttacctttggatatcagggccagaaaccgctatttaagaacctggatttcggaattgatatggattcgcggatctgcattgtaggtccgaatggggttggcaagagtaccctgttattgcttttaaccggcaagttgactcccactcacggcgaaatgcgcaaaaatcataggctcaagattggtttcttcaatcagcagtacgccgagcaactgagaatggaagagaccccaaccgagtatcttcaacggggcttcaatctgccataccaggatgcccgcaaatgcttggggagattcggcctggaatcccacgcccacacgattcagatatgcaaactgagcgggggccagaaggctagagtcgtgttcgccgagctcgcttgcagagagcctgatgttcttatcttggacgagcctacgaacaacctcgacattgagagcattgacgcgttgggggaggcaataaatgaatataagggagcagtgattgtcgtatcccacgatgcacgtctgatcacagaaacgaattgccaattgtgggtggtggaggagcagtccgtgagccagatcgatggggattttgaggactacaaaagggaggtcctggaggcattgggcgaggtcatggtgtcaagaccgcgggaatag

SEQ ID NO: 180061 - DNA, 717 bp, synthetic construct
  misc_feature 1..717: note = Description of Artificial Sequence: Synthetic coding sequence
  source 1..717: mol_type = other DNA
atgcccaaggcccccaagcagcagccccccgagcccgagtggatcggcgacggggaaagtacctctccaagcgacaaggttgtgaaaaagggcaagaaagataaaaaaattaaaaagaccttcttcgaggagcttgcagttgaagacaagcaggccggggaggaagagaaggtcctcaaggagaaagagcagcagcagcagcagcagcagcagcagcagaaaaaaaaaagggacacaaggaagggccggcgcaaaaaggatgtggacgacgacggggaggagaaagaacttatggagcggctcaagaaactctcccgaggctttaacctgccgtatcaggatgctagaaaatgcctgggtaggtttggcctggaatctcacgcacatacaatccagatttgcaagctcagtggcggacagaaggccagggtcgtttttgccgagctggcgtgtcgcgaacctgatgtactaatcctggatgagcccaccaacaacttggatatagagtccatcgacgccctgggcgaagctatcaatgagtataaaggggccgtgatagttgtatcacacgacgcaaggctcatcactgagacaaattgtcagctctgggtggtggaggaacagagcgtgagccagattgatggtgactttgaagactacaaaagggaggttctggaggcactgggagaggtgatggtaagccggcctagagaatag

SEQ ID NO: 180062 - DNA, 1023 bp, synthetic construct
  misc_feature 1..1023: note = Description of Artificial Sequence: Synthetic coding sequence
  source 1..1023: mol_type = other DNA
atgcccaaggcccccaagcagcagccccccgagcccgagtggatcggggacggcgaaagtacatccccttcagataaagttgttaaaaagggcaaaaaagataagaaaataaagaagacgttttttgaggagctggccgtggaagataaacaggcaggcgaggaagagaaggtgttgaaggaaaaagaacaacagcaacagcagcagcagcagcaacagcagaaaaagaagagagatactaggaaggggcgtagaaagaaggacgtagacgacgatggcgaggaaaaagaactaatggaacggctcaaaaaactgtccgtacctacttctgatgaggaagatgaggtccctgcccccaaacctagagggggtaagaagacaaagggcggaaatgtcttcgccgcgctgatacaggaccagagtgaagaggaagaggaagaggagaaacacccgccaaagccagccaaaccagaaaagaatcggatcaataaggctgtgtccgaggaacagcagccagcgcttaagggaaaaaaggggaaagaagagaaaagcaaaggcaaagcaaaaccacagaataaattcgctgccctagacaatgaggaggaggacaaggaagaagaaatcatcaaagagaaggaacctcctaaacagggaaaggaaaaggcaaaaaaggccgaacagggcagtgaagaggagggggagggcgaggaagaggaagaagagggaggcgagtctaaggcggacgacccatacgcccacctgtcgaagaaggagaaaaaaaagctgaagaaacagatggagtacgagagacaagtcgcctcgttaaaggcagccaacgcagccgagaacgacttttccgtgagtcaggctgagatgtcctcaaggcaggccatgctggagaacgcttccgacatcaagttggaaaaattttccatttccgcgcacggcaaggagctgtttgttaatgccgacctgtacatcgtcgcagggcggcggtatggcctcgtcggccccaatgggtag

SEQ ID NO: 180063 - DNA, 2538 bp, synthetic construct
  misc_feature 1..2538: note = Description of Artificial Sequence: Synthetic coding sequence
  source 1..2538: mol_type = other DNA
atgcccaaggcccccaagcagcagccccccgagcccgagtggatcggagatggcgagtccacctctccaagtgataaggtggtgaagaagggaaagaaggacaagaagataaaaaaaacattttttgaagagctagccgttgaggataagcaggccggtgaagaagaaaaggtacttaaagagaaggaacagcaacaacagcagcaacagcagcagcagaaaaagaagagagacactcgcaaggggaggcgtaaaaaggatgtggacgacgatggagaagagaaagagctgatggaacgtctgaaaaaactttcagtgcccacgtctgatgaggaggacgaggtgccagcccctaaacctcgcggcggcaaaaagacgaagggaggtaatgtctttgctgctctgatacaggatcagagcgaggaggaggaagaggaggaaaaacacccacctaagccagccaagcctgagaagaatagaatcaacaaagcagtttccgaggagcaacagcctgcactgaagggaaagaaaggtaaagaagaaaagtctaaaggtaaggccaagccccagaacaagtttgccgccctggacaatgaggaggaagataaggaggaggagattattaaagaaaaggagcccccgaagcaggggaaagaaaaagctaaaaaggccgagcaggggtctgaagaggagggggagggagaagaagaggaggaggaaggaggagaaagcaaggctgacgatccctacgctcacttatcgaaaaaggaaaagaaaaagttgaaaaagcaaatggaatacgaaagacaggtggcgtccttaaaggctgccaacgcagcagagaatgatttttccgtgtcccaagcggagatgtcctcccggcaagcgatgctggaaaacgcctcagatattaagttggagaagttcagtatctcggcccacggaaaggagctgttcgtgaacgctgacttgtacatcgtcgctggccggcgctacggactcgtgggccccaacggcaagggtaaaaccacacttctgaaacatattgctaatcgagccctgagcataccaccaaacatcgacgtcctcctgtgtgagcaggaagtggtggccgacgagactccagctgtccaggccgtcctcagggctgataccaagcgtcttaagcttcttgaggaagagaggcgtctgcagggccagctggaacagggtgatgacaccgccgctgagcggctcgagaaagtctatgaggaactgagggccacaggggctgccgctgccgaggctaaggcacgtagaattcttgctgggttaggttttgatcccgaaatgcagaacaggccaacccagaaatttagtggagggtggagaatgcgtgtgagcctcgcccgagccctgttcatggaaccaacactgcttatgttagacgaacctacaaaccacctggacctcaacgctgttatctggctgaataactaccttcaggggtggcgcaagaccctcctgatagtaagccacgaccaaggtttcctggacgacgtctgtactgacataattcatctcgatgctcaaagactgcattactatagaggtaactacatgacattcaagaagatgtaccagcagaagcaaaaggagttgctgaagcagtatgagaaacaagagaagaagctgaaggaactaaaggctggaggtaagtctaccaaacaggcagagaaacagactaaagaagccctgacacggaagcagcagaagtgtcgccggaagaaccaggacgaggagtcacaggaggccccagaattgctgaagcgacctaaagagtatacagtgcgattcacctttcccgatcccccaccgttgtccccccctgtgctggggcttcacggagtgacattcggataccagggccaaaaaccactttttaagaatcttgatttcggaatcgacatggactcacgcatttgcattgtagggccaaatggcgtgggcaaatccactttgttgctcctgttgaccggcaagcttactcctacccatggagagatgcggaaaaatcatagattgaagattggtttcttcaaccaacaatatgccgagcaactgaggatggaggaaacaccaactgagtacttgcagagggggtttaatctgccctatcaggatgccagaaagtgtttaggaaggtttggcctggagtcgcacgcgcataccatacagatctgcaaactgagcggtggccagaaagcaagggtagtctttgcggaactcgcctgtcgtgaacccgatgtcctgattctggatgagcctaccaacaatctcgacatcgagtccatcgacgccttgggtgaggccattaatgagtataagggagcagtgatcgttgtttcacacgatgctaggctgattacagaaaccaactgccagctgtgggtggttgaagagcagtcagtgagtcagattgatggggactttgaagattacaagagagaggttctagaggcccttggtgaggtgatggtttcaagaccaagagaatag

SEQ ID NO: 180064 - DNA, 1023 bp, synthetic construct
  misc_feature 1..1023: note = Description of Artificial Sequence: Synthetic coding sequence
  source 1..1023: mol_type = other DNA
atgcccaaggcccccaagcagcagccccccgagcccgagtggatcggggatggagaatcaaccagccctagtgacaaggtggtgaaaaagggtaaaaaggacaaaaagataaagaaaacgttcttcgaggagttggcagtggaggataagcaggcaggtgaggaagagaaagtgctcaaagagaaagaacagcagcaacagcagcagcagcagcagcaacagaagaaaaaaagggatacaagaaaaggacggagaaaaaaggacgtagacgacgacggagaagaaaaggaattaatggagcgtcttaagaagttgtctgtgccaacttcggacgaggaggatgaagttcctgcgcccaaacctcggggaggaaaaaagactaagggagggaatgtgtttgccgcactcatacaggaccagtcagaggaagaggaagaggaagaaaagcacccgccaaaacccgcgaagccggaaaagaacagaattaacaaggccgtgagcgaagaacagcaaccggccttaaagggcaaaaagggaaaggaggagaagagcaaaggaaaggccaagccacagaacaaattcgctgctcttgataacgaagaggaagataaagaagaggagattatcaaagagaaggaacctcccaaacagggtaaagagaaagccaaaaaagcggaacaggggtctgaggaagagggcgaaggtgaggaggaggaggaggaaggcggagaatctaaagccgacgatccctacgctcatctttccaaaaaggaaaagaagaagttgaagaagcaaatggaatatgaaaggcaagtcgccagtttgaaagccgctaatgctgccgaaaatgatttctccgtttctcaggcagaaatgtcgagtagacaggccatgctggagaatgccagcgatattaagctggaaaaatttagcatctccgctcacggcaaggagctgttcgtcaacgcagatctatatatcgtggccggaaggcggtacggattggtcggccccaacggctag

SEQ ID NO: 180065 - DNA, 2538 bp, synthetic construct
  misc_feature 1..2538: note = Description of Artificial Sequence: Synthetic coding sequence
  source 1..2538: mol_type = other DNA
atgcccaaggcccccaagcagcagccccccgagcccgagtggatcggggatggcgaaagcacatctccctcagataaggtggtcaagaaaggaaagaaagataaaaaaatcaagaaaaccttcttcgaagagctggctgtcgaggacaagcaggctggggaggaagagaaggtgctgaaagagaaagaacaacagcagcagcagcagcagcagcagcagaaaaagaagcgtgacacaagaaaaggcaggcgcaaaaaggatgtagacgacgatggggaagaaaaggagctgatggagcgtctgaaaaagctgtctgtgcccacctccgacgaagaggacgaagtccctgctcccaaaccgcgcggtgggaagaagactaaaggcggtaacgtgttcgcagccctgatccaagaccagtccgaggaggaggaggaagaagagaaacaccccccaaagccagccaaacctgaaaaaaaccgcattaacaaagcggtgtccgaggagcagcagcccgccttgaaaggtaaaaaggggaaagaggagaagtcaaaaggaaaggcaaagccgcaaaataagttcgcggctctggataacgaggaggaagataaggaagaagagatcattaaggagaaagagccacccaaacaggggaaggagaaggcaaagaaggcggagcagggatctgaggaggaaggcgagggagaggaagaggaagaggagggtggtgaatccaaggccgacgacccctatgcacatctgagcaagaaagagaagaaaaaactaaaaaaacagatggagtacgagagacaggtcgcctccctgaaggccgctaatgcagcagagaacgatttttccgtgagccaggctgaaatgtcctcccgacaagctatgctggagaatgcttcagacattaagctggaaaaattctctatcagcgcacacgggaaagagctctttgttaacgctgatctgtatattgttgcgggacggagatacggactcgtcggccccaacggcaaggggaaaacaacactattaaaacatattgcaaaccgggctttgtcgatccctcccaacattgacgtgctgttgtgtgaacaagaggtggttgctgacgagacgcccgcagtccaggcagtcctgagagccgacacaaaaaggctgaagttgttggaagaggagaggaggctccagggccagctggaacagggcgacgatacggcagcggagcgcctggagaaggtatatgaagagctgagagcaactggcgctgcagccgctgaggccaaagctagacggatcctggcaggactgggttttgaccccgagatgcagaatcgcccaacacagaagtttagtggcggctggaggatgcgagttagtctggctcgcgccttatttatggaacctaccctgctcatgctggacgaaccgacaaaccacctcgacctgaatgccgttatttggctgaataactacttacaaggttggcgcaagacattactgatagtatcccacgaccaaggctttttggatgacgtgtgtactgacatcatccacctcgatgcacaacgtctccattattacagaggcaactacatgacattcaaaaaaatgtatcaacaaaaacagaaggaactcctcaaacaatacgaaaaacaggaaaagaaactcaaagaactgaaggccggtggcaaatcaaccaaacaggccgagaaacagaccaaagaagccttgactcggaaacagcagaaatgcagaaggaagaaccaggacgaggagtcacaggaggcccccgaactactaaagcggccaaaagagtatacagtccgtttcacctttccagaccctccacctctgagtccacctgtattgggcttgcacggggtcacatttggctaccagggacagaagccattatttaagaacctggacttcggaatcgatatggactccagaatctgtatagtgggacccaacggggttggaaagtcgacactgctcctgctcctgacaggcaagttgactcccactcacggtgaaatgcgcaaaaaccaccggctaaagattggcttcttcaaccaacagtacgcggagcagcttcgtatggaagagacacctacagagtacttgcagcggggcttcaacctgccatatcaggacgcgcgcaaatgtttggggaggttcggattggaaagccatgcacatacgatccagatctgcaaattgagcgggggccagaaagcgcgggtagtctttgcagaattggcctgccgagaacctgatgtgctcatcctcgacgagcccaccaataatctggatatcgagagcatagacgctttgggcgaggccattaatgagtataagggagcagttatcgtggtcagccatgatgccagactgatcacggaaactaattgccagctgtgggtggtggaagaacagtccgtatcacagatcgacggcgatttcgaggattataagcgggaggtcttggaggctttgggcgaagtgatggttagtagaccacgggaatag

SEQ ID NO: 180066 - DNA, 1023 bp, synthetic construct
  misc_feature 1..1023: note = Description of Artificial Sequence: Synthetic coding sequence
  source 1..1023: mol_type = other DNA
atgcccaaggcccccaagcagcagccccccgagcccgagtggatcggcgatggggagtctacttctccaagcgataaggtggtgaagaagggcaaaaaagataaaaagattaaaaaaactttctttgaggagctggctgtggaagataaacaggctggggaagaagaaaaagtgctgaaggaaaaagagcagcagcagcagcagcaacagcagcagcaacagaagaaaaagcgggacactcgtaaaggcagaagaaagaaggatgtggacgacgatggagaagagaaggagctgatggagaggcttaagaaattatccgtgccgacctccgatgaagaggatgaggtcccggcccccaagccacgggggggaaagaaaacgaaggggggaaatgtgtttgctgcgctgatccaggatcagtctgaagaagaggaggaggaagagaagcatcctcctaaacctgcaaaacctgagaagaaccgcataaacaaggccgtatcggaggagcaacaaccagcactgaaagggaaaaagggcaaggaggagaagagtaaagggaaagccaaacctcagaacaagttcgccgcactggataacgaggaggaggacaaagaggaggaaattattaaggaaaaagaacctcccaaacaaggaaaagaaaaagcaaaaaaggccgagcaaggctccgaggaagagggtgaaggggaggaggaggaggaggagggtggggaatctaaagcagatgatccgtacgcgcatctgtctaaaaaggaaaagaaaaagctgaaaaaacaaatggaatatgagcgccaagttgcttctctgaaagccgctaatgccgccgagaatgatttttcagtgtcccaagccgaaatgtcctcgagacaggcaatgcttgaaaatgcctctgatattaagctggagaagttttcgatttccgcccatggtaaggagctgtttgttaacgctgacctttatattgtcgctgggcggagatatggcctagtgggtccgaacggctag

SEQ ID NO: 180067 - DNA, 1023 bp, synthetic construct
  misc_feature 1..1023: note = Description of Artificial Sequence: Synthetic coding sequence
  source 1..1023: mol_type = other DNA
atgcccaaggcccccaagcagcagccccccgagcccgagtggatcggcgatggggagagcacttctccctctgataaagtcgtgaagaaaggcaaaaaggataaaaaaattaagaagacgttctttgaggagctggctgtggaggacaaacaggcaggagaggaagaaaaagtcctaaaggagaaggaacagcagcagcagcagcagcagcagcaacaacagaagaagaagcgcgatacccggaagggaaggcggaagaaggatgttgacgatgatggggaagagaaagaactgatggaaaggttgaagaaactctccgttcccacatctgacgaggaggatgaggtgccggcccctaagccacggggcggaaaaaaaaccaaagggggcaacgtgttcgctgcccttatccaagaccaatctgaagaagaggaagaagaggagaaacaccctccaaagcctgcaaaaccagagaaaaatagaatcaacaaagcagtgagcgaagaacagcagcccgctctcaagggaaaaaaaggaaaggaagagaagtcaaagggaaaagcaaaacctcagaacaagtttgccgcactggacaatgaggaggaggacaaggaggaagagattattaaggaaaaggagccgccaaagcaaggcaaagaaaaagctaagaaagctgagcaggggagcgaagaagagggggagggggaagaggaggaagaggaagggggcgagtctaaggcagatgacccttatgcacacttatcaaagaaagaaaagaaaaaactaaaaaagcaaatggagtacgagaggcaggttgcatcactcaaggccgcaaacgcagccgagaatgatttctccgtgagccaagcagagatgagctcccgtcaggcaatgctcgaaaatgctagcgatattaagctcgagaaatttagcataagcgctcatggaaaagaactatttgtgaatgccgacttgtacattgtggctggtaggcggtacggtctggtgggacccaatggatag

SEQ ID NO: 180068 - DNA, 1023 bp, synthetic construct
  misc_feature 1..1023: note = Description of Artificial Sequence: Synthetic coding sequence
  source 1..1023: mol_type = other DNA
atgcccaaggcccccaagcagcagccccccgagcccgagtggatcggggatggtgaatccacatcacctagcgataaggtggtcaaaaagggtaagaaagacaagaaaatcaagaaaacattttttgaagagctggctgttgaagacaaacaggccggggaggaggagaaggtgttgaaagaaaaggaacagcagcagcagcaacagcagcaacagcagcagaagaagaaaagagacacacgcaagggacgccgcaaaaaggatgtagacgatgacggcgaggagaaagagctgatggagcgcctgaaaaagttgtctgtaccaacctccgacgaagaggacgaggtgcctgctccaaagccacggggcgggaaaaagactaagggaggcaacgtgttcgcggcgctgatccaggaccagagtgaggaagaggaagaggaagaaaagcacccaccgaaacccgctaaaccagagaagaaccgcatcaacaaggctgtgtcagaggagcaacagccggccttaaagggcaaaaagggaaaggaagagaaaagcaaggggaaggccaagccgcagaataaattcgccgctctggataacgaggaggaggataaagaagaagaaataataaaggagaaagagccacctaagcagggaaaggaaaaggcaaagaaggccgaacaaggaagtgaggaggagggcgaaggtgaagaggaagaggaggagggcggcgaatccaaagccgatgacccctacgcacatcttagcaagaaggagaagaaaaaactgaaaaaacagatggaatacgagagacaggtggcatctttaaaggccgcaaatgccgctgaaaacgattttagtgtgtcccaggccgaaatgagctctagacaggccatgttagaaaatgccagtgatatcaaactggagaagttctccataagcgcgcacggcaaggagctgtttgtgaacgctgatctgtatatcgtggctggacgcaggtatggactagtcggacccaatgggtag

SEQ ID NO: 180069 - DNA, 1023 bp, synthetic construct
  misc_feature 1..1023: note = Description of Artificial Sequence: Synthetic coding sequence
  source 1..1023: mol_type = other DNA
atgcccaaggcccccaagcagcagccccccgagcccgagtggatcggggatggggagtcaacttcaccgtcggataaagtcgttaaaaaaggaaagaaagacaagaaaattaagaagactttcttcgaagagctggccgttgaggataaacaggcaggcgaagaggagaaagtactaaaagagaaggagcagcagcaacagcagcagcagcagcagcaacagaaaaaaaagagagatactagaaaggggcgaagaaagaaggatgtcgacgatgacggggaagagaaagagcttatggaacgcctgaagaaactgtctgtcccgactagtgatgaggaggacgaagtgccggctccaaagcccagaggagggaagaagaccaagggtggtaacgtgttcgccgcgctgattcaggaccagtctgaggaggaagaggaggaggagaaacaccccccaaaacccgcaaagccggaaaagaataggatcaataaagccgtgtccgaggagcagcagccagcactaaagggaaaaaagggaaaggaagaaaagtctaagggtaaggccaagccccagaataaattcgctgctcttgataacgaggaggaggacaaagaggaggaaatcataaaagaaaaagagcctccaaaacagggaaaggagaaagccaagaaggctgagcagggtagtgaagaagagggggagggcgaggaggaggaagaagagggcggtgagtctaaggccgatgatccctacgcccacctctctaagaaagagaagaagaaattgaagaaacaaatggagtacgagcgccaagtggcttccttaaaagctgccaatgccgccgagaatgatttttccgttagccaggccgaaatgagtagcagacaagctatgctggaaaatgcatccgacatcaaattagagaaattctccatcagtgctcatggcaaggagctcttcgtgaatgccgatctgtacatagttgccggccggagatatggactggtaggacctaacggatag

SEQ ID NO: 180070 - DNA, 2424 bp, synthetic construct
  misc_feature 1..2424: note = Description of Artificial Sequence: Synthetic coding sequence
  source 1..2424: mol_type = other DNA
atgcccaaggcccccaagcagcagccccccgagcccgagtggatcggggacggtgaaagcaccagcccatcagataaggtggtgaagaagggcaagaaggataagaagatcaagaagaccttcttcgaggaattggctgtggaagataagcaagctggggaggaagagaaggttctgaaagaaaaagagcagcagcagcaacaacagcagcagcagcaaaaaaaaaaaagagacacacgtaagggaaggcgcaaaaaggacgtggatgatgatggagaggaaaaagaactgatggaacgtctgaaaaaactctccgtgcccactagcgatgaagaggacgaagtgcccgctcctaagcctaggggggggaagaagaccaaagggggcaacgtgttcgcagccctgatacaagatcagtccgaggaagaagaggaagaggagaaacaccctccaaaacccgcaaagcccgaaaagaaccgcattaacaaagccgttagcgaagaacagcagcccgcattgaaaggtaagaaagggaaggaggagaagagtaagggcaaagccaaaccccagaacaaattcgccgccttggacaacgaagaggaagataaggaggaggaaatcataaaggagaaggagcctccaaaacaaggtaaagaaaaagccaagaaagccgagcagatggaatatgagcgccaggttgctagccttaaggctgccaatgcagctgagaatgacttttcagtgagccaggcggaaatgagctccagacaggcgatgctcgagaacgcctctgacatcaaattagagaagttctccatcagtgcacacggtaaagaactgttcgtgaacgccgacttatatattgtggctggtcggcggtatgggttggtcggaccgaatggtaagggaaagaccactttattaaagcacattgccaacagggcgctgtcaataccgccaaacattgacgtgctcttatgcgagcaggaagtagtggcagacgaaacaccggccgtgcaggccgtgctgagagccgatacgaagaggttaaaactgctggaagaggaacgccgtctgcaaggtcagcttgagcaaggtgatgacacagccgcagagaggctggaaaaggtgtatgaagagctgcgcgccaccggcgctgctgccgccgaagctaaggcacggcgtattctggcaggtctgggatttgatcccgagatgcaaaatagacccacccagaagttttctggcggctggcgaatgcgcgtatcactggcaagagccctgttcatggaacccacccttctcatgctggacgaaccaaccaaccatctcgacctgaatgcggtgatatggctgaataactatctccagggatggcgaaaaaccttgctgattgtgtcacatgatcagggtttcctcgacgacgtttgtaccgatatcatccaccttgacgctcaacggttacactattataggggcaactacatgaccttcaaaaaaatgtaccagcagaagcagaaagaactgctgaaacagtatgagaaacaggaaaagaagttgaaagaattgaaggccggaggcaaaagtacaaagcaggctgaaaagcaaaccaaagaggcactcacaaggaagcaacagaaatgcagacggaaaaatcaagacgaggaaagtcaggaagcacctgagcttttgaagagacccaaagaatatacagtgcgctttacattcccagatcctcctcccttgagtccgccagtactagggctccatggggtcacgtttgggtatcagggacagaaacctctttttaaaaacctcgatttcggcatcgacatggattcgcgaatttgcatcgtggggccaaatggagtcggaaaatcaacattgcttctgctcttgacaggcaagctaacccctactcatggggagatgcgaaagaatcacaggctgaaaattggcttctttaaccagcagtacgccgaacagctaagaatggaggaaacacctaccgagtacctccagcgagggtttaatctgccgtatcaagatgcccggaagtgtctgggcaggtttgggctagagagtcatgctcacaccatccagatctgcaaactgagcggtgggcaaaaggcaagggtcgtcttcgctgagttggcttgccgtgagccagacgtgctcatcctagatgagcctaccaataacctggacatagaatcaatcgacgccctgggcgaggccattaatgaatacaaaggtgccgtgattgttgtctcacacgatgcccgactcataaccgagaccaactgccagctctgggtagtggaagagcagtccgtttcacaaattgatggggactttgaggactataagcgggaagttctcgaagctctcggcgaagtgatggtttctagaccgcgggagtag

SEQ ID NO: 180071 - DNA, 2424 bp, synthetic construct
  misc_feature 1..2424: note = Description of Artificial Sequence: Synthetic coding sequence
  source 1..2424: mol_type = other DNA
atgcccaaggcccccaagcagcagccccccgagcccgagtggatcggcgacggcgaatccacctctccctccgacaaggttgtgaaaaaaggcaagaaagacaagaaaatcaaaaaaacgtttttcgaggaattagcagtagaggacaagcaggcaggagaagaggagaaagtgctcaaggaaaaggaacagcagcaacagcagcagcagcagcagcagaagaaaaaaagagataccaggaagggacgccgcaagaaagacgtcgatgacgacggcgaggagaaggaactcatggaaagactaaagaaattatccgtacccacaagtgatgaagaggacgaagtcccagctcctaaaccaagaggtggtaaaaagaccaaaggcggtaatgtgtttgccgccctcatacaggaccagtccgaggaggaagaagaggaggaaaaacaccctcctaagcccgcaaaaccggaaaaaaataggattaacaaggcagtcagtgaagaacagcaaccagccttgaagggcaaaaaaggcaaggaggaaaagtcgaagggtaaagccaagccccagaacaaattcgccgcattagacaatgaggaggaggataaggaggaggaaatcataaaagaaaaggaaccacctaaacagggtaaggaaaaagctaaaaaagctgagcaaatggagtatgaaagacaagtcgcctcactgaaagccgctaatgcggctgagaacgactttagtgtgtctcaggccgagatgtcctctagacaggccatgcttgaaaatgctagtgacattaagctggaaaagtttagcatctcagctcacggcaaagagttgtttgtgaacgcagacttgtatatcgttgccggccgtagatacggtctcgtaggccctaacggaaaaggtaagaccacacttctcaagcatatagccaatagggccttaagcatccccccaaacattgacgtgctcctctgtgaacaggaggtcgtggctgacgagacgccagccgtccaggcagtgctcagggccgacacaaagcggctcaaactgctcgaagaggagaggcgactgcaaggtcagctagaacagggggacgataccgctgccgaacggttggagaaggtgtatgaggagttgcgggccaccggcgccgcggctgctgaggctaaagcacgtaggatcctcgcaggactgggttttgaccccgagatgcagaatagacccactcagaaattttctggtggatggcgcatgcgtgtatctcttgcgcgggccctgttcatggagccgactctcttgatgctggacgagccgacaaaccaccttgacctgaatgccgtgatctggctgaacaactatctccagggatggcgcaagacacttttgatcgtgagccacgaccagggcttcctcgacgacgtgtgcacagatatcattcatctggacgcccagaggctgcattattatcgaggcaattacatgaccttcaagaaaatgtaccagcaaaagcagaaggaattgctcaaacagtatgagaaacaagagaaaaaactgaaggagctcaaagcagggggcaagagcacgaaacaagccgaaaagcagaccaaagaagcactaacccggaagcaacagaagtgccgtcgaaaaaaccaagacgaggaaagtcaagaagcaccggaactgctgaagcgaccgaaggaatacacagtgaggttcactttccctgaccctcctcctttgagccctccggtgctcgggctccatggcgtcacctttggctatcaggggcagaaacccctctttaaaaatctggattttggtatcgacatggactcaaggatatgcattgtcggtcctaatggcgtcgggaaatccactctgttgctccttctgactggaaaactaacacccactcacggagagatgagaaagaaccaccgcctgaagatcggattcttcaaccagcagtacgcggagcagctcaggatggaggagaccccaacagagtacctacagagagggttcaatctgccttaccaagatgcccgaaagtgcctaggccgttttgggctcgaatcccacgctcacacaatccaaatctgcaagctgtctggcggtcagaaagccagggttgtgtttgcggaactcgcctgccgggagccagacgttctgattctggacgagcctacaaacaatttggatatcgagtctattgatgccctcggtgaggcaatcaacgaatacaaaggggctgtgattgtggtgtctcacgatgcacgcctgattacggagaccaactgccaattatgggttgtggaagaacaatccgtctcccagatcgacggggacttcgaggattacaagagagaggtgctggaggctctaggagaagtgatggtcagccggcctcgggaatag

SEQ ID NO: 180072 - DNA, 717 bp, synthetic construct
  misc_feature 1..717: note = Description of Artificial Sequence: Synthetic coding sequence
  source 1..717: mol_type = other DNA
atgcccaaggcccccaagcagcagccccccgagcccgagtggatcggagatggcgaaagcaccagcccttctgacaaggtagttaagaagggcaaaaaggacaaaaaaatcaaaaaaacattttttgaggaactggcggttgaggataagcaggcaggcgaagaagaaaaggtgttaaaagagaaggagcagcagcagcagcagcagcaacagcagcagaagaaaaaacgtgatacacgcaaagggaggaggaagaaagatgtggacgacgacggggaggagaaagagctcatggaaaggctgaagaagctgtcacgtggtttcaatctgccctatcaagacgccagaaaatgtctgggccggtttgggctcgaatcacacgctcacaccatccagatctgcaaactctccggcggtcaaaaggcaagggttgtgtttgccgaactagcgtgccgagagccagatgtgcttattctcgatgaacctactaacaacctcgatattgagagcatcgatgccctgggggaggcaatcaacgaatacaagggcgcggtgattgtcgtgtctcacgatgcaaggctcattactgaaacaaactgccaattatgggtcgtggaagaacagagcgtgagtcagatagatggtgatttcgaagactacaaacgggaagtgctcgaagcgctgggcgaggtgatggtgtccaggcctagggaatag

SEQ ID NO: 180073 - DNA, 1602 bp, synthetic construct
  misc_feature 1..1602: note = Description of Artificial Sequence: Synthetic coding sequence
  source 1..1602: mol_type = other DNA
atgcccaaggcccccaagcagcagccccccgagcccgagtggatcggcgatggcgagtcaacttcaccatccgataaagttgttaaaaagggaaagaaagacaagaagatcaagaagaccttttttgaagagctcgccgtagaggataagcaggctggtgaagaagaaaaggttctcaaggagaaagagcagcaacaacaacagcagcaacaacagcagcaaaagaaaaagagagatacacgcaagggacgacggaaaaaagatgtggacgatgacggtgaggagaaggaactgatggaacgacttaaaaagctgtccgtgccaacatccgatgaggaggatgaagtcccagcccccaagcctagagggggaaaaaagacaaaaggcgggaacgtgttcgcagccctcatacaggaccagagtgaggaggaggaggaggaagaaaaacacccgcctaaacctgctaaacccgagaagaataggatcaataaggccgtgtccgaagaacaacagccggcccttaaggggaaaaaaggtaaggaagaaaaaagtaagggaaaggccaagccccagaacaaatttgcagctctggataacgaggaggaggacaaggaggaggagattataaaagagaaggagcccccgaagcagggaaaggagaaagcaaaaaaagcagaacagggctctgaggaggagggcgagggcgaagaggaggaagaagaaggaggcgaatcgaaggctgacgacccttatgcgcatctatccaagaaagaaaagaaaaagctcaagaagcagatggagtatgaacggcaggtcgcctccctcaaggccgccaatgccgctgagaatgacttcagcgtgagtcaggccgagatgagctccaggcaggccatgttggaaaatgctagcgacatcaaactcgagaagttttctatctcagcccacgggaaagaattgttcgtgaatgctgatctctatattgtcgcgggccgacggtacggattggtcgggcctaatggaaaagggaaaacgactctccttaagcacattgccaaccgtgcgctgtcaatccctcctaatatagatgtcctactatgcgaacaagaagtcgtggccgatgagactcccgctgttcaggcagtgctccgggacgatactgccgccgaaaggctagaaaaagtgtatgaggagctcagagccactggcgctgcggccgcagaagctaaggccagaaggattctagccggactgggatttgaccctgaaatgcaaaacaggccgacacagaaatttagtgggggctggcgcatgcgggtgtctttggccagggctcttttcatggaaccaacactcctcatgctcgatgaacccaccaacaacttggacatcgaatctatcgatgcattgggtgaggcaattaacgagtacaagggagcagtcatagtcgtttctcatgacgcaagactcatcacagaaactaactgtcagctatgggtcgtggaagagcagtctgtgtctcagattgacggggattttgaggactacaagagggaagtgctggaggctctcggggaggtgatggttagtcggccacgggagtag

SEQ ID NO: 180074 - DNA, 717 bp, synthetic construct
  misc_feature 1..717: note = Description of Artificial Sequence: Synthetic coding sequence
  source 1..717: mol_type = other DNA
atgcccaaggcccccaagcagcagccccccgagcccgagtggatcggcgatggtgagagtacttcgccctctgataaagtggtgaagaagggaaagaaagataagaaaattaagaagaccttcttcgaagagctcgcggtggaagataagcaggccggcgaagaggaaaaagtcctcaaggagaaagagcagcaacagcaacagcagcagcaacagcagaagaaaaagcgcgacactcggaaaggtcgcagaaaaaaagacgtcgatgacgacggggaggagaaggaactcatggagcgattgaagaagttgagtcgggggtttaacttaccatatcaagatgctcggaaatgtcttgggcgctttggccttgagtcacacgctcataccatccagatttgcaagctgtcaggaggtcagaaggctagagtcgtatttgccgagttagcttgcagagaaccagacgtcttgatcctcgacgagcccacgaataatctggatattgagtccatagacgccctcggggaagctatcaacgagtacaagggtgctgtgattgtcgtgtcacatgacgctaggctaattaccgagaccaactgccagctttgggtcgtcgaagagcagagtgtttcccaaatcgacggcgatttcgaggattataagcgggaggtcttagaagccttaggcgaagtgatggtcagcaggccaagggaatag

SEQ ID NO: 180075 - DNA, 2538 bp, synthetic construct
  misc_feature 1..2538: note = Description of Artificial Sequence: Synthetic coding sequence
  source 1..2538: mol_type = other DNA
atgcccaaggcccccaagcagcagccccccgagcccgagtggatcggggacggtgaaagcacaagccccagtgataaggtcgttaaaaagggcaagaaggataagaagatcaagaaaacatttttcgaggaattggcagtcgaagacaaacaagccggagaggaggaaaaggtgctgaaagagaaagagcagcagcagcagcagcagcagcagcaacaaaaaaaaaagcgggatacacgcaaaggccggagaaagaaagatgttgatgatgacggcgaagagaaggaactcatggagaggctgaagaagctgagcgtgccaacctcagatgaggaggacgaggttcctgctccgaagccgcgcgggggcaagaaaacaaaggggggcaatgtcttcgccgccctgatccaggatcaaagtgaagaggaggaagaagaggaaaaacatcctcccaagcctgcaaagccagaaaagaatcgcattaacaaggccgtgtccgaggagcagcagcccgcattgaaagggaaaaaagggaaagaagaaaaaagtaaaggcaaggcaaaaccccagaataagtttgctgcccttgacaacgaagaagaggacaaggaggaggagattattaaggagaaggagcctcccaaacagggcaaagaaaaagccaagaaagccgagcaaggtagtgaggaagagggcgaaggagaagaggaagaggaagaaggcggcgaatccaaagcggatgacccatatgcccaccttagcaaaaaagaaaagaaaaaattgaagaagcagatggaatacgaacgccaggtagcaagcctgaaggccgcaaacgcggcagagaacgatttttcggtgagccaggcagaaatgagctcccgtcaagccatgctggaaaatgctagtgacatcaaacttgagaagttctccatttcagcccatggcaaagagctgttcgttaatgcagacctgtatatcgtggcagggaggcgatatggactggtggggcctaatgggaaaggaaagactacactgctgaaacatatcgctaaccgagctttgtccatcccacctaacatcgatgtcctgctgtgtgagcaagaagttgttgctgatgaaacaccagctgtacaggctgtgctcagggcagataccaaacgcctgaaactgcttgaagaagagagacgcctacagggtcagctagagcagggagacgatactgccgcagagagacttgagaaagtctacgaagaacttcgcgcaacgggggcggccgccgccgaggccaaggcaagaagaatcctggcaggccttgggtttgacccagaaatgcagaaccggcccacacaaaaattctcgggtggctggcgtatgcgcgtgagcctagccagggccctgttcatggaaccgactttactgatgctggacgagccaacaaaccacctggacctgaacgctgtgatttggctcaataactatctgcagggatggaggaagacgttattgattgtgagtcatgaccaaggattcctcgacgacgtgtgcacagacataattcacctcgatgctcaacggctgcattactaccgcggaaactatatgacctttaagaaaatgtatcaacagaagcagaaggagcttcttaagcagtatgaaaaacaggaaaaaaaactcaaggagctgaaggctggcggcaagtcaaccaagcaggcagagaagcagactaaagaggccctgactaggaaacaacaaaaatgtaggcgcaagaaccaagatgaagaatcacaggaggctccagagctgctcaaacgccctaaggaatacactgtgcggtttaccttcccagatccaccacccctgtctccccccgttcttggccttcatggggtgactttcggttatcaggggcagaaaccattgtttaaaaatctagactttggtatcgatatggactcccgaatctgtatcgtgggacctaatggagtgggaaaatcaactctgctgctgctgctgaccggcaaactgaccccaacccatggcgagatgcgcaaaaaccatcgattgaaaatagggttcttcaatcaacagtacgctgagcagctgcggatggaggagacccctaccgagtacctgcaaaggggttttaatctgccctaccaggatgctagaaaatgcctgggcaggttcggtttggaaagccatgcccacacaattcaaatctgcaaactgtccgggggtcaaaaagccagagtagtgttcgcagaactggcttgcagggaaccagacgtactgatactcgacgaaccaactaataatttggacattgagtccattgatgcactgggcgaagctattaatgaatacaagggtgccgttatcgtagtgtcccatgatgcccgcctcattacagagactaactgccaactgtgggttgtggaggaacagtcagtgtctcagatagatggcgacttcgaagactacaagcgcgaagttctggaagctctgggtgaggtgatggtctccagacccagggagtag

SEQ ID NO: 180076 - DNA, 2538 bp, synthetic construct
  misc_feature 1..2538: note = Description of Artificial Sequence: Synthetic coding sequence
  source 1..2538: mol_type = other DNA
atgcccaaggcccccaagcagcagccccccgagcccgagtggatcggggacggcgagagcaccagcccatctgataaggtagttaaaaaaggcaaaaaagacaagaagataaaaaagaccttctttgaggaactggccgtagaggataaacaggccggcgaagaggaaaaggtcctcaaagagaaggaacagcaacagcaacaacagcagcagcagcagaaaaagaagcgtgatacacgcaagggtaggagaaagaaggacgtggacgatgacggggaggaaaaggaactgatggagcgcctgaagaagctctccgtgcctacttccgatgaggaagatgaggtgccagcccccaaaccacgcggggggaagaagacaaaaggcggcaacgtattcgccgcactcattcaggatcaatccgaagaagaggaggaagaagaaaagcatcccccaaaaccagcgaagcccgaaaaaaatcgaatcaataaagccgtttcagaggagcagcaacccgctttaaaaggcaaaaaaggcaaagaggagaaatcgaaaggcaaggctaaaccccaaaataaattcgccgcgctcgataacgaagaagaggacaaggaggaagagataatcaaagaaaaggaacctcccaagcagggaaaggaaaaggctaaaaaagccgaacagggttcagaggaggaaggcgaaggagaggaggaggaggaggaagggggtgaaagtaaggccgacgacccttatgcacatttatccaagaaagagaaaaaaaagctgaagaagcagatggaatacgagcgtcaggtggcaagcctgaaggcagcaaacgcagcggaaaatgacttcagcgtgagtcaggccgagatgtcttcaaggcaagctatgctcgaaaacgcctccgacattaagctggagaagttttctatcagcgcgcacggaaaggagttgttcgtaaatgccgacctgtatatcgttgctggccgaaggtacgggctggttgggccaaatggaaaggggaaaaccactctgcttaaacatattgccaatagggcactttccatcccacccaacatcgacgtcctgttatgtgagcaggaggtggtagctgacgagactcccgctgtgcaggccgtgttgcgtgccgataccaagcggctcaagttacttgaggaggaaagacggttgcaagggcaactcgagcaaggggacgacacagccgctgaaagactcgaaaaagtgtacgaagaactcagggccaccggagccgctgcagcagaggccaaagcaagaagaattcttgcgggacttggtttcgatcctgagatgcagaatcggcctacccagaagttttcagggggctggcggatgcgagtgtccctcgcaagagccctttttatggaacccactctcttaatgttggatgagccaactaaccacctcgatctcaatgccgttatatggctgaataattatctgcagggatggagaaagacacttctcatcgtctcccacgaccaggggtttctcgacgacgtgtgcacggatatcatccatctggacgctcagcgccttcactactaccgcggtaactacatgacattcaaaaagatgtaccagcaaaagcagaaggagttacttaaacagtacgagaagcaggaaaagaaattgaaggaactgaaggccggggggaagagcacaaaacaagcagagaagcagactaaagaagccctgactaggaagcagcagaaatgtagacgcaagaaccaggacgaggaatcccaggaagccccagagctgctcaagcgacctaaggagtacacagttaggttcacgttcccggatcccccaccactgtctccgcccgtgctcggcttgcatggcgtaacattcggctatcaaggccagaaacccctctttaagaatctcgactttggaatcgacatggatagccgtatttgcatcgtggggcccaatggagttgggaagtcgactctgctcctgcttctcacagggaaattaacccccacccacggagaaatgcggaagaaccacaggctgaaaattggcttcttcaaccaacagtatgccgagcaacttaggatggaagagaccccaactgagtacttgcaaagaggatttaatctcccctatcaagatgctcggaaatgtctagggaggttcgggctggagagccacgcccacacaatccagatctgtaaattaagcggcggacagaaagctcgagtggtgttcgcagagttagcttgcagggagccagacgtcttgatcttggatgaacctacgaataaccttgacattgagtccattgatgcacttggagaggccatcaatgagtacaaaggtgctgttattgtggtttctcacgatgctcgcctcatcacagaaaccaactgtcagctttgggtcgtagaagagcagtctgtgagtcagattgacggtgacttcgaagattataagagggaagtgctggaggccctgggagaggtcatggtatcgaggccaagggagtag

SEQ ID NO: 180077 - DNA, 717 bp, synthetic construct
  misc_feature 1..717: note = Description of Artificial Sequence: Synthetic coding sequence
  source 1..717: mol_type = other DNA
atgcccaaggcccccaagcagcagccccccgagcccgagtggatcggggatggagagtctaccagtccaagcgataaagtggtgaagaagggcaaaaaggacaagaagattaagaaaaccttctttgaggagttagccgtcgaagacaagcaggctggcgaagaagaaaaagtgcttaaagagaaggaacagcagcagcagcaacaacagcagcagcagaagaagaagcgcgatactagaaagggccgtaggaagaaagacgttgatgacgatggtgaagagaaagaactcatggagagactcaaaaaactgagtagaggcttcaatctgccctatcaggatgccaggaaatgcctgggcagatttggccttgaatctcatgctcatacgattcagatctgtaaactgtctggtggacaaaaggcccgtgtggtcttcgctgagctcgcctgccgggagccagatgtgctaattctcgatgagcctacaaacaatctggatatcgagagcattgatgcgttgggtgaggccataaacgagtataaaggcgcagttatcgtcgtgtctcacgacgcgcggctgatcacagagacgaactgtcagctatgggtagtggaagagcagtctgtcagccaaatcgacggcgatttcgaggactataagcgtgaagtactcgaagcactgggcgaggtaatggtgagccgccctcgggaatag

SEQ ID NO: 180078 - DNA, 1602 bp, synthetic construct
  misc_feature 1..1602: note = Description of Artificial Sequence: Synthetic coding sequence
  source 1..1602: mol_type = other DNA
atgcccaaggcccccaagcagcagccccccgagcccgagtggatcggtgacggggaatccaccagtccatctgataaggtggtgaaaaaagggaaaaaagataaaaaaatcaagaagacctttttcgaagaactagccgtggaagacaagcaggcaggtgaggaagagaaagttctcaaggaaaaagaacagcagcagcagcaacagcagcaacagcagcagaagaagaaacgtgacacccggaaaggcaggcggaaaaaggacgtggacgacgacggggaggagaaggaattaatggagcgattaaagaagctcagcgtacccacctctgatgaagaagatgaggtccctgcccccaagcctagaggcggcaagaagacgaaaggggggaacgtgttcgctgccctgatccaggaccagagtgaggaagaagaagaggaggaaaaacacccgcctaagcccgcaaagccggagaaaaacaggataaataaggcggtatcagaggaacagcagccagctctgaagggcaaaaaaggtaaggaggagaagagcaaaggcaaggcaaaacctcagaataaattcgccgcgctggataacgaagaggaagataaggaagaagaaattatcaaggagaaggaaccccctaagcagggaaaggagaaggccaagaaggccgagcaaggatccgaggaggaaggggaaggagaagaagaggaggaggagggcggcgagagtaaggcagacgacccttacgcacacttatcgaagaaagagaagaagaaattgaagaaacagatggaatatgagagacaagttgcctcactcaaggcggcgaacgcagctgagaacgatttttcggtaagccaggccgagatgagctcgaggcaggccatgctggagaatgcctccgacatcaagcttgagaaattctctatctccgcacatggcaaagagctgtttgtgaatgcagatctctacattgtagccggaagacggtacgggctggtgggccctaacggaaaaggcaagaccaccttactgaaacatatcgccaaccgtgctctcagtatcccaccgaatatagatgtattattgtgcgagcaagaagtggtagcagatgagacccctgcggttcaggcagtgctccgggacgataccgcggccgagagattagagaaggtgtacgaagagctgcgtgccacaggggccgccgctgccgaggcaaaagctcgacgcattctcgccggtttgggctttgaccctgaaatgcagaatcggcctacacagaagttttccggaggctggcggatgcgcgtctcccttgctcgcgcactgtttatggaaccaaccttgttaatgctggatgaacccacgaataaccttgacatcgagtcgatagatgctctgggggaggccatcaatgaatataagggggccgtgatagtggtgagtcacgatgcgcgcctaatcactgaaactaactgccagctctgggtggttgaggaacagagcgtcagccaaattgatggcgattttgaggattacaagcgagaggtcctcgaagccttgggagaagtcatggtgtctaggccgcgagagtag

SEQ ID NO: 180079 - DNA, 1599 bp, synthetic construct
  misc_feature 1..1599: note = Description of Artificial Sequence: Synthetic coding sequence
  source 1..1599: mol_type = other DNA
atgcccaaggcccccaagcagcagccccccgagcccgagtggatcggtgacggcgaaagcacttctccatccgacaaagtggttaagaaaggaaaaaaggacaaaaagataaaaaaaactttttttgaggagttagccgtcgaggataaacaggctggcgaagaagaaaaagtgctcaaagaaaaggaacagcagcagcaacagcagcagcaacagcagaagaagaagcgagacacgcgcaaaggacgacgaaagaaggatgtggacgacgatggcgaagaaaaagaactgatggaacggttgaaaaagctttccgtccctacctcagatgaagaagacgaggtgcccgcgccaaagccgcgcggaggaaagaaaacaaagggcggaaacgtgttcgccgcactgatacaggatcagtcagaggaagaggaggaagaggaaaaacacccaccaaaaccagccaagccggagaaaaaccgaattaacaaggcagtgtcagaagagcagcaacctgctctgaagggtaagaaaggcaaagaagagaagagcaagggtaaggccaaaccacagaataaatttgctgctctcgacaacgaggaagaggacaaggaagaggagattataaaagaaaaggagcccccgaaacaaggtaaagagaaagcaaaaaaagccgaacagggcagtgaggaggaaggggagggcgaagaagaagaggaagaaggcggggaaagcaaggcagatgatccttacgctcacctgtccaagaaggaaaaaaagaaacttaagaaacagatggagtatgaacggcaagtggccagtcttaaagccgccaacgccgcggaaaacgacttcagcgttagtcaggcagaaatgagttctcggcaagccatgctggaaaatgcttccgacataaagctggaaaagttctctatctcggcacatgggaaggagctttttgtcaatgccgacttatacattgtcgccggaaggaggtatggcctggtgggcccgaatggtaagggcaagacgaccctcctaaaacacattgcaaatagggccctgtctatcccccccaacatcgatgttctattgtgtgagcaggaggtggtagctgatgagaccccagctgtgcaggccgtattgcgagacgatactgcagccgaaaggctggagaaagtgtacgaagaattgagggccactggtgcagctgccgcggaagcaaaagcacggaggatactcgcaggcctggggtttgatcccgagatgcagaatcgaccgacgcagaagttcagtggtgggtggaggatgcgcgtgtcgcttgcaagggcgcttttcatggaaccgaccctgctcatgttggacgagcctacaaacaaccttgacattgaatccatcgacgccctgggtgaagctataaacgagtataagggtgcggtcatcgtggtttcacacgacgccagactcattactgaaaccaactgccagctgtgggttgttgaggagcagagcgtctctcagatagacggtgactttgaggactacaaaagagaagtgctggaggctctgggcgaggtgatggtgtctaggcccagggaatag

SEQ ID NO: 180080 - DNA, 1599 bp, synthetic construct
  misc_feature 1..1599: note = Description of Artificial Sequence: Synthetic coding sequence
  source 1..1599: mol_type = other DNA
atgcccaaggcccccaagcagcagccccccgagcccgagtggatcggggatggcgaatctactagtccttccgataaggtggtcaaaaaggggaagaaggataagaaaatcaaaaagactttttttgaagaactagccgtggaggataaacaggccggagaagaagaaaaggtgttaaaagagaaggagcagcaacagcagcagcagcaacagcaacagaaaaaaaaaagggacactcgcaagggaagaaggaaaaaggatgtagatgatgacggagaggaaaaagagttgatggaaaggctgaaaaaactctccgtccccacatcggacgaggaggacgaggtgcctgcgccaaagccccggggcggcaagaaaaccaaagggggcaacgtcttcgcggccctgatccaggatcagagcgaggaggaagaagaagaggaaaaacatccgccaaaacctgctaagccagagaagaataggattaataaagccgtgtcagaagaacagcagcccgctctgaaaggcaaaaaagggaaggaagaaaagagcaaaggcaaagcaaaacctcagaataagtttgctgcgcttgataacgaagaggaagataaagaggaagaaatcattaaggagaaggagccacccaagcaaggaaaggagaaggccaagaaggccgaacagggtagtgaagaggagggcgagggcgaagaggaggaagaagagggcggagagagcaaggccgacgatccatatgcacacctcagcaagaaagagaagaagaaacttaagaaacagatggaatatgagcgccaggtcgcatctctgaaagccgcaaacgccgccgaaaacgatttttcagtctcacaggccgaaatgagcagccgtcaggctatgctcgagaatgccagcgacatcaaacttgaaaagttttccatctcagctcacggaaaggagctctttgtgaacgccgatttgtacatcgtggccggacgtcggtacggcctggtaggtcccaacgggaaggggaagactaccctgttaaagcacatagccaacagggccctgagcataccgccaaacatcgacgtactcctttgtgaacaagaagtggtggccgatgagacacccgccgtgcaggcagtactgagagatgatacagcggcggagcgactggaaaaggtgtatgaggaactgagggcaactggcgctgcagcagccgaggcaaaagccagaagaatccttgctggcttgggctttgaccctgagatgcagaatagaccaacccaaaaattcagtgggggctggcggatgcgtgtgtccctcgcaagagccctgttcatggaacccacacttctcatgctggacgagccgacgaacaatctggatatcgagtcgatagatgcactgggagaggccattaacgaatacaagggggctgtgattgttgttagtcacgatgcccggctaattacggaaactaattgccaactgtgggtggttgaagagcagagtgtctcacaaatcgatggagactttgaggattacaagcgggaagtcttggaggccctcggagaagtaatggttagtaggcctcgagaatag

SEQ ID NO: 180081 - DNA, 1599 bp, synthetic construct
  misc_feature 1..1599: note = Description of Artificial Sequence: Synthetic coding sequence
  source 1..1599: mol_type = other DNA
atgcccaaggcccccaagcagcagccccccgagcccgagtggatcggggatggagagtctaccagtcccagcgataaggttgtgaaaaaaggcaagaaggacaagaagatcaaaaagaccttttttgaagagctggcggtggaggataaacaggctggcgaggaagaaaaggtgctgaaagagaaggaacaacagcagcaacagcagcaacagcagcaaaaaaaaaagagggacaccagaaagggcaggaggaagaaggacgtagacgatgatggcgaagaaaaggaactgatggagagactgaagaagctcagcgtaccaacttctgacgaggaagacgaggtccccgcccccaagcctaggggcggaaagaaaactaaaggcggcaatgtattcgcggcacttatccaggatcaaagtgaagaggaggaggaggaggagaagcaccctcctaaacccgccaagcccgagaagaataggatcaacaaagcggtctcagaagagcagcaaccagccctgaaagggaagaagggaaaggaggagaagagtaaggggaaggctaagccacagaacaagttcgccgctctggataatgaggaggaagacaaagaagaagagatcataaaggagaaagaacccccaaagcagggaaaagagaaggccaagaaggcagagcaagggagcgaagaggagggggaaggagaggaggaggaagaagaagggggcgagtccaaagcggatgacccttacgctcatcttagcaaaaaagagaaaaaaaagctgaaaaaacagatggaatacgagaggcaagtcgcctcattgaaggctgctaacgcagcggagaatgatttctccgtatcccaagccgagatgtctagcaggcaggccatgctcgaaaatgccagcgacattaaactcgaaaaatttagcatctccgcccacgggaaggagctcttcgtaaacgcagatctgtatatcgtggctggtaggaggtatggtcttgtggggcccaacggaaagggtaaaacgacccttcttaaacatatagccaatagggctctcagtatccctccaaacatcgatgtcttgctgtgtgagcaggaagtggtcgccgatgagacgcctgctgttcaggcagtgcttcgcgatgacaccgctgctgagcggctcgagaaggtgtacgaagagctgcgggctactggggccgctgcagcagaggccaaggcaagacgcatcctcgccggcctcggtttcgaccccgaaatgcaaaaccgtcccacacagaagtttagcggtgggtggcgaatgcgcgtgtctcttgctcgggcgctgtttatggaaccgacactgctgatgctcgatgagccaacgaacaacctggatatcgaatccatcgatgccctcggcgaggccataaatgagtataaaggcgcagtcatcgtcgtatcacacgatgccaggctgatcactgagacaaactgccagctatgggtcgtagaagagcagtctgtctcccagatcgatggggactttgaagactacaaaagagaagtgttggaagccctcggggaggtcatggtgtcacggcctagggaatag

SEQ ID NO: 180082 - DNA, 1599 bp, synthetic construct
  misc_feature 1..1599: note = Description of Artificial Sequence: Synthetic coding sequence
  source 1..1599: mol_type = other DNA
atgcccaaggcccccaagcagcagccccccgagcccgagtggatcggcgatggggagagcaccagcccatccgacaaggtggtcaagaaagggaagaaggacaaaaagatcaaaaagacatttttcgaggagctggctgttgaggacaagcaggctggagaggaagagaaggtgctcaaagagaaagaacagcagcagcaacaacagcaacagcagcagaagaagaaaagagatactcgtaagggccggagaaagaaagatgtggatgacgatggcgaagagaaagaactcatggagaggctgaagaaattgtccgtgcctacatctgacgaggaagacgaggttccggctcctaaacccagaggcgggaagaaaacaaagggaggtaatgtgttcgcagcccttattcaggaccagtcagaagaggaggaggaggaggagaagcaccctcccaagcccgccaagcccgagaagaacaggattaataaggctgtgagtgaggagcagcagccagccctaaagggcaagaaaggcaaggaagaaaagtcaaaaggcaaggcgaagccacagaacaagttcgccgccctggataatgaagaggaggacaaggaagaagaaatcattaaagagaaggagccaccaaaacaggggaaagaaaaagcaaaaaaagcagaacaaggatcggaagaagaaggagaaggggaggaagaggaagaggaagggggggagagcaaagctgacgacccttatgctcatctgtccaaaaaagagaagaaaaaactaaagaaacaaatggagtatgaacgccaagtggcgtcattgaaagccgctaacgctgcggagaatgacttctccgtgagccaggcagagatgtcaagtcgacaagcgatgttggaaaacgcgtccgatattaagttggaaaagtttagcatctccgcccacggcaaagagcttttcgtgaatgcggacttgtacattgtagccgggcggcgttacgggctcgttggacccaatggcaagggcaagaccacactcctgaaacacatcgctaacagggccctgtccattccgccaaatattgacgtgttgctctgtgagcaggaggtggttgctgatgagacccctgccgttcaggccgtgctaagagatgacaccgctgcggagcgtcttgagaaagtgtatgaggagttgagagctacaggcgcggctgccgccgaagcaaaggcaaggaggatactggccggcttgggctttgacccagagatgcaaaaccgaccaacccaaaaattttcgggtgggtggcgaatgagggtgtcactagctcgagcactgtttatggagccgaccctcttaatgctggatgaaccgacaaataatttggatatcgagagtatcgatgccctcggagaggctattaatgaatacaagggcgctgttatcgtagtatctcatgatgcacgactcatcactgagaccaattgtcaactgtgggttgtggaggaacaatctgtcagtcagatcgacggcgacttcgaagattacaagcgggaagtgctggaggctctgggagaggtgatggtctctcgaccaagagagtag

SEQ ID NO: 180083 - DNA, 1602 bp, synthetic construct
  misc_feature 1..1602: note = Description of Artificial Sequence: Synthetic coding sequence
  source 1..1602: mol_type = other DNA
atgcccaaggcccccaagcagcagccccccgagcccgagtggatcggagatggcgagtccacttcacccagtgataaagtcgtgaagaagggcaagaaagataaaaaaattaaaaagacctttttcgaggaacttgccgtggaggacaaacaggctggagaagaggagaaagtgctgaaggagaaggagcagcagcaacagcagcaacagcagcagcagcagaaaaagaagcgggacacgcggaaaggacgtagaaagaaagacgtggatgatgacggtgaggaaaaggaactgatggagcgactcaagaagttgtccgtgcctacctctgacgaagaagacgaggtcccggctcccaagcctagggggggcaaaaagaccaagggaggtaacgttttcgctgctctgattcaggatcagagtgaagaggaggaggaagaagaaaagcacccacctaagcctgcgaaacctgaaaagaataggatcaacaaggctgtctctgaagagcaacaaccagctttgaaagggaagaaaggtaaagaggagaaatccaaggggaaggccaagcctcagaacaaatttgcagccctggacaatgaggaagaggataaagaagaagaaataatcaaggagaaagaacctcctaagcagggtaaagagaaagctaagaaggcggagcaaggatctgaggaggaaggggagggcgaggaagaagaggaggaggggggcgagtctaaggctgacgacccctatgcccacttgagcaagaaggagaagaagaagcttaagaagcagatggagtatgagcgccaagtcgcgtcccttaaggcggctaacgccgcagaaaacgatttttcagtatcacaggccgagatgtcaagtcggcaggcgatgctggagaatgcaagcgacattaagcttgaaaaattctcaataagtgcccatgggaaggagctgttcgtgaacgccgacctgtatatcgtggccggcagaaggtatggactcgtcggcccaaacggcaaaggtaaaaccacactcctgaaacacattgcaaatagggcgcttagtatccctccaaatattgacgtactactgtgcgagcaggaggtcgtggcagacgagaccccggcggttcaggccgtgttgagagacgatacagcagccgaaaggcttgaaaaggtgtacgaggagttgcgcgcgacaggcgcagccgccgccgaagctaaggcacggcggatactagcagggctgggctttgatccagaaatgcagaatagacccactcaaaagttttctggcggatggcgaatgagagtgtcactggcacgagctctcttcatggaaccaacactcctcatgctggatgagcctacgaacaatcttgatatagaatctattgacgcgctgggcgaggccatcaacgagtacaagggcgccgttatcgtggtgtcccatgacgcccgcttgatcactgaaaccaattgtcaattgtgggtcgtcgaagagcagtcagtcagccagatcgatggtgacttcgaagattacaaacgggaggtcttagaggcccttggagaggtgatggtgagcagaccaagagagtag

SEQ ID NO: 180084 - DNA, 1515 bp, synthetic construct
  misc_feature 1..1515: note = Description of Artificial Sequence: Synthetic coding sequence
  source 1..1515: mol_type = other DNA
atggacctgatccccaacttcgccatggagacctgggtgctggtggccaccagtttggtcctgctgtatatttatggcacccactcgcataagttgttcaagaagcttggaatccctggacctactcctctcccctttttgggcacaatacttttttacctgcggggcctgtggaactttgatcgagagtgcaatgagaagtacggggaaatgtggggcctgtacgaaggccagcagcctatgctggtaatcatggatcctgacatgatcaagaccgtgttggtgaaagaatgctattcagtatttactaatcagatgcccctcggccccatgggatttctcaaaagcgctttgtcgttcgccgaagacgaggagtggaagcgcataaggaccctgctgtctcctgccttcacctcggtgaagtttaaagaaatggttccaattataagccagtgtggggacatgctggtgcgttcactgcgccaggaggctgagaactctaaatctatcaacctcaaggacttcttcggcgcttacacaatggacgtaataacgggaacactgtttggggtgaatctcgactcactgaacaacccacaggatccctttttaaagaatatgaagaagctcctcaagctcgatttcttggatcccttcctactgctgattagcctgtttcccttcctgactcctgtcttcgaggcactgaacatcggcctgttcccaaaggatgtcactcattttttaaagaactctatagaacgaatgaaggaatctagactcaaggacaaacagaagcacagggtggatttttttcagcagatgattgattctcaaaactctaaggaaaccaaatcacacaaggccctgtccgacttagagctggtggctcagtcgatcatcatcatattcgccgcatacgacacgacttctacaacactccctttcattatgtacgagctcgcaactcacccggatgtccaacagaaactgcaggaggagatagacgcagtcctccctaataaggctccagtgacatacgatgcattggttcagatggagtaccttgacatggtggtaaatgagactctgaggttgttcccggtggttagtcgcgttacaagagtctgcaaaaaagacattgaaatcaacggcgtcttcatccctaaagggctggcagtcatggtaccaatctatgccttacatcatgacccaaagtactggacagagccagaaaagttttgtcccgaatctcgctttagcaagaaaaacaaggactccatcgacctgtatagatatattcccttcggtgccgggcctcgcaattgcattggaatgagatttgcactgaccaacatcaaacttgccgtgatcagagcattacaaaatttttcgtttaaaccttgcaaggagacccagatccccctcaagctagacaatctgcctattctccaaccagaaaaacccatagttctgaaggtgcatcttagggatgggattactagcggcccttag

SEQ ID NO: 180085 - DNA, 1872 bp, synthetic construct
  misc_feature 1..1872: note = Description of Artificial Sequence: Synthetic coding sequence
  source 1..1872: mol_type = other DNA
atgcccagcgacctggccaagaagaaggccgccaagaagaaggaggctgctaaggcacgccagcgaccaaggaaggggcatgaggagaacggagatgtggtaacggagccacaagtggcagaaaaaaacgaggccaacgggcgcgagactacagaggtggacctcctgaccaaggagctggaagacttcgaaatgaagaaggccgctgctagagccgtgaccggggttttggccagccaccctaatagcaccgatgtacacattataaatctttccttaaccttccacggtcaagagctgttgtcggacaccaagctggagttgaattcaggaaggaggtatggcctcattggtctaaatggaattggcaaatccatgctgttgtccgccataggaaaaagagaggtgcctattccagaacacattgacatataccatctgacgcgagaaatgccaccctcagataagactcctctgcactgtgtcatggaagtggacacggaacgcgccatgctcgaaaaagaggccgagaggctggcccatgaagatgctgaatgcgagaagctcatggaactgtatgagcgcctggaagaattggacgccgataaggctgaaatgcgtgctagtcgcatcctgcatggtctgggatttaccccagccatgcagcgtaagaaactgaaggacttcagcggaggttggaggatgcgcgtggctctggcccgtgccttgttcattagacctttcatgttgctcctcgatgagccaaccaaccacctggacctggatgcttgcgtgtggttagaggaagagctcaagaccttcaaaagaatactggtgttagtgtcgcactctcaggactttttgaatggggtctgtacgaacattattcatatgcacaacaagaagctgaaatattatactggcaactatgaccaatatgttaaaacgcgactcgaacttgaggaaaaccagatgaagaggttccactgggagcaggatcaaattgcccacatgaagaactatatcgccagattcgggcatggttcagccaaactggcaagacaagcccagagcaaagaaaaaacacttcagaagatgatggcgtccggactgaccgagagagttgtgtccgataagactctgagcttctacttccccccttgcggcaagattcccccccctgtgataatggtgcagaatgtttccttcaaatacacaaaggatggcccctgtatatacaacaacctggagttcggcattgatctcgacaccagggtggcactggtaggacctaatggcgccgggaaatcaacactgcttaagctcctgacaggagaactactacccacagacggcatgattcgtaagcattctcacgtgaaaatagggcgctaccaccaacatctgcaggagcagttggatttagacctgtctcccctcgaatatatgatgaaatgctatccggaaattaaagaaaaggaagagatgcgcaaaattattggccgatacggtttgacagggaagcagcaagtgagtcccatacgcaatctgagtgacggccagaagtgtcgggtgtgcctcgcctggctggcatggcagaatccacatatgctgttcctggacgagccaacaaaccacctcgacatcgagactatcgacgctctggcagacgcaatcaatgagtttgagggcggaatgatgctggtcagtcatgattttcgcttgatccagcaggtggcccaagagatctgggtctgtgagaagcagactatcaccaagtggcccggcgatatactggcgtacaaggagcacctgaaaagtaagctggtcgacgaagaacctcagctcactaaacggacccacaatgtttag

SEQ ID NO: 180086 - DNA, 723 bp, synthetic construct
  misc_feature 1..723: note = Description of Artificial Sequence: Synthetic coding sequence
  source 1..723: mol_type = other DNA
atgcccagcgacctggccaagaagaaggccgccaagaagaaggaggccgccaaagcgagacagaggcctcgaaagggccatgaggagaacggagacgtcgtgaccgagccacaggtcgctgagaagaacgaggccaacggaagggaaaccactgaagtcgacctgctgacaaaagagcttgaagactttgaaatgaagaaagctgccgcaagggctgttacaggggtccttgcctcccaccccaacagtaccgacgtgcacatcattaacctgtcgctgaccttccatggacaggaactcctgtccgacacgaagttggagttgaactcaggacggcggtacggactcatcgggttgaatggcattggcaaatcaatgctgctgtctgccatagggaagagagaagtcccgattccagagcatattgacatctaccacttgaccagggagatgccccccagcgacaaaaccccgctgcattgtgttatggaggtggatacggagagagctatgctcgaaaaggaagctgagcggctcgcgcatgaagacgctgagtgcgagaaactgatggaactctatgaacgcttagaggagctcgatgccgataaagctgagatgagagcgtctagaatcctacacggcttgggctttacaccagcaatgcagcggaaaaagctaaaagacttcagtgggggttggcggatgagagtggccctggcctag

SEQ ID NO: 180087 - DNA, 867 bp, synthetic construct
  misc_feature 1..867: note = Description of Artificial Sequence: Synthetic coding sequence
  source 1..867: mol_type = other DNA
atgcccagcgacctggccaagaagaaggccgccaagaagaaggaggcggccaaggcgcgccagcgtcctcgcaaggggcatgaggagaacggggacgtggtgacagagccccaggtggccgagaagaacgaagccaatggccgggagaccacggaggttgacctgctcaccaaagaactggaagacttcgagatgaagaaggcagcagcacgagccgtgaccggagtgctcgcgtcgcaccctaactcaacagatgtccacataattaatttgtctctcactttccacggccaagagttacttagcgacacaaagctcgaactcaatagcggccggaggtacggactgatcggtcttaacggcattgggaagtctatgctgctgagcgccattggaaagcgtgaagtccctatacctgagcatatcgatatctaccacctcactcgcgagatgcccccaagcgataagacgccactccactgcgtgatggaagttgacaccgagcgagcaatgttagagaaggaggctgagcggttggctcacgaggatgctgaatgtgaaaaactgatggaactctatgagcggctcgaggagctagacgcagacaaggccgagatgcgcgccagcaggatacttcacggactcgggttcaccccagccatgcaaagaaaaaagctgaaagacttttcagggggatggcgaatgagggtcgcgctggcacgagcgctcttcatacgccccttcatgctgctgcttgacgagccaactaaccatttggaccttgatgcgtgtgtatggcttgaggaggaattgaagaccttcaaaagaatactcgttttggtttcccattcccaggatttcctgtag

SEQ ID NO: 180088 - DNA, 2361 bp, synthetic construct
  misc_feature 1..2361: note = Description of Artificial Sequence: Synthetic coding sequence
  source 1..2361: mol_type = other DNA
atggtgcggcggggctggagcgtgtgcaccgccatcctgctggccagactctggtgcctggtccccacccataccttcctctctgaatatcccgaggctgccgaatatcctcatccaggatgggtctactggctgcagatggccgtggcacccggtcacctacgcgcatgggtcatgaggaacaacgttactaccaatatcccgagcgctttttcgggcactctgacacacgaggagaaggcagtgctcacagtgttcaccggaaccgctactgcagtacacgtgcaggtggcagcactggcttcagcaaagctggaatctagcgtctttgttacggattgtgttagctgcaagattgagaacgtttgcgacagtgcactccaagggaaaagagtgcccatgtcaggcctacagggttcctccattgtaattatgccaccatctaatcggcctctgaaggcaagcgccgcgtcttgcacctggtcggtgcaagtgcagggggggccgcatcacttgggagtggtcgccatcagtggcaaggtgttaagcgctgctcatggcgctggcagagcctacggatgggggttcccaggcgatccaatggaagagggctataaaacactcctgaaaggcatcagcggaaagttcaattccggagaactcgtcgccattatgggaccatccggggctggcaaatctacgctgatgaacatcctcgcaggctaccgcgagacgggaatgaagggcgctgtgttgatcaatgggctgccaagggacctacgatgttttaggaaggtgagctgttacatcatgcaggatgacatgcttctgccccacctgacggtccaggaagcaatgatggtttctgctcacctgaagctccaggaaaaggatgagggtcgccgagaaatggtcaaggagattctaacggcccttggacttttgtcatgcgccaatacccgcactggatcgctgtccggcggccagcggaagaggttggccatagccctcgagctggttaacaatcctcctgttatgttctttgatgagcccaccagcggcctggactcagcttcgtgcttccaagttgtttcccttatgaaggggctcgcccagggcgggagatccatcatctgtaccatccaccaaccctctgccaagctttttgagctttttgatcagctgtatgtgcttagccaggggcagtgcgtgtatcgcggtaaggtgtgtaatttggtcccctatctaagggatttgggcctgaattgtccaacataccacaacccagcagattttgtcatggaagtcgctagcggcgagtacggtgaccagaatagtagactggtgagagccgtcagagagggaatgtgtgactccgaccataagagggatctcggaggcgatgccgaggtgaaccctttcctgtggcatcggccaagtgaagaggtgaaacaaacaaaaaggctaaagggattgcgaaaggacagttctagtatggagggttgccactccttttcggcatcatgccttactcagttttgtattctgtttaagagaacctttctgagcatcatgagagatagtgtcctgacccatttgcggatcactagccatatcgggattgggctgctcataggtctactgtacctgggcattggcaatgaggcgaagaaagtactttctaactctggatttttatttttttctatgcttttccttatgtttgctgcccttatgcccaccgttttaacgtttccattggagatgggggtatttctgagggagcaccttaactactggtattccttgaaagcctattatctcgccaaaaccatggcagacgtgccttttcagattatgtttcccgtagcctattgttccattgtatattggatgacctcccagccttccgatgccgtgcgctttgtgctattcgctgccttgggcacaatgacatctctggttgcccaatccttagggctgctcatcggggcggccagtaccagtttacaggtagcgacctttgtcggtccagtgacagccatcccagtactgcttttcagtggctttttcgtgagttttgataccatcccaacatatctccagtggatgagctacatctcttatgtccgttacgggttcgaaggtgtgattctctcaatctatggcttggatcgggaggatctccactgcgatatcgatgaaacctgtcactttcagaagtctgaggccattctgagagaactggacgtggagaacgcgaaactatatctggatttcatcgtgctgggaatctttttcattagtctgcgcctcatagcttacttcgtgctgcgatataagataagagccgaacgctag

SEQ ID NO: 180089 - DNA, 2034 bp, synthetic construct
  misc_feature 1..2034: note = Description of Artificial Sequence: Synthetic coding sequence
  source 1..2034: mol_type = other DNA
atgcggatcagcctgccccgggcccccgagcgggacggcggcgtgagtgcctcttctcttctggataccgtgacaaatgcatcatcttactcagccgagatgactgagcctaagtcagtctgcgtgtcagtcgatgaggtggtgtccagcaatatggaagctacagagactgatttgctgaatggccatctgaagaaggtcgacaacaatctgacagaggcgcagaggtttagctcgctgccccggcgtgcggccgtgaatatcgaatttcgcgatctttcctacagcgtccctgaggggccttggtggagaaagaaaggctacaaaactttgctcaagggtatcagcgggaaatttaattctggagagctggttgctattatgggccctagcggcgccggcaagagtactctgatgaatatccttgctggatacagagaaaccggaatgaaaggcgccgttcttatcaatggactgccccgagaccttcgctgcttcaggaaggtgagttgctacattatgcaagacgacatgctgttacctcacctaactgtccaggaagcgatgatggtgtccgcccatctgaagttacaggaaaaggatgaaggtcgcagggaaatggtaaaggagatactcacagccctgggtctgctcagctgcgccaatacccggactggctctctctccggagggcaaagaaaaagactcgcaatagcactggagctggtaaataaccccccagtgatgtttttcgacgagcccaccagcggacttgattctgctagctgtttccaggtggtaagtctcatgaaaggactcgcccagggcggcagatccatcatatgtaccattcatcagccctctgctaaactgttcgaactttttgaccagctttacgtcctgagtcagggccagtgcgtctaccgaggtaaggtgtgcaatttggtgccatacctcagagaccttggccttaactgcccaacctaccacaacccagcagacttcgtgatggaggtggccagcggtgaatatggggatcagaattcgaggctggtcagagcagtacgggaggggatgtgtgactctgaccataagagggatctgggaggggacgctgaggtgaatccttttctgtggcaccggccgtctgaggaggacagcagttctatggaaggctgccactcgttttcggcatcttgcctcactcaattttgtatcctttttaaacgcaccttcctgagcatcatgagagactctgtcctgacccacttacgcattacgtcgcatattggtatcggcctgttgattggtctcctgtacttggggattggcaacgaggccaaaaaggtgctatccaacagtggattcctgtttttctccatgctcttcctgatgtttgctgcactcatgccgaccgttctgacctttcctctggagatgggcgtgttcttacgcgagcacttgaactactggtattcacttaaagcctattatctggcgaagactatggccgatgtccctttccaaattatgtttccggtagcttattgttctatcgtctattggatgactagccaaccaagtgacgccgttcggttcgtgctgtttgccgccctgggcaccatgacttccctcgttgcccagtctctcgggctgttgatcggagccgctagcacaagcctacaagtcgctacattcgtgggtcccgttactgcaatccccgtcctccttttttccggctttttcgtctccttcgacactatacccacttacttgcaatggatgagttatatttcatacgtgcggtatggtttcgagggagtcatcctgtcgatatacggactcgaccgcgaagaccttcactgcgatatcgacgagacatgccatttccagaaatcagaagctatccttcgggagctggatgtagaaaatgccaaactctacctggatttcattgtcctggggattttttttatcagcttacggctgatcgcttattttgtcctgcgttacaaaattagggccgagcgttag

SEQ ID NO: 180090 - DNA, 1992 bp, synthetic construct
  misc_feature 1..1992: note = Description of Artificial Sequence: Synthetic coding sequence
  source 1..1992: mol_type = other DNA
atgatcatgcggctgccccagccccacggcaccaacgccagcagctatagtgcagagatgactgaacccaagtccgtctgtgtcagcgtggacgaggtagttagcagcaatatggaagccacagagacagaccttcttaatgggcatctcaaaaaggtagataacaacctgacagaggcgcaaagattcagtagcctccctagaagggcagccgttaacattgaattccgggatttgtcctattccgtacccgaaggcccttggtggaggaagaagggatataagaccctcctgaagggaatttccggaaaatttaattctggggagttggtggctatcatgggcccgagtggggctggaaagtcaacgctgatgaacatccttgccggttacagagagacaggaatgaagggggccgtgctgattaacggtctacctcgggacctcaggtgctttcgtaaggtcagctgttatattatgcaagatgacatgctgctgccccatctgacagtgcaagaggccatgatggtttctgctcatctgaagctgcaggagaaggacgaagggcggcgcgagatggtgaaggagatcctgaccgccctcgggttactttcctgtgcgaataccagaacgggttcactgagcggcggccaacggaaacgccttgccatcgcgttggagcttgtgaacaaccctcccgtgatgttctttgacgagcccacctccgggctcgacagcgcatcttgttttcaggtcgtttccctcatgaagggccttgcccagggaggtcgcagtatcatttgcaccatccaccagcccagcgcgaagctcttcgaactctttgaccagctctacgtcctgtctcaaggccaatgtgtctacagaggaaaagtctgtaacctagtcccatatctacgcgacctcggcctgaattgccctacttaccataacccagctgattttgtgatggaggtcgcttccggggaatacggggaccagaatagtagactggtccgcgccgttagggaagggatgtgcgatagcgatcacaagcgcgatctcggcggcgatgcggaagtaaacccctttctctggcatagaccaagtgaggaagatagctcaagtatggaaggttgccactccttctccgcctcgtgtctgactcagttctgtatcttatttaagaggaccttcctgtccatcatgcgggatagcgtccttactcatttgcgaatcacttctcatatcggaattggtctcctcatcggcctgctataccttggcattggaaacgaggctaagaaggtactgagcaactcaggctttctcttctttagcatgttgttcctgatgtttgccgctttgatgcctaccgtgctaaccttccccctggagatgggggtttttctgcgagagcatctgaactattggtacagcctgaaggcttattatctggccaaaaccatggccgacgttccatttcagattatgttcccagtggcttactgctcgatcgtatattggatgacttcacagccgtccgacgcagtgcgatttgtcctgtttgctgcgttaggaaccatgacctcacttgtcgcccagtcactcgggctgttgattggcgccgcaagcacctcccttcaagtggctacgtttgtaggaccagtgactgccatcccagtcttgctgttctcaggtttttttgtgagtttcgacactatccctacgtacttgcagtggatgtcgtatataagctatgtaaggtatggatttgaaggcgttatcctcagtatttacggactcgaccgggaggacttgcactgcgacattgatgaaacctgccactttcagaagtctgaagcaatcctgagggagctcgacgtagaaaacgctaagttgtacctggatttcatcgtgttagggatttttttcatttcgctaaggctgattgcttacttcgttcttaggtataaaatccgggcggaacgttag

SEQ ID NO: 180091 - DNA, 2037 bp, synthetic construct
  misc_feature 1..2037: note = Description of Artificial Sequence: Synthetic coding sequence
  source 1..2037: mol_type = other DNA
atggcctgcctgatggccgccttcagcgtgggcaccgccatgaacgcaagctcctacagcgctgagatgacagaaccaaagtccgtgtgtgtcagtgtagacgaagttgtcagttccaacatggaagccacggaaactgacctgctgaacggacatctgaaaaaagttgacaataacctcacagaggctcaaaggtttagttctcttcctcgccgggccgctgttaacatagaatttagagatttgtcctattccgtcccagaaggaccgtggtggaggaaaaaaggttacaaaacccttctgaaagggatcagcggaaaattcaatagcggggagttagtcgccatcatgggacccagtggcgccgggaagtcaactttaatgaacattctggcaggctacagggagaccgggatgaaaggagcagtcctgattaatggcctgccacgtgacctgaggtgttttcggaaagtcagctgctatatcatgcaggacgatatgctattacctcatctgacggtccaggaggcaatgatggtttctgcacacctcaaattgcaagaaaaggatgaggggagaagggagatggtgaaagagatacttactgccctcggactgctgagttgtgccaacacacgtactgggtccttgagcggaggtcagaggaagcggctggcgattgctttggagctggttaacaatccaccagtcatgttcttcgatgagccaacctccggacttgattcagcgtcatgctttcaggttgtctcactcatgaaaggactggcccaaggggggcgatcgatcatttgcactatccatcagccaagcgctaagctgttcgagcttttcgatcagctatacgtgctttcacagggccaatgcgtgtaccgagggaaggtgtgcaatctcgtcccatacttacgtgacttagggctgaattgccccacatatcataatcccgctgattttgtcatggaggtggcttccggcgagtatggagaccagaatagtcggctggtgcgggccgtgagggagggaatgtgtgactctgaccacaaacgggacctcggcggtgacgctgaggtgaatccattcctgtggcacagacctagcgaggaagtgaagcagacaaaaagactaaaggggctgcgcaaagacagcagctccatggaggggtgccattcattttctgctagctgtctgacccaattttgcattttgttcaaaaggacattcctgtccatcatgagggatagtgtcttgacccacctgaggataacatcgcatataggtatcggtcttctgatcggcctactatacctgggtatcgggaatgaggccaaaaaagtgctgagtaatagtggatttctttttttctctatgttgttcctgatgtttgccgctctaatgcccacagtactaacctttcccttggagatgggagtcttcctccgcgagcacttgaactactggtattccctgaaagcttactacttggcaaaaacaatggcagatgtgccctttcagatcatgtttcccgtggcctattgctccatcgtgtactggatgacctcccagccttctgacgccgtgcgattcgtgctgttcgccgcccttgggacaatgaccagtctggtggcacagagcctggggctgctgatcggagctgcgtccacgtccttacaagtggctacttttgtcggccctgtcactgccatccctgtcctgctcttctccggattcttcgtttctttcgatactattcccacttacctgcagtggatgagttacatctcgtacgtacgctacgggtttgaaggggtgattcttagtatctacggtttagatcgggaagacttgcactgcgatattgacgagacctgccattttcagaaaagtgaggccatactgcgggaactagatgtggagaacgccaagctgtatctcgattttattgttctggggatctttttcatcagcttgcgtctcattgcatacttcgtgctgcgttataagatacgagcagagcgttag

SEQ ID NO: 180092 - DNA, 2475 bp, synthetic construct
  misc_feature 1..2475: note = Description of Artificial Sequence: Synthetic coding sequence
  source 1..2475: mol_type = other DNA
atgctggccgtgcagcagaccgagcacctgcccgcctgcccccccgctcgcagatggtcttccaacttttgtcctgagagtactgagggaggtccaagcctccttggtctgcgtgatatggtaagacgggggtggagtgtttgcacggcgatactgttggctagactatggtgtctcgttcctacacataccttcctgagcgaatatcccgaggcagcggaatacccacaccccggatgggtctactggctccagatggccgtagcgcccggccacttacgggcctgggttatgcgcaacaacgttacaaccaacatccctagcgcattcagtggaacactgacacacgaagaaaaagcggtgttgaccgtgttcaccgggacggcaaccgcggttcatgtgcaggttgctgcactcgcatccgccaagctggaaagctctgtattcgtcacggattgcgtctcatgcaaaattgaaaacgtctgtgactccgctttacaaggcaagcgagtgcccatgtccggattgcagggatcttctatagtgattatgcctccatcaaaccggccgctggccagcgcggcctcctgtacctggagtgtccaggtccagggcggacctcatcaccttggtgtcgtggcaatctccggcaaagtactgtccgcagcccacggagccggccgagcttacgggtggggcttccctggcgaccccatggaggagggatacaagacactgctgaagggcatttcgggaaagtttaattccggcgaacttgtggcaataatgggtccatctggagccggtaaatccactttaatgaatatattggcgggctatcgcgagaccggtatgaaaggcgccgtcttaattaatggcctgccaagggacttgcgctgtttccgcaaagtgtcttgttacattatgcaagatgacatgctgctcccacacctcactgtgcaagaagccatgatggtaagcgcccacttgaagctgcaggagaaggacgaggggagaagagagatggtcaaggaaattttaacggcccttggcctgctgtcatgcgcaaacaccaggaccggatccctatctggcggccagcgcaagagactggccatagcacttgagctcgtgaacaatcctcctgtcatgttcttcgacgagcccactagcggtttggattccgcgtcttgttttcaggtcgtttctctgatgaagggacttgcccagggcggtaggtccattatttgcaccatccatcagccaagcgcaaaattgtttgagctgttcgaccaactctatgtccttagtcagggtcaatgcgtttataggggcaaggtttgcaacctggttccttatctgcgcgatttgggcttaaactgtccgacttaccataatccggccgactttgtcatggaggtggccagcggagaatatggggaccagaattcacgactcgtgagagccgtgagggaaggaatgtgtgactccgaccacaaaagagatctgggcggggacgcagaggtgaacccctttctgtggcaccgccctagcgaggaagtgaagcagacgaagagattaaagggactgagaaaggactccagctcaatggaaggctgccactccttttccgccagctgtctgactcagttttgcattttattcaagcggacctttttgtccattatgcgggattctgttcttacacatctgcgtattacctcccacatcggtattggtctgctgatcggcttgctttacctgggaattggtaatgaagccaagaaggtgctgagtaactctggattcctgttcttcagcatgctgtttctgatgtttgccgcattaatgcctaccgtgcttaccttccccctggagatgggagtgttcctcagggagcacctgaattattggtattctctcaaagcatattatttagccaaaacgatggcagatgtgccctttcagatcatgttcccagttgcctattgcagtattgtgtattggatgacctcgcagccttccgacgcggtgaggttcgtcctattcgcagcgctggggactatgacgtccctggtggctcaatctttagggctcctgatcggggcagccagcacttctctccaggtggcaacatttgtcggccccgtcacggctattcccgttctgcttttttctggtttcttcgtgtccttcgacactattcctacttacctgcaatggatgagttacatcagttacgttaggtatggcttcgaaggcgtgattctatctatctacggccttgaccgcgaagacctgcactgtgatattgacgaaacttgtcacttccaaaaatcagaagctatcctgagggagctggacgtggaaaacgctaagctctacctggatttcattgtcttgggaatttttttcatttctttacgcctaatagcatattttgtccttagatacaagattcgtgcagagcgatag

SEQ ID NO: 180093 - DNA, 2001 bp, synthetic construct
  misc_feature 1..2001: note = Description of Artificial Sequence: Synthetic coding sequence
  source 1..2001: mol_type = other DNA
atggcctgcctgatggccgccttcagcgtgggcaccgccatgaacgcctcatcctattccgcagaaatgacagaacccaaatcggtgtgcgttagtgtcgacgaggtcgtgagttcaaacatggaagccactgagaccgacctgttgaacggacatctgaagaaggtggacaacaacctgaccgaggcccaaagattttcctccctaccacggcgcgctgctgtcaacattgaattccgggatctttcctacagcgttcccgagggaccctggtggcgcaaaaagggctataagacactgctgaaagggatttcgggtaaattcaattccggggaacttgtggccattatgggaccctcaggcgccggcaaatcaacccttatgaatatccttgcaggctacagagagaccggtatgaagggggcagtcctaataaacggcctgcctagagatctgaggtgtttccggaaggtgtcttgttacatcatgcaggatgatatgttattaccacacctgaccgtccaggaagccatgatggtttccgcgcacctgaagctccaggaaaaagatgagggccgcagggagatggtgaaggaaatcctcacagccctgggactgctgtcatgcgccaacactagaacaggtagcctgagcgggggtcaaagaaagagactggcaattgctctcgagttggtgaacaatccccccgtgatgttctttgacgagcctacctcggggttagattctgcttcttgttttcaggtagtaagcctgatgaagggactggcgcaggggggtcggtccattatttgtacaatccaccagccatcggccaagctcttcgaactgttcgatcagttgtatgtcctgagccaggggcagtgcgtgtatcgcgggaaagtgtgtaatctggtcccttacctgcgagacctgggtcttaattgccccacctaccataaccccgccgactttgtcatggaggttgcctccggcgaatacggggaccagaactcaaggttagtaagggctgttcgagagggaatgtgcgacagtgaccacaaacgcgacctcggcggagatgccgaagtgaaccccttcttgtggcatagacctagcgaggaagattcgtccagcatggaaggatgtcatagcttttcggcaagctgtctcacgcagttctgtatccttttcaaacggaccttcctgtctatcatgcgcgatagcgttttaacacacttgcgcataacgtcgcatatcgggatcgggttgctgattggcctgttataccttggaattggaaatgaggcaaagaaggtgctttccaatagcggctttctgttttttagcatgcttttcctgatgttcgcagccttaatgcccaccgtgttgacgttccccctggagatgggagtcttcctgcgagaacatctaaattattggtattcacttaaagcttactatctggcaaaaactatggctgacgtaccatttcaaattatgttcccggttgcgtattgttccatagtgtactggatgacctctcagccatcagatgccgtgcgattcgtgctttttgccgctcttggtaccatgacatccctggtggctcagtctttgggcttactcattggagcggcctctacctctcttcaggtggccactttcgtagggccggtgaccgctatccctgtactgcttttcagcggcttctttgtgtcttttgacactatccccacctacttgcagtggatgtcctacatttcctatgttaggtatggctttgagggtgtgatcctaagcatatatggtctcgatcgggaggatctacactgcgatatcgacgagacctgccatttccagaaaagcgaggccatcctgagagaacttgatgtggaaaacgccaagctttacttggatttcatcgtcttggggatcttctttattagcctgcgtcttattgcatatttcgtgttgagatacaagatacgcgccgaacgttag

SEQ ID NO: 180094 - DNA, 2007 bp, synthetic construct
  misc_feature 1..2007: note = Description of Artificial Sequence: Synthetic coding sequence
  source 1..2007: mol_type = other DNA
atgctgggcacccagggctggaccaagcagcggaagccctgcccccagaatgcttcttcgtattctgccgagatgactgagccgaagagcgtctgcgtgagcgtagacgaggttgttagctccaatatggaagcgacggagactgatttgctcaacgggcacctgaaaaaagttgacaataatctaaccgaagcacagagattctcatccctacctaggcgggccgccgtaaatattgagtttcgagacctgtcttactcggtgcctgaaggcccctggtggcgcaaaaaaggttataagacactgctgaagggaatatcagggaagtttaacagcggcgagctcgttgctataatgggaccttctggggcaggcaagtcaacgttgatgaatattctcgccggctaccgcgaaaccggtatgaaaggggccgtgttaataaatggactcccccgggatctgcgttgttttagaaaggtgtcatgttatattatgcaagatgatatgcttttaccacacctgactgtgcaagaggctatgatggtgagcgctcacctgaaactacaggagaaggacgagggcagacgagagatggtgaaagaaatcctgactgccttgggtctcctgtcttgcgctaataccaggaccgggtctctgagcggcggccaaagaaaacgactcgcgatcgctttggagctcgtgaacaaccctcctgttatgtttttcgacgagccgaccagcggcctagatagtgcgtcctgtttccaagtggtgagcctcatgaaaggactagcccaggggggccggagtattatctgtaccatccaccagcctagcgccaagctcttcgagctgttcgatcagttatacgtcctctcccagggtcagtgtgtgtataggggtaaggtctgcaatctggtaccatatctccgagaccttgggttgaattgtccgacctaccataatcctgccgattttgtgatggaggtagcttccggcgaatatggcgaccagaacagtagactcgttcgcgctgttcgcgagggcatgtgcgacagcgaccataaacgggatctgggtggagacgcagaagtgaatcctttcttgtggcatcgacctagcgaagaagattcttcctccatggaaggttgtcatagtttcagcgcaagttgtttgactcagttttgcatacttttcaaacgcaccttcctttctataatgagagactctgttcttacacacttgcgaattacaagccacatcggtatcggacttctgattggactcctgtacctgggcattgggaatgaggcaaagaaggtcctaagcaactcagggtttctctttttcagtatgttgttcctgatgttcgcggcactgatgcccaccgttttaacattcccgttggaaatgggcgtgttcttgagggaacacttgaactattggtatagtttgaaagcctattacttggccaagaccatggccgatgtcccgttccagataatgttcccagtcgcttattgttccatagtgtactggatgacctctcagcctagcgacgcagtacggtttgttcttttcgcggccttgggcaccatgacctcactggtcgctcagtctttgggtctgctgattggtgccgcatcaacctccttgcaggtcgcgacattcgtcggtcctgtcaccgcaattccagtgctgctcttttctggcttttttgtatcatttgatactattccaacctacttgcagtggatgtcatacatctcttatgtgcgttacggctttgagggcgtcattttgtctatttacggattggaccgagaagaccttcactgcgatattgatgagacatgccactttcagaaatccgaggcaatcctccgcgagctcgacgtagagaatgccaagttatacctggatttcattgtgctcggtatctttttcatcagccttcgcctgatagcttatttcgtccttcgatataaaattagagccgagcggtag

SEQ ID NO: 180095 - DNA, 1941 bp, synthetic construct
  misc_feature 1..1941: note = Description of Artificial Sequence: Synthetic coding sequence
  source 1..1941: mol_type = other DNA
atggccgagaaggccctggaggccgtgggctgcggcctgggccccggggccgtggccatggcagtgacactggaggatggtgcagagccgcccgtgttgacgacccacctcaagaaggtggaaaatcacattactgaggcccagagattcagccatttaccaaagcggagcgccgtcgacatcgagtttgtggagctctcttattctgtaagagaaggcccttgttggcggaagcgcggctataaaaccctgctcaagtgcctttctggaaagttttgcaggcgggaattaataggcatcatgggaccctctggggcagggaagtccaccttcatgaacatcctggcaggatacagggaatccgggatgaagggccagatcctagtaaacggaagacctcgagagctccgcaccttcaggaagatgtcatgttacatcatgcaggatgatatgctgctgcctcacctgactgtcttggaggccatgatggtgtcagccaaccttaagctgagcgagaagcaggaggtgaaaaaagagctggtgaccgagatcctcacagctctcggactcatgagctgtagccacacgaggacagcgcttttgagcggagggcagcgcaagaggctggccattgccttggaattagtgaacaacccacctgtcatgttcttcgacgagccaacgagcggcctcgacagtgcaagttgcttccaagttgtcagcctgatgaaaagtctcgcgcaaggcggcagaaccatcatttgcaccatccaccagccctccgccaagttgtttgaaatgtttgataagctgtatatcctgtcccagggacagtgtatatttaagggagtcgtcactaatctgattccctacttaaaggggctggggttgcattgcccaacttatcacaaccccgcggatttcattattgaggtggctagcggggagtatggagacctgaatccaatgttgttcagagccgtgcagaacgggctgtgcgcgatggctgagaagaagtcgtcacctgaaaagaacgaagtccctgcaccatgtccaccctgccctccggaagtggatcctatcgaatcacacacattcgcaacgtccacactaacccaattttgtatcctgtttaagcgcacgttcctctctatcctgcgggacacagtgctgacgcatctgaggtttatgagtcatgtcgtgattggcgtcctgattgggctattgtacctgcacatcggcgatgacgccagtaaggtcttcaacaataccggatgcctctttttcagtatgctttttcttatgtttgcagcattaatgccaacggtgctgacgttccccctggaaatggctgtttttatgcgggaacacctgaactactggtacagtctcaaagcatactacctcgcgaagacaatggctgacgtgccttttcaggtagtctgccccgttgtgtactgtagcatcgtgtactggatgacaggccaacccgcggagacttcccgttttctgctcttttcagctctggccaccgcgactgcactagttgctcaatctctggggctccttatcggggccgcctccaactctctccaagttgcgaccttcgtgggccccgtcacggctatcccagttctgctgttcagcggcttttttgtgtcattcaagaccatacccacttatcttcagtggagtagttatctctcatatgtgagatacggattcgagggagtgatcttaacaatctacggcatggaaagaggggaccttacgtgtttagaggagaggtgccccttcagggagccccagagtatccttagggcgctggatgtggaggatgccaagctctatatggacttcttagttctcgggatcttttttttggctcttagactgctagcctacctcgttctgcggtaccgtgtgaagtctgaaaggtag

SEQ ID NO: 180096 - DNA, 1941 bp, synthetic construct
  misc_feature 1..1941: note = Description of Artificial Sequence: Synthetic coding sequence
  source 1..1941: mol_type = other DNA
atggccgagaaggccctggaggccgtgggctgcggcctgggccccggcgcagtggcgatggctgtcactttggaggacggcgcagagcctcctgttttaactacccatctgaaaaaggttgagaatcacattaccgaggcccaacgcttctcccatttgccaaaacgctctgccgttgatattgagttcgtagaactgtcctatagcgtgcgtgaaggcccctgttggaggaaacggggctacaaaactctgttaaagtgcctatccggaaagttttgtaggagagagcttataggaattatgggccccagtggggccggaaagtccacctttatgaatattctggctggctacagagagagcggaatgaagggccaaattctggtgaatggtagaccaagggagctgagaacctttcgcaagatgagctgctacataatgcaggatgacatgctgctgccacacctgacggtgctggaggcaatgatggtatctgccaatctgaagctcagtgaaaagcaagaggtgaagaaagaactggttaccgagattctcaccgctttgggtctcatgtcttgcagccacacccgcacagcgctactgtcaggggggcagcggaaaaggctcgccattgccctggagctggtcaacaatcccccagtaatgtttttcgatgaacccacatctggactagattccgcgtcttgtttccaggtcgtgagtcttatgaaaagccttgcccagggcggcaggacaattatttgcactattcaccagccgtcggcgaagttattcgaaatgttcgacaagttatacattctctcgcagggccagtgtattttcaagggagtggtgaccaacctgatcccctatttgaaaggactgggattgcactgtcccacttatcacaacccagctgactttatcatcgaagtggcatccggggagtacggggatctgaaccctatgctattccgagccgtccagaacgggctgtgtgccatggccgagaagaaaagcagcccagaaaagaatgaagtcccagctccttgtcctccttgtccccctgaggtagatcccatagagtcacacacgtttgcaactagcaccttaacgcagttttgtatactgtttaagagaaccttcctgtcaattctgcgcgacacagtactgacacacctgcggtttatgagccacgtggtaattggggtcctgattggcctcctatacctgcatatcggcgacgatgcttctaaggtattcaacaacacgggctgcctcttctttagtatgttgttccttatgtttgccgcattgatgcccaccgtgctgacattcccacttgagatggcagttttcatgcgagagcacctcaactactggtacagcttgaaggcctactatctggcaaaaactatggctgatgtaccttttcaagtggtctgcccagtcgtctattgctcaatcgtatactggatgaccggacagcccgcggagacatcccggttcttacttttttctgctctggccactgccacagcactggtggcacaatctttgggcctgttgataggcgctgcctctaacagcctccaggtcgccacattcgtggggcctgtgacagctattccagtcttactgtttagcggattttttgtgagtttcaagacaatccctacatacctgcagtggtcatcctacctgagctacgtcaggtacgggtttgagggcgtgattctaaccatttatggaatggagaggggcgaccttacatgcctggaagagcggtgcccgttccgcgaaccacagagcattttacgcgccctcgatgtggaggacgcaaaactgtacatggatttcttggtcctgggtatcttctttctggccttacgcctgttggcctacctcgtgctgaggtatcgtgtaaaaagcgagcgatag

SEQ ID NO: 180097 - DNA, 1941 bp, synthetic construct
  misc_feature 1..1941: note = Description of Artificial Sequence: Synthetic coding sequence
  source 1..1941: mol_type = other DNA
atggccgagaaggccctggaggccgtgggctgcggcctgggccccggggctgtcgcaatggccgtcactttggaggacggagctgagccgcccgtgctcactacgcacctgaagaaagtggagaatcacataaccgaagctcagcgctttagccacttaccaaagcgtagtgccgtagacatcgagtttgtcgaactttcttatagtgtgagggagggaccctgctggcggaagagaggttataagacgcttttgaagtgcctctccgggaagttctgccgcagggagttaatcggtataatggggccatctggagcaggcaagtccacattcatgaatatcttagcgggttaccgtgaatcgggtatgaaaggccaaattctggttaacggccggccacgcgaactccgtacctttcggaaaatgagttgttatatcatgcaggatgacatgttgttgcctcatctgacagttttagaggctatgatggtctctgcaaacctcaagctcagtgaaaagcaagaggtaaaaaaggagttggtaaccgaaatcctcaccgctctgggactaatgtcctgctcccacacgcgcaccgctcttctgtctggcggccagcggaagagactggccatcgctttggagttagtcaacaatccccctgttatgttttttgacgagccgacatcgggcctcgactctgcctcttgttttcaagtggtaagtctgatgaagtcccttgcacaagggggcaggacaattatttgtactatccatcagccaagcgctaagttgtttgaaatgttcgataagttgtacatccttagccagggccagtgcatcttcaaaggggtagtgaccaacttaattccctaccttaaagggctgggactccattgtcctacttaccacaatcccgccgactttattatcgaggtggccagcggcgagtatggtgatttgaaccctatgctctttcgcgctgtacagaatggactctgcgcgatggccgaaaaaaagtctagtcccgagaaaaacgaggtacctgcaccctgtccaccctgtcccccagaagtggatcccatagagtcacataccttcgccaccagcaccttgactcagttctgcattctgtttaagagaaccttcctgtccatcttgagggatacggttttgacacacctacgattcatgtcccacgttgtaatcggagtgctcataggccttctgtacctgcacattggagatgatgcttctaaggtgtttaacaatactgggtgtctattcttcagcatgttgttcctgatgttcgctgcccttatgcccaccgtgcttacattccccctggagatggccgtgttcatgagagagcacctcaactactggtacagcctgaaagcatactatttggccaagaccatggctgacgttcctttccaagttgtatgccccgtggtgtactgtagtatcgtgtattggatgaccggccagcccgcagaaacatcaaggtttctgctgttttccgctctcgcaaccgccacagctctggttgcccagtctctggggttactgatcggagccgctagcaattcactgcaagtcgcaactttcgtaggtcccgtcaccgccattcccgtgttgctgttctcaggtttcttcgtctcttttaagaccattccgacctatctccaatggagttcatacttaagctatgtacggtatggcttcgaaggcgtcattctgaccatctacggaatggaacgcggagacttgacatgcctggaagagagatgtcctttccgagaaccccagtccatcctgcgggccctcgatgtggaagatgctaagctgtacatggacttcttggttctgggtatcttctttcttgcgctgaggctactggcttatcttgttctaagatacagagtgaagtccgagcggtag

SEQ ID NO: 180098 - DNA, 1956 bp, synthetic construct
  misc_feature 1..1956: note = Description of Artificial Sequence: Synthetic coding sequence
  source 1..1956: mol_type = other DNA
atgggcgacctgagcagcctgacccccggcggcagcatgggcctgcaagtaaatcgtggttcccagtctagtctggagggcgctcctgccacggcgcccgagcctcatagtcttggaattttgcacgctagctattctgtgtctcaccgcgtgcggccttggtgggatataacttcatgccgtcagcaatggacccgccaaatcctgaaagacgtatctctgtatgttgaatctgggcagatcatgtgcatcttggggagcagcggaagcggcaagacaacgctgttagatgccatgagtgggcggcttggccgcgccggaacattccttggggaagtttatgttaatgggcgcgcgctccgtcgtgagcaatttcaagattgctttagttacgtgctgcagagcgatacattgctgtcctcactgacggtgcgggagaccctgcattataccgcattactggctatccgcagaggaaatcctgggagctttcaaaagaaggtggaggcagtgatggcggaactcagtctgagtcacgtcgccgaccgcctgattggtaattattctcttggcggtatcagtaccggagaaaggcgccgagttagcattgctgcccagctcctgcaggatccgaaggtcatgttgtttgatgaacccacaactggattggactgtatgacagccaaccagatcgtggttctgctggtggaattagcccgcagaaataggatcgtcgtgttgaccatccatcaacctagatccgagctgtttcagctgtttgacaaaattgcgatactgtcattcggggagttgatcttttgtggcactccagcagagatgcttgactttttcaacgactgtggctacccgtgccccgagcacagcaacccgtttgatttctacatggatctcacctccgttgatacacaaagcaaagagagagagatcgaaacgagcaagcgtgtgcagatgatcgaaagcgcgtacaagaaaagcgctatctgtcataaaaccctgaaaaacattgagcgtatgaaacatcttaagaccctgcccatggtgccctttaaaactaaggactcaccgggtgtgtttagcaagctcggagtcctgttacggagagtgacgcgtaacctggtgaggaataaactggctgtcatcacaagactgctacaaaatcttatcatgggactgttcctgctcttttttgtgctccgcgtgcggagcaatgtgctaaaaggggctatacaggaccgggtgggcttactttatcagtttgtgggcgcaacaccgtataccggcatgctgaacgccgtaaatctgtttccagtgctgagagcagtgtctgaccaagaaagccaggacggactctatcagaaatggcagatgatgctcgcctacgcccttcacgtgttgcccttcagcgtggtggcaactatgattttctcttccgtgtgttattggacactggggttgcaccctgaagtcgcaagatttggatatttctccgctgctttactggctccgcatctgatcggcgaatttctgacactcgttctgttaggtattgttcagaaccctaatattgttaactccgtggtcgcactgctcagcattgccggggtgctcgtcgggtccggatttcttcgcaatatacaggaaatgcccattcccttcaagattatctcctacttcaccttccagaaatattgcagcgagatactcgtggtaaatgagttctatggcctgaatttcacttgtgggtcttccaatgtaagcgtcaccaccaaccccatgtgcgccttcacccagggcattcagttcatcgaaaaaacatgtccaggcgcaacatcccgtttcactatgaattttctcattttgtattccttcatccctgcgctggttatcttgggcatcgtggtattcaagattagggatcatttaatttctcggtag

SEQ ID NO: 180099 - DNA, 1443 bp, synthetic construct
  misc_feature 1..1443: note = Description of Artificial Sequence: Synthetic coding sequence
  source 1..1443: mol_type = other DNA
atgtgcatcctgggcagcagcggcagcggcaagaccaccctgctggacgccatgtcaggacggctcggaagagccggcaccttccttggggaggtgtacgtcaatggacgcgctctccgtagagagcagttccaggattgtttcagctacgtactacagtctgatactctgctgtctagtctcactgtcagggagaccctccattatacggctctgctagcaattaggcggggcaatccaggttctttccagaaaaaggtagaggcagtgatggcagagctctctctcagccacgtggcggatcggttgatcggaaactacagtcttggcggcatatctaccggtgagcgtcggcgcgtttccattgccgcccagcttctacaagatcctatggacttgaccagcgtggatacacagagcaaggagagggagatcgaaaccagcaagcgggtacagatgatcgaatctgcttacaaaaaaagcgcaatttgccacaagacactcaaaaacatcgaacgtatgaagcacctgaagaccctgcctatggtgccgtttaagactaaggatagcccgggggtgttttcaaagttaggggtgctccttagacgggttactcgaaacctggtccgcaacaagcttgcagtgattactcgtctgctccaaaatctcataatggggctgtttctactgttttttgtcctccgggtgcggagcaatgttttgaagggggcaattcaggatcgcgtggggctcctgtatcaattcgtaggagctaccccttacacaggaatgctgaatgccgtgaacctgtttcccgttcttcgcgccgtgagcgaccaagaatcccaagacggcctctatcagaagtggcaaatgatgctggcatacgccctgcacgtgctaccgtttagcgtggtggcaacaatgatcttttcaagcgtctgttactggacactcggtctgcacccagaggttgctaggttcgggtatttctcagctgccctcttggcaccacatctaatcggagaattcctgactctggtgctgctcgggatagtgcagaaccctaatatcgttaacagcgtggtggctctcctgagcattgctggtgttcttgtgggctccggatttctaagaaacattcaggaaatgcctataccattcaagattatttcctactttaccttccaaaagtattgctctgagatacttgtggtgaacgaattctatgggttgaactttacctgtggcagtagtaacgtatcggttaccaccaatcccatgtgcgcctttacgcagggaatccagtttatagaaaagacatgcccgggagctacctcgcgcttcacaatgaacttcctgattttatactccttcattccagcactggtcattttgggaattgtagtgttcaagatccgggaccacctgattagcagatag

SEQ ID NO: 180100 - DNA, 771 bp, synthetic construct
  misc_feature 1..771: note = Description of Artificial Sequence: Synthetic coding sequence
  source 1..771: mol_type = other DNA
atgggcctgttcctgctgttcttcgtgctgcgggtgcggagcaacgtcctcaaaggtgccatccaagaccgggtgggcctgctttatcaattcgtgggagcaacaccgtacacaggaatgctcaacgctgtgaacttgttcccggttctgagagcagtgtccgaccaggagtcccaagacggactgtaccagaagtggcaaatgatgttggcctacgcactgcacgtactgccgttcagcgtcgtcgccacgatgatttttagtagtgtctgctactggactctgggactgcatcccgaggtggcgaggttcgggtatttctcggccgctttgctcgccccccatctaattggggagttccttaccctggtactgcttggaattgtgcagaatccaaatatcgttaactccgtggtggcactgctgtccatcgccggcgtgctagtggggagtggcttcttgagaaacatccaagagatgcccatcccatttaaaattatcagttactttacatttcaaaaatactgttcagaaattctcgtggtgaacgaattttacggactgaattttacctgcggatcttcaaacgtaagcgttactaccaaccctatgtgcgccttcacgcaggggatccagttcatcgaaaagacttgtcctggagcaacatccagattcactatgaattttctgattctgtattctttcatccccgctctggtcatcttgggaattgtggttttcaagatccgggaccacctgataagcagatag

SEQ ID NO: 180101 - DNA, 2022 bp, synthetic construct
  misc_feature 1..2022: note = Description of Artificial Sequence: Synthetic coding sequence
  source 1..2022: mol_type = other DNA
atggccggcaaggccgccgaggagcggggcctgcccaagggcgccacaccgcaggacacatccggcctccaggacagactgttcagcagcgaatctgacaatagcttgtattttacctattccggccagccaaataccctggaagtccgggacctgaactaccaggttgatctagcatctcaggtcccttggtttgagcagctcgcacagtttaagatgccctggacttccccctcctgccagaactcttgcgagctgggcatacaaaatcttagctttaaagtccggagcgggcaaatgctcgccatcatcggcagttccgggtgtggcagagcaagtctgctcgacgtgattacaggccgtggccatgggggaaagattaagagcggtcagatctggatcaacgggcaaccgagctcccctcagttagtcagaaagtgcgttgcccatgtacgacagcacaatcaactactgcccaatctgacagtccgcgaaaccttggctttcattgctcagatgagactaccgcgcacctttagccaggcgcagagagacaagagagtggaggacgtgatcgctgaactacggctgagacagtgcgcagataccagggtcggcaatatgtatgtgcgcggtctctcaggcggagagcgccggcgtgttagtattggagtgcaactgttatggaaccctggcattctcatactggatgaaccaacttctggactagacagctttacagcccataatctggtaaagacactgtctcggctcgccaaaggcaaccgcttagttcttatcagcctacatcaaccaagatcagacattttcaggttgtttgatctggttctgctcatgacttccggcacacccatttacctgggggccgcccaacatatggtccaatactttaccgcgattggatacccttgtccccgttactctaatcccgccgacttctacgtcgacctgacatcgatcgaccgcagaagccgtgagcaggagctagctacacgcgagaaggcccagtcactagctgctcttttcctggaaaaggtcagagatttagacgatttcttgtggaaggctgaaacaaaggatctggacgaagatacgtgcgtcgagagttccgtgacacctcttgacaccaactgtctgcctagccctaccaagatgcccggtgccgtgcagcagttcactaccctcatccgccgccagatttcaaacgacttcagggacctgccaaccttgctaatccatggagcggaggcctgcctgatgtctatgacgattggttttctgtatttcggacatgggagtatacaactgagcttcatggacacagcggccctgctctttatgataggggcgttaattccgttcaatgttattctggacgtcataagcaaatgctacagcgagagggcaatgctctactacgaattagaggatggcctgtacaccaccggcccttattttttcgcgaagattctgggagagctgcccgaacattgcgcctatatcatcatctatggtatgcccacttactggcttgcaaacttgcgcccaggactgcagcccttcttactccattttctactggtctggctggtggtgttttgctgccggattatggccttggccgccgctgcgctgcttcctacttttcacatggcttccttcttttcaaatgctctctacaatagtttttacctcgctggcggtttcatgatcaacctgagcagtctctggacagttccggcttggatatctaaagtctcctttttgcgatggtgctttgaggggctcatgaaaatacagttttctcggaggacttacaaaatgccgctgggcaaccttactatcgcggtatctggggataagatcctgagcgttatggagttagacagctatcctctgtacgccatatatctcatagtcattgggctgagcggagggttcatggtgctatactacgtcagtctacgtttcattaagcagaaacctagccaggattggtag

SEQ ID NO: 180102 - DNA, 2376 bp, synthetic construct
  misc_feature 1..2376: note = Description of Artificial Sequence: Synthetic coding sequence
  source 1..2376: mol_type = other DNA
atggccggcaccagcgcccccggcagcaagcggcggagcgagccccccgcgccacgcccaggccctccccctggaacaggccatccccctagcaaacgggcacgcggtttttcggcggctgccgccccggatcccgacgacccattcggcgctcatggagattttacagcagacgatctggaagagctggacacgcttgcctcccaggctctgtcccagtgcccggctgccgcccgggacgtgagttctgatcataaggtccatcgactgctggatggtatgagcaaaaatcctagcggaaaaaatcgggagactgtgccaattaaagacaattttgagttggaggttctccaggcacagtataaagaattaaaggagaaaatgaaagttatggaagaggaggttctcatcaaaaatggcgagatcaagatactaagggatagtctccatcagacagagtcagtgctggaagagcagagaaggagccactttctactcgaacaggaaaaaacccaggccttgagcgacaaagagaaagaattctctaagaaattgcagtctctgcagtccgagttgcagttcaaagacgctgagatgaacgaactccgcaccaagctgcagacaagtgagcgggctaacaagctggcagctccctccgtcagtcacgtcagcccccgtaagaatccgtccgtggtgatcaagcccgaggcctgttccccccagttcggcaagacatcctttcccaccaaagagtccttttccgccaacatgtctctgccccatccctgtcagacagagagtggctataagcctctggttggtcgggaagattccaagcctcactcgctcaggggagattcaataaaacaggaagaggcacaaaagtcctttgtggactcatggcgccaacgctccaacacacagggctccatcctcatcaacctgcttctgaaacagccgttgatccctggttccagcctgagcctctgtcatctcctgtcgtcatcgtctgaatcccccgcaggcacacctctacagccaccaggctttggatctaccttggccgggatgagtggactgcggacgacgggatcatacgacggcagcttcagtcttagtgctctacgcgaggctcagaatctggcattcacagggttgaatttggttgccaggaatgaatgcagtcgcgacggcgaccctgctgaaggcggccgccgagcttttccattgtgtcagctccccggggctgtgcactttctcccactggtccagttcttcatcggcctccactgtcaggctttacaagacctggctgccgctaaacgcagcggcgctcccggagacagtcccactcatagctcttgcgtgtcatcaggtgtcgaaactaatcccgaagactctgtgtgtatattggagggattcagtgtgacagctctgtcaatcctccaacacctcgtatgtcactctggcgctgtggtcagcctgctgctgagcggggtgggcgctgattcggcagccggagagggaaacaggtcacttgtacaccgactctcggacggggacatgacgagtgccctccggggtgtagccgacgatcaggggcagcacccactgctcaaaatgcttctccaccttctggcgttctcatccgctgcgactgggcacttgcaggcttcagtgctcacgcaatgtttaaaggtactggtcaagttggccgaaaacacatcctgcgattttctgcctaggttccagtgcgtatttcaagtgttgccaaagtgtctgtcaccagagacaccactcccctcagttcttttagccgtagagctcttgagtttgctggcagaccatgatcagctcgctcctcagctttgttctcacagtgaggggtgcctccttctattactgtatatgtacatcacaagcagacccgacagggtggctctagaaacccagtggcttcagttggagcaggaagtggtctggctcctggcaaagctgggggtgcagtccccattgccccccgtgactggctcaaattgccaatgcaacgtcgaagtggtccgagctctgaccgtaatgctgcaccgacagtggttgaccgtgcggagagcaggaggaccccctcgtacggaccagcaacgtcggactgtccggtgtctccgggacactgtcttactcctccatggattgtctcagaaagacaaactgttcatgatgcattgcgtggaggtgctacatcaattcgaccaggtgatgcctggggtgtccatgctgatcaggggcctgccagacgtcactgattgtgaagaagctgcactggatgatctctgtgcggccgagacagacgttgaggaccccgaggtagaatgcggttag

SEQ ID NO: 180103 - DNA, 2295 bp, synthetic construct
  misc_feature 1..2295: note = Description of Artificial Sequence: Synthetic coding sequence
  source 1..2295: mol_type = other DNA
atggccggcaccagcgcccccggcagcaagcggcggagcgagccccccgcacctaggcctggtccacctcccggaaccgggcatcctccttccaaaagggcaagaggcttctctgcagctgccgccccagatcctgatgacccatttggagcccacggagatttcactgcagatgacctggaggagctcgatactctggcttctcaggcactcagccaatgcccggcagctgctcgagacgtcagttcagaccataaggttcacagactgctggatggcatgagcaaaaacccgtctggcaagaatagggaaaccgtgccaatcaaggataatttcgagttggaggtactgcaggcccagtacaaggagctaaaggagaagatgaaggtgatggaagaagaagtgctgattaagaatggggaaatcaagatactacgcgattccctgcaccaaacggaaagcgtgctggaggaacagcgacgatctcacttcttactcgaacaggaaaagacgcaggcgctgagtgataaggagaaggagttttctaaaaagttacagagtcttcaatcagagctacagtttaaggacgctgaaatgaacgaactgaggactaagcttcaaacatcagaacgtgccaataagctagccgcacccagtgttagccatgtgtccccaaggaagaacccgtcagtggtaataaagcccgaggcctgtagtccacagtttggaaaaacttccttcccgacaaaagagagtttctccgccaatatgagcctcccgcacccatgtcaaaccgaaagtggctacaaaccactggtcggacgtgaagatagtaagccccactcactgcggggcgacagtatcaagcaggaggaagcacagaaaagttttgtggattcatggcggcagaggagtaatactcagggaagcatattgattaatctcttgctcaagcaacctttgatccctggcagcagtctgtctctgtgccacctgctgtcaagttcgtcagaatcccctgctggaacccctctgcagcctcccggctttggcagcaccctggcgggtatgtcaggcttacgcaccacaggcagttatgacggttcattttctttatctgctctcagggaagcacaaaacctggcattcaccggcctgaacttagtggcaaggaatgagtgttcaagggacggtgatcccgcagaaggcggcagaagggcatttccattgtgccagctccccggagctgtgcattttcttcctctggtccagttttttatcggtcttcactgccaggcactgcaagatttggccgctgcaaagcgatcaggtgcccccggagactcacctacgcatagctcttgtgtgtccagcggggtcgaaacgaatcccgaggatagcgtttgtatcctcgagggtttttcagttacagccctttcaattctacagcacctggtttgccacagtggcgccgtggtttccctactgctatcaggagtgggcgccgatagcgccgctggcgaggggaaccggagcttggtacatagactgtctgacggggatatgacttccgcactgaggggggttgcagacgaccaaggacagcatcctttactaaaaatgctgctgcatttgctggcattcagttcagcagccaccggccaccttcaggcttcggtcctcacacagtgcctgaaagttcttgttaaattagcagagaatacctcatgcgattttctgccaagattccagtgcgtgtttcaggtgctgcccaaatgcttaagcccagaaactcctttaccctcagtgttactggcggtggaactgttgagcctgctggcggatcacgaccagttggcaccgcagctgtgttcacactccgaagggtgcctattgctcctcttgtatatgtacatcacaagccgcccagaccgggttgccctagagacacagtggttgcagcttgaacaggaagtcgtgagagcccttactgtgatgctgcatagacagtggctaaccgtccggagagccggtggaccacctaggacagatcagcagagacggactgtaaggtgtctgagagacacagtgttattgctacacggcttgagtcaaaaagataaactgttcatgatgcattgtgttgaggttcttcatcagttcgatcaggtaatgcccggcgtgagtatgctaattcgtggcctgcctgatgtaaccgactgcgaagaggccgccctggacgacctgtgtgctgcagaaactgacgttgaagatccagaagttgaatgcgggtag

SEQ ID NO: 180104 - DNA, 1995 bp, synthetic construct
  misc_feature 1..1995: note = Description of Artificial Sequence: Synthetic coding sequence
  source 1..1995: mol_type = other DNA
atgaaggtgatggaggaggaggtgctgatcaagaacggcgagatcaaaattctgcgagatagtctccaccaaacagagtctgttctggaagagcaacgacgaagccacttcctgctggagcaggaaaagacccaggcactctccgataaggagaaggaattcagcaagaagctgcagtctctgcagtccgaactccagttcaaggacgctgagatgaatgagctccgaacaaagctgcagaccagcgagagagcaaacaagctggcggccccttctgttagccatgtatcccctaggaaaaacccctccgttgtcatcaagcccgaagcatgctccccacagttcgggaagacatcgttccctaccaaggagagtttcagtgctaacatgagcttgccccacccttgtcagaccgaaagcggatataaacccctcgttggtagggaagatagtaagccccactcactacgcggcgatagtataaagcaagaggaagctcagaagagctttgtggactcatggagacagcggtctaatactcaaggttctatcttgatcaatctacttctgaagcagcccttgatccctgggagttcactcagcctgtgccacttgttatcgtctagtagcgagagtcccgcagggacccctttgcagccccctggcttcggatcgacgttggctggcatgtcagggctgcggaccacaggatcatatgatggctctttttcattgagcgccctccgcgaagcccagaatttggcattcaccgggctcaacctcgtcgccagaaacgaatgctcccgagacggcgaccccgccgagggggggcgcagggctttccccctgtgtcagttaccaggggcagtacactttctccctctggtccaatttttcatcggcctccattgccaggccctgcaggatttggccgctgcaaagagatctggtgccccaggagactctccgacgcattccagctgcgtgtcatccggggtggagacaaatcccgaagacagcgtatgcatacttgaaggtttctcagtgaccgccctgagcatcttgcaacatttggtgtgccactccggggcagttgtgtccctcctgcttagcggagtcggtgctgactctgccgccggagaagggaatcggagtctggtccataggctgtctgatggtgatatgacttcggccctgcgaggcgtagcagatgaccaaggacagcaccccctccttaagatgctgcttcacctcctggctttttcctccgccgcgacgggtcacttgcaggctagtgtgctgactcaatgtctaaaggttctggtcaagttggcagagaacacttcatgcgactttctgcctcggttccaatgtgtctttcaagtgttacccaagtgtctgagtccggaaacgccattgccatctgttctgctggccgttgagttgctatcacttctggctgaccatgaccagctcgccccgcagctttgctctcactcagaaggttgtctgcttctgctgttatatatgtatatcaccagcagaccggaccgggtagctctcgaaacccagtggctgcagctcgagcaggaggtggtgtggttgttggctaaacttggcgtccagtctccactaccccctgtgactggaagcaactgccaatgcaatgtggaagtggtgcgcgcgttgactgtgatgctccaccgccagtggttaaccgtgcggagagccgggggcccaccaaggacagaccagcaacggagaacagttcggtgtcttcgggacactgtgctgctcttacatggactgagccagaaggacaaactctttatgatgcactgcgtggaggtgctgcatcaattcgaccaagtaatgccaggagtgtctatgctaatccgggggcttcctgatgtaactgattgcgaggaggcggcgctcgacgatctctgcgccgccgagaccgatgttgaggaccccgaagtggagtgtggatag

SEQ ID NO: 180105 - DNA, 2097 bp, synthetic construct
  misc_feature 1..2097: note = Description of Artificial Sequence: Synthetic coding sequence
  source 1..2097: mol_type = other DNA
atgagcaagaaccccagcggcaagaaccgggagaccgtgcccatcaaagacaactttgagctggaggttcttcaggcgcagtacaaggaacttaaagaaaaaatgaaagtaatggaggaggaggtgctaattaagaatggagagattaaaatactgagagatagcttgcatcagacagagagcgtgctggaggagcaacgccgtagccactttctgctggaacaggaaaagacgcaggctctttccgacaaggaaaaggagttttctaaaaagctgcagtcactgcagtctgagctgcagttcaaggacgccgaaatgaacgaactgcgcacaaagcttcagaccagcgaaagggccaataagttggcggcgccttctgtttctcacgttagtcctcgcaaaaacccttcggtagtcatcaaaccagaagcatgtagcccacagtttggcaaaacctcattccccaccaaggagagcttctcagcaaatatgagcctgccgcatccgtgccaaaccgagagcgggtacaagcccctggtgggcagggaggactcaaagccccactcactacgcggggatagcataaaacaggaggaagctcaaaaatcttttgttgattcttggcgacaacggtcaaacacacagggctcaattctgatcaatctgctcctgaaacagcccttaattccaggtagcagtctctccctgtgccatcttctgtcctcatcatccgagtctcccgctggaacgccactacaacctccaggcttcggctcaaccttagcaggaatgtcgggactgcgaacgactggctcgtacgatggcagctttagcctaagtgcattacgcgaagcacaaaacctggcatttacgggattgaacctagtcgcccgaaatgaatgttcgagggacggagatcccgcggagggcggccgtcgggctttccctctttgtcagctccctggggccgttcacttcctgcccctggtgcaattcttcatcggcctgcactgtcaggcactgcaggatcttgcagcagcgaaacgcagcggggccccaggcgacagcccaacccactccagctgcgtgtcctccggcgtggaaaccaatcccgaggacagcgtctgtatcctcgagggatttagtgttacagccctatctattctgcaacaccttgtgtgccatagcggcgccgtggtaagtcttctgctctccggtgtgggcgcagatagcgccgccggggaggggaatcggagtcttgtccacaggctgtcggatggagacatgactagcgccctgaggggcgttgccgacgaccagggccaacaccctctcctcaaaatgctgttacatttgctggctttctcttcagctgcaaccgggcatctgcaagcctccgttctgactcagtgccttaaagttctggtgaagctggccgagaatactagttgcgactttttgccacgctttcagtgtgtgttccaagtgctccctaaatgtttgtctcccgagacgcctttgccgagcgttttactagctgtggagctgttatctttactggcagatcacgaccagcttgcgccacagctgtgtagccactccgaggggtgtctcctgctcctgctctacatgtacatcacatcaaggccagatagggtagccttggagacgcaatggctacagctggaacaggaggtcgtttggctgcttgcgaaacttggggtccagtctcctctgccacctgtgactggtagcaactgccagtgcaatgtagaggtggtacgggccttgactgtaatgctgcatcggcaatggctaacagtgcggagagctggcgggccaccaagaacagatcagcaacgaaggacagtccgctgtctcagggacactgtcctgctgctccatggcctctctcagaaggataagctttttatgatgcattgtgtcgaagtcctccaccaattcgaccaggtgatgcccggggtctctatgctcatccgtgggctgcccgacgtgacagactgtgaggaggccgcgcttgatgatctgtgcgcggccgagactgacgtggaagatcctgaagtggagtgcggctag

SEQ ID NO: 180106 - DNA, 591 bp, synthetic construct
  misc_feature 1..591: note = Description of Artificial Sequence: Synthetic coding sequence
  source 1..591: mol_type = other DNA
atgagcaagaaccccagcggcaagaaccgggagaccgtgcccatcaaggacaatttcgagctagaggtgttgcaggcccagtacaaggaacttaaagaaaagatgaaagtgatggaagaggaagtgctcattaaaaatggggagataaagatattgcgggacagtcttcatcagaccgaatccgtccttgaggagcagagaaggtcacactttctcctcgagcaagagaaaacccaggctctcagcgacaaagagaaggagtttagcaagaagctccagagcctgcaatctgagctacagtttaaggacgctgagatgaatgaactgaggacaaaactccagactagtgagagggccaataagctggccgctcccagcgtctctcacgtgtctccccgaaaaaaccccagtgtggttatcaaacctgaagcctgcagcccacaattcgggaaaacatcattccctactaaggaatcctttagcgcgaatatgtcgttgccacacccctgtcagacggaatccggatataagcccctcgtcggacgggaggactccaagcctcacagtctgcgcggcgattccatcaagtag

SEQ ID NO: 180107 - DNA, 141 bp, synthetic construct
  misc_feature 1..141: note = Description of Artificial Sequence: Synthetic coding sequence
  source 1..141: mol_type = other DNA
atgagcaagaaccccagcggcaagaaccgggagaccgtgcccatcaaggacaattttgaactggaggtgcttcaggcgcaatacaaggagctgaaggagaaactctgcaagaaggctgatacgagctatcatcacctgtag

SEQ ID NO: 180108 - DNA, 1305 bp, synthetic construct
  misc_feature 1..1305: note = Description of Artificial Sequence: Synthetic coding sequence
  source 1..1305: mol_type = other DNA
atgagcatcgagaagatctgggcccgggagatcctggacagccggggtaaccctacagtcgaggttgacctgtataccgcaaaaggactattcagagcggccgtgccctctggagcatccactggcatctacgaagctttggaattgagggatggagataaacagagatatctcggcaagggagtgcttaaagcggtggatcatattaactccacgattgcacccgcactgatttcgagtggactatccgtcgtggaacaggaaaaactggacaatctgatgttggagctggacgggacggaaaataaatccaagtttggggccaacgctatcctgggggttagcctagccgtatgtaaggctggtgccgcggaacgtgagcttcctctgtaccggcatatagctcagcttgctggaaactctgacctcatcctcccggtgcctgcattcaatgtgatcaatggtggctcccacgccgggaacaagctagcgatgcaagaattcatgatcctgccagttggggctgagagttttcgcgacgctatgaggctgggagccgaggtctaccacacattgaaaggagttatcaaggataagtatgggaaagacgccacgaacgttggggacgaaggcgggtttgccccaaatatactggaaaattccgaagccctcgaacttgtcaaggaggccattgacaaggccggctacactgagaagatcgtaatagggatggatgtagctgcatccgagttctacagggacggtaagtacgacttagattttaaatcaccaaccgatccatcacggtacattaccggggaccagttgggtgcgctgtaccaggattttgtgcgtgattatcctgtggttagcattgaggatccctttgaccaggacgactgggccgcttggtcaaaatttactgcgaatgttggtattcagattgttggcgacgacctgacggtgaccaacccaaagcgtatcgagcgcgcggtagaggagaaggcttgtaactgcctccttcttaaggtgaaccagataggttctgtcactgaggccattcaggcctgtaagctagctcaggagaacggatggggcgtgatggtctcacacaggtcaggggagaccgaagatactttcatcgccgaccttgtcgtcggtctttgtacaggccaaatcaagacaggtgcaccatgccgcagtgaaaggctggctaagtacaaccagctgatgcgtatcgaagaggaactcggtgacgaggcccggtttgctggacataacttcagaaatccttccgttctctag

SEQ ID NO: 180109 - DNA, 3573 bp, synthetic construct
  misc_feature 1..3573: note = Description of Artificial Sequence: Synthetic coding sequence
  source 1..3573: mol_type = other DNA
atgaagacccggcagaacaaggacagcatgagcatgcggagcggcaggaaaaaagaagcgcctggaccccgcgaggagttacggtctcgggggcgggcaagccctggcggcgtgagcacaagtagctcagatggtaaagcggaaaagtcacgccaaactgccaagaaggcccgagtcgaagaggcctctaccccgaaagtaaacaaacagggacgtagcgaggagatttccgagagtgaaagtgaggagaccaacgcgccaaagaagacgaaaactgagcaggagctccccagacctcaaagcccatcggaccttgactcgctcgacggtcgctctctgaacgatgacggctcaagcgatcccagggacattgaccaggacaacaggagcacatcaccgtctatatactcgcctggatcagtggagaacgattcagactcatcttccggtctatcccagggacctgcgcgaccatatcatccaccccccctctttccaccctcccctcaaccccctgacagcactcctcgacagccagaagcctccttcgaaccccacccaagtgttacccctaccgggtatcatgcccctatggagccgccaacttctaggatgtttcaggctccacctggagcccctccaccgcatccgcagctctatcccggtggcaccggcggagttctttctggccctccaatggggcctaagggtgggggcgcggcatcttccgttggcggcccaaacgggggaaagcagcatcctcctcccaccacccccatcagcgtgtctagctcaggggctagcggagctccacccaccaaacctcccaccaccccagtaggcggaggtaatctgccaagcgcacctcctccagccaactttccccatgtcacacctaatctgcctccccctcccgccctgcggcccttgaacaacgcatccgccagccctccaggactaggtgcccagccattacccggccacctaccatccccccatgctatggggcagggcatgggagggctcccccctggacctgagaaaggcccgacattggccccaagcccacattcgctcccacctgcatccagcagcgcccctgcgcccccaatgagatttccctacagttcttcctcaagttcctcagctgccgcgtcctcaagcagcagctcgtcttcttcgtctgcttcacccttccctgccagtcaggccctacccagctatccgcattcctttccaccccctacatcactgtctgtgagcaaccagccacctaaatacacacagccttctttgccatcacaggccgtatggagtcagggcccccctcccccccctccttacgggagactactcgccaatagcaacgcacacccaggcccattccctccctctactggcgcacagtctaccgcccacccaccagtctccacccaccatcatcaccatcaacagcagcagcagcagcaacagcaacagcaacagcaacagcaacagcagcagcagcatcacggaaatagcggcccacccccaccgggcgcattccctcaccccctcgagggagggagctcccatcacgcccatccatacgctatgagcccaagtctgggttccctgagaccgtatccacccggtcccgctcatctgcctccaccccacagccaggtcagctacagtcaagccggacctaatggacctcccgtttccagctcatcaaacagcagctcatcaacatctcaaggttcatacccctgctcccatccatctcccagccagggccctcagggggccccctacccctttccccctgtgcctacagtgactacatcatcagctacactgtccaccgtgatagcaactgtagcctctagcccagccggatataagactgcaagccctccaggtccccccccatacggaaagcgcgcgccaagccctggcgcctacaagacagcaacgccaccggggtataagcctggaagcccaccgtcctttaggaccgggacgccccccgggtacagaggaacgagccctccagcggggcctgggacgttcaagccaggctcccccactgttggacctggaccgctacctccagctggaccctcgggcctgcctagcctccctcctccccccgctgcaccagcttccggaccgccactctcagccacccagataaagcaggagcccgctgaagagtacgagacccccgaaagccctgtaccgcctgcaaggagcccatctccccctccaaaagttgttgatgtcccaagtcacgccagtcaatcagcccggtttaataaacacctggaccgcggcttcaactcatgtgcccggagcgatttgtacttcgtcccattagagggctctaagctagctaagaagagagccgacctcgtcgaaaaggtgcgccgcgaagcagagcagcgtgcgcgggaggaaaaggagcgcgaaagagagcgggagagggagaaggagcgagagcgcgaaaaggagcgtgagttggaacgctccgtcaaactcgcgcaggaggggcgagccccagtcgaatgtccgtctcttggccccgtgccacaccgacccccctttgaacctggaagcgcagtggctaccgtgcctccttacttaggccccgacacacccgccctaaggactctgagtgagtatgctcgcccacacgtgatgtctcctggcaataggaatcaccccttctacgtacccctaggagcagtagatcccggcctcctcggatacaatgttcccgcactgtattcatccgaccctgcggccagagaaagagaacgggaggcccgagagagagatctgcgcgacagactcaaacctggtttcgaagtgaaaccctcggagctagagccccttcacggagtgccaggacccggcctcgacccttttccccggcacggaggtctggcgctgcaacccggcccccctggtctgcacccatttccgttccatccgtctctagggcccctggaaagggagcgattggctctggccgctgggcctgctttaaggccggatatgtcttacgcagaaaggctggctgccgagaggcagcacgcagaaagagtggccgcactgggcaatgatccgttagctcgcttacagatgctgaacgttacaccccatcaccatcagcactcacacattcattcccatctgcacctgcaccagcaggacgcaatacacgcagcctccgctagtgtgcacccattaatcgaccccctcgcatctgggagtcacttgacccgcatcccctaccctgccggaacactgccgaacccccttctacctcatcccctgcatgaaaatgaggtgttacgccaccagttattcgccgctccgtatcgggatcttcctgcgtccctcagcgctccaatgtccgcggcgcaccagctgcaggccatgcatgcccagtctgcagaactgcagagactggctctcgagcaacaacagtggctgcacgcccaccatcctttacattccgttccactacctgcccaggaggattattactcccatctgaagaaagaatccgataagcctttgtag

SEQ ID NO: 180110 - DNA, 3573 bp, synthetic construct
  misc_feature 1..3573: note = Description of Artificial Sequence: Synthetic coding sequence
  source 1..3573: mol_type = other DNA
atgaagacccggcagaacaaggacagcatgagcatgcggagcggcaggaaaaaggaggctcctggtccccgggaggagttgcggagtcggggccgcgcctcaccagggggcgtgagcacttcttcctccgacggtaaagcagagaaaagcagacagacggcgaaaaaggcacgcgtagaggaggcgtccacacccaaagtgaacaaacagggtaggtcagaagagattagtgagtcagagagcgaggaaacaaacgcccctaaaaaaacgaagaccgagcaggagctgcctcggccacaaagcccctccgacctggactcgctggatggtcggtcccttaatgatgatgggagttcagatccccgggacatagaccaggacaacaggtctaccagtccaagtatctacagtccagggtcagtggagaatgatagcgacagtagctcaggactctctcagggtcctgcccgcccttaccaccccccgcccttgttcccccccagccctcagccaccggattcaaccccacgccagccagaggcctcattcgagcctcatccctccgtgacgcccaccggctatcacgcccctatggagccacccacgagtagaatgttccaggcaccgccaggggccccaccgccgcacccacagctgtaccctggcgggacaggcggggtcctgagtgggccacctatgggccctaagggcggaggagctgcaagttcagtgggaggccccaacggcggtaaacaacatccccctcccacgactccaatctcggtttcaagctctggggctagtggcgccccacccacaaagccacccactaccccagttggaggaggtaacctcccgtcggctccgcctccggccaatttccctcacgtcaccccaaacttgcctccccccccagctctgcggccccttaataatgcctcggcttctcctcctggtctcggagctcaacctctgcccggtcacctgccatccccgcatgctatgggccaaggaatgggtgggctgccccctggtcccgaaaaggggcctacactggctccaagcccacattctctaccaccagcttcatcgtctgcccccgctccccccatgaggttcccctactcctcaagcagcagctcgtctgccgccgctagttctagttcttcaagctcctcttcttccgcctcaccatttcccgcgagccaggccctgccaagttacccccattcatttccacctccaacaagcttgtccgtttcaaatcagccccccaaatacacccaaccttcactgccaagtcaggctgtgtggtcacaggggccgcccccccctcctccatatggaagacttctcgccaacagcaatgcccatcctggaccctttcctccgagcacaggagcacagagtactgcccatcctcccgtcagtactcaccaccatcaccatcagcaacaacagcagcagcaacagcagcaacagcagcagcagcaacaacaacaacaacaccatggaaattcaggtccacccccgcccggggcatttccacaccccctcgaaggcggatccagccatcacgcccatccgtatgcaatgtcgccatctcttgggtcattgcgtccttaccccccagggcctgcccacctacctcctcctcattcccaggtgagctattcacaagcagggccaaacggcccaccagtgtcatcctcgagtaattcttctagtagcacttcccagggctcctacccttgtagccacccaagtccaagtcagggaccccaaggtgctccttacccattcccacctgttccaactgtgactacttctagtgccaccctgagcaccgtcatagccaccgtcgcttcttcacctgccggatacaaaaccgcttctccacccggacccccgccctatggaaaacgggcccctagccccggggcctataagaccgcaacacctcccgggtataaaccggggtcaccaccttccttcagaactggcacaccaccaggttacagggggacatcacctcccgccgggcccggaacttttaagccaggaagccctactgtaggcccagggcccctaccacctgctggaccatccgggcttccttcactccctccaccgcctgctgctccggcctcaggaccaccgctaagtgccacccagattaaacaggagccggcggaagaatacgaaactcccgaaagccctgtgcccccagcccgttcccctagcccgccaccgaaggttgtggacgtgccctcccacgcttcccagagtgcccgttttaataagcatctggacagaggcttcaattcatgtgcccgatccgacctctactttgtgcctctcgagggttctaaactggccaagaaacgggccgacctggtcgagaaggtgagaagggaagctgagcagagagcacgggaggagaaggagagggagagggaacgcgagagggagaaggagagagaacgcgaaaaggagagggagctcgagcgcagcgtgaaattggctcaggagggtagggctccagtcgaatgtcccagcctcggtccagtgccccacaggcctccttttgagcctgggtcagcagttgcaactgtacccccttatctgggtccggacaccccagcgttgagaaccttatcagagtatgcccggccacacgtcatgagcccaggcaatagaaatcaccccttttatgtcccacttggtgctgtcgatcctggccttctcggttataacgtgccagcactttattcgtctgatcctgccgcccgcgaacgggagcgcgaagcccgggagagagacctgagggatcggctgaagcctggattcgaggttaaacctagcgagctggagcccttgcatggcgtacccggacctgggttggacccttttccgcgtcatggggggctcgcccttcagccgggtccccccgggttgcaccctttcccctttcacccttcattgggtcccttggagcgcgagagattagccctggctgccggcccagccctgcgacccgacatgtcttatgcagaacgtctcgccgcagaaaggcagcatgccgagcgggtcgccgctctcggcaatgacccattagctcggctccagatgctaaacgtaacacctcaccaccaccagcactctcacattcactcccacttgcacctacaccagcaggatgccattcatgcggcctctgcctcagtgcacccactaatcgaccccctcgcctctggttcccacctgacgaggattccatatccagctgggacgctccctaacccactgttgcctcaccccctccacgaaaatgaagttttgaggcaccaattgtttgccgccccttacagagacctccctgcttctctgagcgcgcccatgtcggccgctcaccagctgcaagccatgcacgcacagagtgccgaactgcaacgattagctttagagcagcagcagtggttacatgcccaccaccccctccatagcgtgcccctgcctgcacaggaagattactactcccatttgaagaaagaaagcgacaaacctttatag

SEQ ID NO: 180111 - DNA, 3573 bp, synthetic construct
  misc_feature 1..3573: note = Description of Artificial Sequence: Synthetic coding sequence
  source 1..3573: mol_type = other DNA
atgaagacccggcagaacaaggacagcatgagcatgcggagcggccgcaagaaggaggcgcctggacctagagaggaactgagatctcgaggaagggccagtcctggcggagtgagtacttcaagtagtgacggtaaagccgaaaaatcgcggcaaaccgccaaaaaagccagggtcgaagaagcttccacccctaaggtgaacaagcagggccggagcgaggaaattagcgagtcagaatcagaggagactaacgctcccaaaaagactaaaacagaacaggagctcccaagaccgcagagcccctccgatctggactccctggacgggagatcacttaacgacgacggctcctccgaccccagagacattgaccaggacaaccggagcacttccccatcgatctattctcccggtagcgtggaaaatgactctgattctagctccggactcagccaaggaccagcacggccgtaccatccacctcctctgtttccacctagtccacagccccccgattcaactccgaggcagcccgaggcttcattcgaaccgcatccctccgtgacacctactggttaccatgccccaatggagcctccaacttcacgaatgttccaggcaccgccaggcgcaccaccaccccatccacaattgtacccgggcggcacaggaggagtgctgtccggccctcctatggggccaaaaggaggcggcgccgcctcctctgtaggagggcctaatggcgggaagcagcacccaccgccaactacccccatttctgtgagcagcagtggagcatctggtgccccaccgaccaagccccccaccactccagtcggaggcgggaacctcccaagcgccccgccgcccgccaatttcccccacgtcaccccgaacctccctccccctccagcacttagacccctgaacaatgccagtgcgtccccacccggactgggagctcagcctctgcccgggcaccttccaagcccacatgctatgggtcagggtatgggagggcttccccccggcccagagaagggccctacacttgcccccagtccacattcattgcccccagcctcatcgtctgctccggcccctcctatgcgctttccatactctagttcttctagtagtagtgccgccgcaagctccagcagctcttcatcctcatcctccgcatccccattcccagcatcacaagcactccctagttatccccattccttcccgccccccacatcactgagtgtaagtaatcaaccccccaaatacactcagccctcgcttcccagccaagctgtctggagtcagggcccgccgcctcctccaccatacggacgtctgctcgctaactctaacgcgcatccaggcccctttccaccaagtacgggcgcccaatctaccgcacatcctccggtctccacacaccatcaccaccaccagcagcagcaacaacagcagcagcaacaacagcaacaacagcagcaacagcaacagcaccacggaaattcaggaccccctcccccaggcgcttttccacacccactcgagggcggcagctcccaccacgctcatccatacgccatgtcgccatcactggggagcctgcgcccctaccctccaggccctgcgcatctaccgcccccccactcacaggtgtcttacagccaggctgggccaaacggccctcccgtcagcagctctagcaattcttcgagttcgacgtcccagggatcgtatccttgcagccatccgtccccctcgcagggtcctcaaggggctccttatccctttcctcctgtgcccaccgtgactacgtcctcagcgactttgtctaccgtaatagcaactgtggccagcagtccagcaggttacaagactgcctcccctccaggtcctccaccttacgggaagcgcgcaccgtctcctggggcttataagacagcgacgccacctggctacaagccaggaagcccaccctcatttcggaccgggacaccccctgggtacagaggcacgtctccgcctgccggccccggcacctttaaaccgggaagtcctaccgtcgggcccggacccctgccacccgcaggaccatcaggactgcctagcctgccgcccccaccagctgctcctgcaagcggcccgcctctgtcagcgacacaaatcaaacaggaaccagccgaagagtacgaaacgccagagtcacccgtgcccccagccaggtcaccatccccccctcctaaggtggttgacgtaccatcccatgcctctcaaagcgcgaggttcaataagcatcttgaccgcggattcaattcctgcgctcgcagcgacttgtattttgtccctcttgagggaagcaagttagctaagaagcgggccgatctggttgagaaagttaggcgggaagccgaacagagggcgcgggaggagaaagagcgggaacgcgaaagagagcgcgagaaggaacgtgagagagagaaagaaagagagcttgaaaggagcgtgaagctggcccaagaaggtcgagcacctgtcgaatgcccaagcctgggccctgtgccccataggccaccctttgagcccggtagtgccgtggcgacagtgccaccttacctgggtcccgacactccagccttaagaacgttgtctgaatacgcaaggccccatgtgatgtcaccaggtaatagaaaccatccattttatgtacctcttggagccgtagatcctggacttctgggctacaatgtaccagccctgtattcatctgaccctgccgccagagaacgagaacgcgaggcaagggaaagagacctgcgcgatcggcttaaacccgggttcgaagtgaagccaagcgagttagaacctcttcacggggtacctggaccagggctggacccgtttccacggcatggaggactggcactacagcccggtcccccagggctgcaccccttcccgtttcacccatcactgggtcctctggagagagagagactggcccttgctgctggccccgctctgcggcccgacatgagctacgctgaacggctcgcagccgaaagacagcacgcggagagagtggccgccttaggcaatgaccctctagctcggctgcaaatgttaaacgtgactcctcaccatcaccagcattcccatatccacagccatctgcatttacatcagcaggacgctatacatgctgccagtgccagcgtacacccactgatcgacccacttgcctccggaagccacctgactcggataccataccccgccggtaccctgcccaatccattgttgccccacccacttcatgagaatgaggttctcaggcaccagctctttgcagcaccctatcgagaccttcccgcgtcactgagcgcccctatgagtgccgcccaccagctacaggctatgcatgcacagagtgccgagctgcagagactggcccttgagcagcagcaatggctgcacgcccatcaccctttgcatagcgttcccttgcctgcacaggaggattattattcgcacctgaagaaagagagtgacaagccactgtag

SEQ ID NO: 180112 - DNA, 519 bp, synthetic construct
  misc_feature 1..519: note = Description of Artificial Sequence: Synthetic coding sequence
  source 1..519: mol_type = other DNA
atgctggtgatccacctggaggagcacgtgatcatcgccttcagccagcataacacaatcatggatctggttcagtttttcgtgacattcttcagctgtttcctgagcctcttgctggtcgcagcggtcgtctggaaaattaaacagacctgttgggcctctaggcggcgcgaacagctgctccgcgaacgacagcagatggcaagccgcccctttgctagcgtggacgttgctctggaggtgggcgcggagcaaacagagttcctgcggggacccctcgagggcgctccaaaacctatcgccatcgaaccctgcgcaggaaatagggctgctgtcttgacagttttcctctgcctgcctcggggctcctcaggcgctcccccccccggccagagcggacttgccatagctagcgctcttatcgatattagccaacagaaggcgtccgactctaaagataaaacaagcggcgtacggaatcgaaaacatctgagcacccgccaggggacctgcgtctag

SEQ ID NO: 180113 - DNA, 4140 bp, synthetic construct
  misc_feature 1..4140: note = Description of Artificial Sequence: Synthetic coding sequence
  source 1..4140: mol_type = other DNA
atggagaccggcggccgggcccggaccggcaccccccagcccgccgctcccggtgtttggcgcgcgcggccagcgggcggtggagggggcggggcttcgtcttggctgctagatggtaacagctggctcttatgctatggattcctgtacctcgcgctgtacgcacaagtgagtcagagtaagccttgtgagcgtacaggatcttgctttagcggacgctgcgttaacagtacttgcctgtgtgaccctggatgggtgggcgaccagtgtcagcactgccagggacggtttaagctgactgaaccatccggatatctgacagatggccccatcaactacaaatacaagactaagtgcacttggctaatcgaaggatacccaaatgcggtgctccggctccgattcaatcacttcgcaacagagtgttcatgggaccacatgtatgtctacgatggtgatagcatctatgcgccactaattgcagtgctctctgggctgattgtacctgagatccgtgggaatgaaacagttccagaggtggttactacaagcggttacgctcttctgcacttcttctcagatgctgcctacaatcttaccggttttaacatcttttattccatcaacagctgtccaaacaactgttctgggcacggaaagtgcacaacatccgtatcagttccgtcccaggtatattgtgaatgcgacaagtattggaagggggaggcttgtgacattccatattgcaaggccaactgtggctcccccgaccatggctactgtgatctgactggagaaaagctctgtgtatgcaacgacagctggcaagggcccgattgttctctaaacgtgcccagtacagagtcatactggatattgccaaacgtaaaacctttcagcccgtcagtcggccgagcctctcacaaggctgtactgcacgggaagtttatgtgggtgatcggcggatacacattcaactacagtagcttccaaatggtcttgaactataacttggagtcatctatctggaatgtcggtaccccttcccgggggcccttacaacgttatggacactctctcgctctctaccaggaaaatatcttcatgtatggtgggagaattgaaacaaacgacggaaacgtgaccgacgagctatgggtatttaacatacactcccaatcttggtctactaagaccccaactgtgctcggccatggtcaacaatacgccgtggaaggacactcagctcacataatggagctggatagccgagacgtggtcatgatcatcattttcggctattcagctatttatggctacacttccagcattcaggaatatcacatttcaagcaatacatggctcgttccagagactaagggggcaatcgtccagggtggctatggccatacatctgtgtacgacgagatcacaaagtcaatctacgtccatggcggttacaaagcactgcccggcaacaaatacggactggtcgatgacctctacaaatatgaagtgaacactaagacttggacaattttaaaagaaagtggttttgcccgctaccttcactctgccgtcctaataaatggagccatgctgatctttgggggaaacacgcacaacgataccagcctaagcaatggggcgaagtgcttttccgccgactttctggcctacgacattgcctgcgatgagtggaaaattcttccaaaaccaaatttacacagggatgtaaatcgtttcggacacagtgccgttgtgatcaacggatccatgtatatttttgggggtttctcaagtgtgttgcttaatgatattctggtgtataagccccctaattgcaaagcatttagggatgaagaactttgcaagaatgcagggcctggcatcaaatgtgtctggaacaagaaccattgcgaaagctgggaaagtggcaacacaaataacatcctgcgcgcaaagtgtccccccaagacagctgctagtgacgatcgatgctaccggtacgctgattgcgcaagttgcaccgctaatactaacggatgtcaatggtgtgatgacaaaaaatgtataagtgcaaattcaaattgtagtatgtccgttaagaattacacaaagtgccacgttcgcaacgagcagatctgcaacaagctgacgagttgtaaatcttgttcgctgaatctgaactgtcagtgggaccagagacagcaagaatgccaagctctgccggcccacttatgcggcgaggggtggtctcatattggagacgcctgtttgcgtgtaaactctagccgggagaactatgataacgcgaaattgtactgttacaatttgtcaggaaacctcgcaagcttgaccaccagcaaggaggtcgagttcgtgctggatgagatacaaaagtacacgcaacagaaggtgtctccctgggtggggttaagaaagatcaacatctcctattggggatgggaagatatgtccccctttacaaacacaacgctccagtggttgcctggtgagcctaacgatagtgggttctgcgcatacctagagcgcgcagcggtcgcagggctgaaagccaatccctgcacttctatggccaacgggctggtgtgcgagaagccagtggtgtctcctaatcaaaatgcgcgcccatgcaagaagccctgcagcttacgtacctcctgtagcaactgtacaagtaatgggatggaatgcatgtggtgttccagcactaaaagatgcgtggattccaacgcttacataattagcttcccctacggtcagtgtttggagtggcagaccgccacctgtagtccacaaaactgttcaggacttcggacatgcggccagtgtctggagcagcctggatgtggctggtgtaatgatccgtctaatacaggccgtggccactgcatcgaaggctcgtcaaggggaccgatgaaattgatcggtatgcaccatagcgagatggtgcttgacaccaacctgtgccccaaagaaaaaaattatgagtggagtttcattcagtgtccagcatgccagtgcaatggtcattccacttgtatcaacaataatgtttgcgagcagtgtaaaaacctgactacaggcaagcagtgccaggattgcatgcctggatactatggcgacccaactaacggggggcagtgcaccgcatgtacatgtagtgggcacgctaatatatgccaccttcacaccggcaagtgtttttgtacgacaaagggcataaagggggaccaatgccaactgtgtgattcagagaaccggtacgtggggaaccctcttcgcggcacttgttactattccctcctcatagattatcaattcaccttcagcctgctgcaagaggatgacaggcaccataccgctatcaattttattgccaaccccgaacagtctaataagaatctggacataagcatcaacgcgagcaacaattttaatcttaacatcacatggtctgtgggctcgactgccggaactatttctggcgaagagacatccatcgtgagcaagaataacattaaagagtaccgggactcattcagctacgagaagttcaacttccgctctaaccccaacatcacattttacgtgtacgtgtccaacttctcctggcctattaaaatacagattgcatttagtcagcataacacaatcatggatttagtgcagttctttgtgacatttttctcctgtttccttagtctcttattagtggccgcggtggtgtggaaaattaaacagacatgttgggcaagccgccgcagggaacagttgctgcgagagcgccagcaaatggccagtcgtccatttgcttccgttgacgtagccctcgaggtgggcgccgagcagactgagttcctgcgggggcccttggagggagcccccaagcccatcgccattgaaccctgtgcaggcaatagggccgcagttcttactgtgttcttgtgtctgcctcgagggtcaagcggcgcccctcctcctggccagagcggccttgctattgcctctgccctgattgatatcagccagcaaaaggcttccgactctaaggacaagacgtcgggggtcagaaaccgcaagcacctgagtactcgccagggtacctgtgtgtag

SEQ ID NO: 180114 - DNA, 1293 bp, synthetic construct
  misc_feature 1..1293: note = Description of Artificial Sequence: Synthetic coding sequence
  source 1..1293: mol_type = other DNA
atggagtgcatgtggtgcagcagcaccaagcggtgcgtggacagcaatgcctatatcatttcatttccttacggtcaatgccttgagtggcagacagcgacctgtagcccccaaaattgcagcggcttaagaacatgtggccaatgcctcgagcagcccgggtgcgggtggtgcaacgatccaagtaacactggccgtggccattgcatagaaggatctagccgaggaccgatgaagctaatcggtatgcatcattccgagatggtgttggacacaaacctgtgtccaaaagaaaagaactatgagtggagtttcatccagtgccccgcctgcacatgttccggacacgccaatatatgccatctgcacacaggcaaatgcttttgtactactaagggtattaaaggcgaccagtgtcagctttgcgattcagaaaatcgctatgtcggcaaccctttgaggggcacgtgttactacagtctcctcatcgactatcagttcacatttagtttgctgcaagaggacgaccgccatcacaccgctattaacttcatcgcgaatcctgagcagtccaataaaaacctggacatctcgatcaatgcctccaacaacttcaatttaaacattacgtggtcggttggaagtactgccgggaccatctctggcgaagaaacatccatcgtatccaagaacaacattaaggaatatcgtgacagcttttcctacgagaaatttaatttcaggtcgaacccaaacattaccttctatgtgtacgtgtccaacttctcttggcccataaaaattcagatcgcattcagccagcataataccattatggacctcgttcagttcttcgtgacgtttttctcttgttttctcagcctgctgctggtcgccgccgtggtctggaagatcaaacagacatgctgggcatcacgaaggagggaacagctactcagggaacgacagcagatggcatctcgcccgttcgcttccgtggacgtggccttagaagtgggggctgaacagactgaattccttaggggacccctggagggggcccccaagccaattgccatcgaaccatgtgcaggcaaccgagccgctgtgctaactgtgtttctttgtcttccccgcggcagctcaggcgctcccccaccgggtcagtccggcctcgcaatcgcgagcgcgctgatagacatcagccagcagaaggcctcagatagcaaagacaaaacttccggcgtgcggaatcgcaagcacctcagtaccagacagggaacctgcgtttag

SEQ ID NO: 180115 - DNA, 207 bp, synthetic construct
  misc_feature 1..207: note = Description of Artificial Sequence: Synthetic coding sequence
  source 1..207: mol_type = other DNA
atgcccaagcacgagttcagcgtggacatgacctgcggcggctgcgcggaagccgtttcccgagtgctgaataagttagggggcgtgaaatacgatatcgatctcccaaataaaaaagtttgcatcgaatcagaacactcaatggacacactactggctaccttaaagaagactggtaagactgtgtcctacctcggcctggaatag

SEQ ID NO: 180116 - DNA, 207 bp, synthetic construct
  misc_feature 1..207: note = Description of Artificial Sequence: Synthetic coding sequence
  source 1..207: mol_type = other DNA
atgcccaagcacgagttcagcgtggacatgacctgcggcggctgcgccgaagccgtctctagagttctgaataagctgggaggagttaagtatgatatcgacctccccaacaagaaagtgtgcatcgaatcagagcactctatggataccctgctcgctacactgaagaagacaggcaagacagtgagctatctgggactcgagtag

SEQ ID NO: 180117 - DNA, 207 bp, synthetic construct
  misc_feature 1..207: note = Description of Artificial Sequence: Synthetic coding sequence
  source 1..207: mol_type = other DNA
atgcccaagcacgagttcagcgtggacatgacctgcggcggctgcgctgaggccgtaagcagagtcttgaataagctgggcggggtgaagtatgacatcgatctgccaaataagaaggtgtgtatagaaagtgaacatagcatggatactcttctggccaccttgaagaagaccgggaaaaccgtcagttaccttgggctcgaatag

SEQ ID NO: 180118 - DNA, 933 bp, synthetic construct
  misc_feature 1..933: note = Description of Artificial Sequence: Synthetic coding sequence
  source 1..933: mol_type = other DNA
atggccgccgccgtggccgccgcccccggcgccctgggcagcctgcacgcgggtggcgcccggctcgtggcggcatgcagtgcctggctgtgtcccggtcttcggctgccaggctctttggcgggccggagggcaggtccagcgatttgggcacagggctgggtcccagccgcaggggggcccgcccctaagcgcgggtactctagcgagatgaagactgaggacgagctgagagtcaggcatctcgaggaagaaaataggggcatcgtggtcctggggattaaccgagcctatggaaagaactcactctctaagaacttaattaagatgctatccaaagcagtggacgctctcaagagtgacaagaaggtgagaaccatcataatcaggtccgaagtgcctggtattttctgtgccgcaaacctgccagtcccaaccatagccgctatcgacggcttggccctgggcgggggcctagagctggctcttgcatgcgatatacgagtggccgcgagctctgccaaaatgggtcttgtagagactaaactggccataattccagggggcgggggtacgcagcgactccccagagctattggaatgagcttggcgaaagaactgattttttctgcacgcgtccttgatggcaaagaggctaaagcagtgggtctcatctcgcatgtactggaacaaaatcaggagggtgatgccgcctacaggaaagccctggacttggctagagaatttctgccccagggcccagtggcaatgcgagtagccaagctagccattaatcaggggatggaagtagatcttgtcactggtctcgccattgaggaggcttgttacgctcaaactattcctaccaaagatcgtctcgagggactcctcgccttcaaggagaaaagaccacctcgctataaaggcgagtag

SEQ ID NO: 180119 - DNA, 1020 bp, synthetic construct
  misc_feature 1..1020: note = Description of Artificial Sequence: Synthetic coding sequence
  source 1..1020: mol_type = other DNA
atggccgccgccgtggccgccgcccccggcgccctgggcagcctgcacgcaggtggagcccggctcgtggccgcctgtagcgcctggctatgccctggcctcagactcccaggatctctggccggacgacgagctggacctgcgatctgggcccaagggtgggtgcccgctgctgggggcccagctccaaagcgtggatatagctctgagatgaagacagaggatgaactgcgggtgcggcacctggaagaagaaaaccggggcatcgtcgttctgggcatcaaccgggcctatggaaagaactcgctctccaagaatcttattaagatgctgtcaaaggcagttgatgctctaaagagcgacaagaaagtgaggacgatcatcatacggtctgaggtgccagggattttctgcgctggggccgacctaaaggagcgcgcaaagatgagcagtagcgaggtcggcccatttgtgagcaagattcgcgctgttattaatgacattgccaatctgccagtgccgacaattgcagctattgacggactggctttggggggcggactggagttggccttagcttgtgacatcagggtggccgcttcttcagccaaaatgggactggttgagactaaattagccatcatccccggggggggaggaacacagcgcctcccgcgggccatagggatgagtctcgctaaggagctgattttcagcgctcgcgttcttgacggcaaggaggctaaggctgtggggctcattagccacgtactggaacagaaccaggaaggcgatgctgcttaccgaaaagcactggatttggcaagagagttcttgccccaaggccctgtggcaatgagggttgccaagctcgccataaaccagggcatggaggtcgacttagtgaccggattggctattgaggaggcatgttacgcccagacaattccgaccaaggaccgcttggaaggcctattggctttcaaagaaaaacggcccccccgttataagggggagtag

SEQ ID NO: 180120 - DNA, 768 bp, synthetic construct
  misc_feature 1..768: note = Description of Artificial Sequence: Synthetic coding sequence
  source 1..768: mol_type = other DNA
atggccgccgccgtggccgccgcccccggcgccctgggcagcctgcacgcaggcggggcccgtctcgtcgctgcttgctcagcttggctgtgtccagggctcagacttcccggtagcctcgcaggcaggcgggcagggcccgcaatctgggcacagggttgggtgcccgcggcagggggccccgccccaaagcgcggctacagctctgagatgaagacggaagatgaactcagagtacgccacctggaagaagaaaaccggggcatcgtcgtactgggtataaatcgcgcctacggaaagaatagtctgtcgaaaaacttgattaagatgttaagcaaggctgtggacgccctcaaatcggataagaaggtgagaaccattatcatccgaagtgaggtccccggcattttttgtgccggagccgacctgaaggaacgagcgaaaatgagttcctctgaggtagggccgtttgtgtctaagattcgcgcagtaatcaatgatatcgcgaacctccccgtgccaaccattgctgctatcgacggtttagctcttggaggaggcctggagcttgctctcgcatgcgacatccgggttgctgcctcgtcagccaagatgggcctcgtggagactaagctggccataatccccgggggcgtaacctcttccacagaggttctgaaccccagcaaaagttcgatgaagatcggaattatcatcttccagacccccgtaaatattgacatcctggccagctcacacgaatcttag

SEQ ID NO: 180121 - DNA, 1932 bp, synthetic construct
  misc_feature 1..1932: note = Description of Artificial Sequence: Synthetic coding sequence
  source 1..1932: mol_type = other DNA
atgcccctgctgttcctggagcggttcccctggcccagcctgcggacttacactgggttgagtgggctcgctctgcttggcactattatctctgcttaccgtgccctgtcccagccagaagccggacctggtgagccagaccaactgaccgcatctcttcagccagaacctccagcaccagctcgtccttcagctgggggcccccgagcacgggacgtagctcagtatctgctcagcgatagccttttcgtttgggtactagtgaatacggcctgttgtgttttgatgttagttgctaagcttatccaatgcatcgtgtttggccccctgagagtgtctgaaaggcagcacctgaaagataaattttggaattttattttttacaagttcatcttcatttttggcgtcctgaacgttcagaccgtggaggaggtagtcatgtggtgcctatggttcgctggtctcgtattcctccatttgatggtgcagctatgtaaggaccggttcgagtacctgtcattctcacccactactccaatgtctagtcatgggcgtgtgctgtccctgctggtggcgatgctcctctcctgctgtggactagcagctgtctgcagtattaccggatacacccatggcatgcataccctggcgttcatggccgcagaaagtctcttggtcacggtgcgcactgctcatgtcatcttacggtacgttatccatctgtgggatctgaaccacgagggcacatgggaggggaagggaacttacgtctattatacggactttgtcatggagctgaccttgctttccctggatttgatgcatcacattcatatgttactcttcgggaatatttggctcagtatggcctcccttgtcattttcatgcagctcaggtacttgttccatgaggttcagcggcgcatccgccgccataagaattacctacgcgtggtaggcaacatggaggctcggttcgccgtggcaactccagaagagctggcagtgaataatgacgactgcgccatttgttgggattccatgcaggctgcacgaaagctcccctgcggccacctgtttcacaatagctgtctgcgaagctggctcgagcaggatacaagctgtcccacttgtaggatgtccctcaatatcgctgataataacagggtccgcgaagagcatcagggagagaatcttgatgagaatctcgtgcctgtcgccgctgcagagggcaggcctcggttgaaccagcacaatcacttctttcatttcgatgggtccaggattgcctcctggctaccaagcttttcagtggaagtgatgcatactaccaacatactgggaatcacacaggcgtccaatagtcaattaaacgcgatggcacaccaaatccaagagatgtttcctcaggtgccatatcacctggtgctgcaggatttacagcttactcgctccgtggaaatcaccactgacaatattctcgaggggcgaatccaagtccccttccccactcagcgatccgactccatccgtcctgcactgaacagccctgttgagcgtccgagctccgaccaggaggagggcgagacatcagcccagactgagcgggtgcccctggatctgagcccacgactagaggagacactagatttcggcgaggtggaagtggaaccatcggaggttgaggatttcgaagcccgcggatctcgtttttcaaaatctgcagacgaacgacaaaggatgcttgtgcaacggaaagacgagctgctccaacaggcgcggaagaggttcttgaacaaatcctccgaagacgatgccgcctccgaaagcttcctgccttctgagggggcttcaagtgatcccgtcacgttacggcggagaatgttggccgccgctgcagaaagacgccttcagaagcagcagaccagctag

SEQ ID NO: 180122 - DNA, 954 bp, synthetic construct
  misc_feature 1..954: note = Description of Artificial Sequence: Synthetic coding sequence
  source 1..954: mol_type = other DNA
atgcgggacagcgcctgctggcagcggaaggacgagctgctgcagcaggcccgtaaaagatttctcaacaagagttcagaagacgacgccgcctccgagtcgtttctcccctccgaaggtgcctcaagtgaccccgtgacactcaggaggaggatgctggccgcccgcaacggggggttcagatcttctcgacccccctctgctccactcccctcctccgcagcttcctgcgccctctgtcctaccgactggcgccgccccgtaccaatcccgctgcatggcaaggccggcctgaccgccctgcccctatacaaagcttgtgggttgattgtgttcggacagttgatcaatctcatccttctatgcaacaccttttatgtgacgtttttgtttcctcttgagactctccagattctgacagtcggaatgatctcctccggcgtcgactggaccgcttggggtggcggtaggagcggaggctctgaggtggcctgcctgcaacaggcggctagtacaccggctagttgtgtgcggcccactaacgcaggtgtgttatccaccacccctagtgggaagtccgttggtgaagctcacagcgtaagcccaccgccccgacgaggggtgacgtcggttattaagctcttatcacttttgtggaaacacgtggactgcgcacggcgcccaacaggatcatgtacacctcagcaggggattcttgagaaagaactgttagtgcgttacctagagcaacgtagggggaagagtagagccattggctgcgatgaggtgacccccttttgtcccactactagcggaactgattttccctctttacagtcaaaggctggcctaatatccgtaaattccggtgctccagcttcacatgagtgtgcaccttgggtgcctagtcctctaagcatctctctgagtaggctcgaccttggatccggctag

SEQ ID NO: 180123 - DNA, 1638 bp, synthetic construct
  misc_feature 1..1638: note = Description of Artificial Sequence: Synthetic coding sequence
  source 1..1638: mol_type = other DNA
atggccaccgacgccgccctgcggcggctgctgcggctgcaccggacagaaattgccgtggctgtcgactccgctttcccgctgctgcatgccttggctgatcacgatgtcgtgcccgaagacaaattccaagagaccctgcacctcaaggaaaaggaagggtgtccacaggccttccatgcgctgctatcatggctcctcacacaggacagtaccgctatcctggacttctggcgagtgctctttaaagactataacctcgaaaggtatggtagactgcaacccatcctggacagcttcccaaaagacgttgacctgagccagcctaggaaaggacgcaagcctcccgcagtgcctaaggctctggtgcccccaccccggttgcccaccaaaaggaaggcgagcgaagaagcacgagctgccgcacccgcagctcttaccccacgtgggaccgcctctcccggtagccagctcaaggctaaaccacctaaaaaacccgagagttccgcggagcagcaacgcctgcctctcggcaatggaattcagacaatgtccgcgtctgtccagagggcggtcgctatgagctcgggggacgtgccaggggcaaggggtgctgtggaggggattctgatccagcaggtctttgagagtggaggaagtaaaaagtgcattcaagtggggggggagttctacactcccagcaaattcgaagacagcggctctgggaaaaataaagccagaagtagctctggacctaaacccctcgtacgtgccaaaggggcacagggcgctgcccccggcggaggtgaggcacggttagggcaacaggggagcgttccagctccgttggcattgccaagcgaccctcagctgcatcagaaaaatgaagatgagtgcgcagtgtgccgggatggcggagagcttatctgttgcgacggctgtccaagagccttccatctcgcttgcctgtctccacctctgcgcgaaataccatcgggtacttggaggtgttcttcatgcctccaggccaccgtccaggaggtgcagccgagagccgaggagcccaggccccaggagccccctgtggagacgccactgccccccggcctgcggtctgctggcgaagaggtacggggtccccctggcgagccgctggctggcatggacactacactggtctataaacacctgcccgcgccacccagcgcggctccgttgcctggcctggactcatcggccctgcatcctttgttatgtgtcggtccagaagggcagcaaaacctcgctcccggcgctcgctgtggcgtgtgcggggatgggactgacgttctccggtgcacccattgtgcagcagcattccactggagatgtcactttccagccggaacatcaagacccggcacaggcctccggtgccgctcctgttccggggatgtaacccccgcccctgtggagggggtgctggcacccagccctgcacggttggcccctggccctgctaaagacgatacagcatcacacgagccggccttgcacagggacgacctggaatcccttctgtcagagcatacattcgacggaatcctgcagtgggcgatacagtccatggctcgaccggcggcaccattccctagctag

SEQ ID NO: 180124 - DNA, 735 bp, synthetic construct
  misc_feature 1..735: note = Description of Artificial Sequence: Synthetic coding sequence
  source 1..735: mol_type = other DNA
atgtggctggtgtacagcagcggcgcccccggcacccagcagcccgctagaaacagggtttttttcccgataggcatggctccggggggagtgtgttggagacccgatggctggggcacagggggccaaggacgcattagtgggcccggcagcatgggcgcaggacaaaggctcggctcgtccggaacccagcggtgttgctggggaagctgtttcggaaaagaagtggccttgcgaagagtcctccaccccagccccaagaatgaggatgaatgtgccgtctgtcgggatggcggcgagctaatatgttgcgacggctgtcctagagcatttcatctagcttgcctcagcccaccgctgcgggaaatcccctctggaacctggaggtgtagcagttgcttgcaggctactgtgcaggaggtgcagcccagggccgaggagccacggccccaagagccaccagtcgaaactcccctaccgcctggtcttcggagcgctggagaagagcctaggtgtcaggggtggacccccagaccttgcacaccttactgcgtctgggtgcttcgcgtgtcgcgaacctggctcttggtgcgcgtcgcgggctgcgcagagatggtgcggacttgctgtggggttttgactgcccccctcccgtcaactggtgcggccacgtcccaacctgctcctcccggacccggccgcgcatgtgccgccgatccagcacaggagacatag

SEQ ID NO: 180125 - DNA, 1047 bp, synthetic construct
  misc_feature 1..1047: note = Description of Artificial Sequence: Synthetic coding sequence
  source 1..1047: mol_type = other DNA
atgtggctggtgtacagcagcggcgcccccggcacccagcagcccgcgcgaaaccgagtgttcttcccaatcggaatggcccccggcggtgtgtgttggcgacccgacggatggggaacaggaggacagggacgaatcagtggacccggatcaatgggcgccggccaaaggctgggctcctccggcactcaacgctgctgttggggctcatgtttcggtaaagaggtggctctgcggagggtgttacaccccagccctgtgtgtatgggcgtgagttgtctgtgccagaaaaacgaggatgaatgcgccgtttgtagggatggaggggagttaatatgttgcgatggatgtccacgtgctttccacctggcttgcctcagccctcccttacgggagatacccagcggcacctggcgttgttcaagctgcctgcaggcaactgtccaagaggtgcagccgagggctgaagagcctagacctcaggagcctcctgttgaaacaccactgccccctgggctgagatctgcgggggaggaggttagagggccgcctggggagcccctggccggtatggataccaccttggtgtacaaacatctcccagcccccccgagcgccgctccgttgccaggcttggatagctccgccctccatccgctactgtgtgtgggccccgagggccaacagaacctggccccaggagcacggtgtggggtatgcggggatggaacggacgtgctacgctgcacacattgtgcggcagcatttcattggcggtgtcactttccagctggcacatccagaccaggtacaggactgaggtgccgctcatgtagcggagatgttacccccgcacctgtagagggagtgctggccccgagtccagctcgcctggcgcctgggccagctaaggacgatacagcgtcacacgaacccgctcttcaccgtgacgacctggagtcactgctcagcgagcacacattcgacgggatcctccaatgggctattcagagtatggcccggccagcagcacctttccctagttag

SEQ ID NO: 180126 - DNA, 1017 bp, synthetic construct
  misc_feature 1..1017: note = Description of Artificial Sequence: Synthetic coding sequence
  source 1..1017: mol_type = other DNA
atgtggctggtgtacagcagcggcgcccccggcacccagcagcccgctagaaacagagtctttttcccaatcgggatggccccaggcggagtgtgttggaggcccgatggctgggggacgggcggacaaggccgcatttctggacccggctccatgggtgcaggccagaggctcggctctagtgggacacagagatgctgctggggctcatgtttcggcaaggaagtcgctctgcgtcgtgtactgcacccttctcccaaaaatgaggacgaatgtgcggtctgtagagacggcggtgagctgatttgctgcgacggttgtcccagagccttccacctggcatgtctttctcctccactgcgcgagatcccctctggcacatggagatgcagcagttgtctgcaagccactgtgcaggaagtgcaacctcgggcggaggagccgagacctcaggagccacctgtagaaacacctctacctccaggattgagatctgctggggaagaagtcaggggacccccgggcgagccactcgctggcatggacacaacactagtttacaagcatctgcccgcgccacccagcgcagcgcctctcccaggcctcgatagcagcgctctgcaccctcttttgtgcgttggccccgaagggcaacaaaacctagcccctggcgcccggtgtggcgtctgcggggacggaaccgatgtgttaagatgtacgcactgtgctgcagctttccattggagatgtcatttccctgctggtacatcgcgcccaggcactggcctgcgttgtcgatcttgttccggggacgtgacccctgcccccgtggagggagttctggcccccagcccagcgaggttagctccgggccctgcaaaggatgataccgcttcacacgaaccagcccttcatagggacgatcttgaaagccttctttccgagcacacattcgacggaattctccaatgggctatccagagcatggcaagacccgctgcaccctttccttcctag

SEQ ID NO: 180127 - DNA, 1047 bp, synthetic construct
  misc_feature 1..1047: note = Description of Artificial Sequence: Synthetic coding sequence
  source 1..1047: mol_type = other DNA
atgtggctggtgtacagcagcggcgcccccggcacccagcagcccgccagaaatcgcgtgttttttcctatcgggatggcaccagggggcgtgtgctggagacctgacggctggggcactggcggacaggggcggatctccggcccaggcagcatgggcgcgggccagagactcgggtcctccggaactcagcgatgctgttgggggtcttgcttcggtaaagaggttgcgctcaggcgcgtgctgcacccgtcaccagtgtgtatgggagtctcatgtctgtgtcaaaagaacgaagacgagtgcgcagtgtgtcgggatggcggcgaacttatctgctgcgatgggtgtccacgcgccttccatctcgcttgcttaagcccaccgctgagagaaattccaagcggcacttggcgctgtagtagttgtctgcaggccaccgtacaagaggtccagccccgggctgaagagcctagacctcaggaacctcctgttgagacccccttgcccccaggcctgcgcagcgcgggagaagaagttagaggtcctccaggggagccactggccggaatggatacaaccctggtgtacaagcaccttcccgctcccccgagcgccgcccctctgccaggcctggacagcagcgcgctgcatccactcctttgcgttggtcccgagggccaacagaatctggcccctggagccaggtgcggcgtatgtggcgacgggactgatgttctccgttgtacccactgtgccgccgcctttcattggagatgtcatttccctgcaggtacaagccggcccggaactgggcttaggtgccgatcgtgcagtggcgacgtgacaccggcaccagtagagggggtgcttgcaccttcccctgcccgactggcccctggtcccgccaaagacgacaccgcctctcacgaacccgccttacatcgggatgacctcgaaagccttctcagcgaacacactttcgacgggatcttgcagtgggccattcagtcgatggcgagaccggctgcccctttccctagttag

SEQ ID NO: 180128 - DNA, 3717 bp, synthetic construct
  misc_feature 1..3717: note = Description of Artificial Sequence: Synthetic coding sequence
  source 1..3717: mol_type = other DNA
atgaaggtggtgcccgagaagaacgccgtgcggatcctgtggggcagggagaggggggcccgcgctatgggggcccagcggttgctccaagaactggtcgaggacaaaacgcgttggatgaagtgggaaggcaagagagtggagctgcccgactctccaaggtcaacattcctgctcgctttttccccagatagaacattgttggcctcgacgcacgtgaaccataacatttacattactgaagtgaagaccggtaaatgtgtccatagccttatcggtcaccgtcgcaccccttggtgcgtgacatttcatccgacaattagcgggctgattgctagtggctgcctggatggtgaagttagaatttgggatttgcacggtggaagcgagagttggttcaccgactctaataacgccatcgctagcctggccttccatccaactgcacagttgcttctaattgcaaccgccaatgaaatccacttttgggactggagtagacgagagccatttgcggtggtcaagactgcaagcgaaatggagcgggtgaggttagtgcgctttgatcctctcggacactatctcctcacagccattgtgaatccgagcaaccaacaaggtgatgatgaaccagagatccctatagatggtaccgagctgagccattacagacagagagccttactgcagtctcagccagtgcggcgcactcctttgctgcataactttctgcacatgcttagttcccggtccagtggtattcaagtgggtgaacagagcaccgtgcaggatagtgcaacccccagcccacctcccccccccccccaaccctctactgagaggcctaggacctcagcttacatacggctgcggcagagagtcagctaccctacagccgagtgctgtcagcatctgggcatactgtgtctgtgctccaggtgtagcggaaccagggttccctctcttttgccacatcaggacagtgtacctcccgcctcagcacgcgccacaactccaagtttttccttcgtgcaaaccgagccatttcacccgcctgagcaggcatccagtactcagcaggaccaaggtttgttgaaccggccttctgccttttctacagttcagtcctctaccgccggcaacaccctcaggaatctatccttagggcctaccagacgcagtctgggcggacccctctcttcgcatccttcacgataccaccgggagatagccccagggctgacaggcagtgagtggacaaggaccgtgctttcattgaatagtaggagtgaggccgagtcaatgccacctccgagaacatctgctagcagtgtctcccttctgtctgtgctgagacaacaggagggggggagccaggcttccgtgtatactagtgccacggaaggcagaggctttcctgcctccgggcttgcaacagagagtgacggaggcaatggcagctctcaaaacaatagtggctctatcaggcacgagctccagtgtgatctgcgtcgattctttcttgaatatgaccggttacaggagctggatcagagcctgtccggagaggccccccagacccagcaggctcaggagatgcttaacaataatatcgaaagcgaaagaccaggaccgagccatcagcctaccccccattccagcgagaataactcgaatctcagtcgcggccacttgaaccgctgtagggcatgccacaacctgctcaccttcaacaacgatactttgaggtgggagcggaccacaccaaactacagtagcggggaggccagctctagctggcaagtccccagctctttcgagtctgtcccaagcagcggaagccagctcccccccctagaacggactgagggccagaccccttctagcagtcgccttgaattgagtagctccgcaagccctcaggaagagcggaccgttggcgtggcttttaatcaagaaacggggcattgggaaaggatctacactcagtcttcaaggagcggaaccgtctctcaggaggccctccatcaggacatgccggaggaatcaagcgaggaagacagcctccgaagacgccttctcgagtccagtctgatctctctttcacgttacgacggggcagggtcacgcgagcacccaatttaccccgatcctgcccgcgataacggcgacaggtcaagacatcgcgctccccgaaacgccagaatgtctgccccatcactagggaggttcgtgcctagacggtttctattacccgagtacctcccgtacgccggaatttttcatgagcgtggacagcctggcctcgctacacacagtagtgtcaaccgggtgctggccggcgcagtaataggagatggccagtcggctgtcgcgtccaacatcgccaatactacatatcgcctgcagtggtgggactttaccaagtttgacctcccggagattagcaatgcaagcgttaacgtccttgttcagaactgcaagatctataacgatgcctcctgcgacatttctgctgacggtcaactcctcgccgcattcattccaagttcccaaaggggtttcccagatgaagggatcctggctgtttatagcttggcgccccataacctgggagagatgctctatacgaagcgatttggaccaaatgccattagtgtaagtctgtctcctatgggccgctatgtgatggttggtctggcatccaggcgtattctgctccacccatccactgagcatatggtcgctcaggtcttcagactgcagcaggcacatggtggtgagacttcaatgcgaagagtcttcaatgtactgtatccaatgccagccgaccagcgccgacatgtgagcattaactccgcaagatggctgccggagcctggtctgggtttagcctatggaacgaacaagggggacctggtgatttgtaggcctgaggccttgaattctggcgtggagtactattgggaccagctgaatgagaccgtgttcacagtccattcaaatagtaggagttcagagcggcccggtacaagtcgagcaacctggcggaccgaccgggatatgggcctgatgaacgctattggccttcagccacgcaaccctgcaacatcagtgactagtcagggaacacagacactggcattacaactgcagaacgcagaaacgcaaacggagagagaggtccctgaacccggaactgctgcctcaggccctggcgaaggcgaggggtccgaatacggcgcctcaggggaggatgccctatcacgaatccaaaggctgatggccgaaggcgggatgaccgccgtggtccagcgagagcagtctaccactatggcgagtatgggcggatttgggaataacataattgtttcccaccgaatccatagatcctcgcagactggaacagagcctggtgctgcacacaccagttcaccacagcctagcacgagtcgcgggttgctacctgaggccgggcaactggctgagagaggcttgtctccaaggaccgcttcatgggatcagcctggtacccccggtcgagaacctacgcagcccacacttcccagttccagtccagttccgatacccgtgagcctcccgagtgcagagggccccaccttacactgtgagctcacgaacaacaaccatctgcttgacggcggaagtagtaggggggacgctgctgggccacgtggtgagccacgaaatcgctag

SEQ ID NO: 180129 - DNA, 2169 bp, synthetic construct
  misc_feature 1..2169: note = Description of Artificial Sequence: Synthetic coding sequence
  source 1..2169: mol_type = other DNA
atgaaggtggtgcccgagaagaacgccgtgcggatcctgtggggccgagagcgaggagcccgagcaatgggggcccagcgcctcctccaggagctggtggaagacaagacacgttggatgaagtgggagggcaagagagtggagttgcccgactccccacgctccaccttcttgctggcctttagtccagatagaactctcctggcaagcactcacgtgaatcacaatatctatatcactgaggtaaaaactggaaaatgcgtccactccctgatcggtcatcgtcgcactccttggtgcgtgacgtttcatcccaccatcagtggcctcatagcatctggctgtctggacggggaggtgcgaatttgggatctccacgggggctccgagtcctggtttaccgacagcaacaacgctatcgccagcctggcatttcatcctacggcacagctgctgctcattgcaaccgccaacgagatccatttttgggattggagcagaagggagccttttgcggtggtgaagaccgcatccgaaatggaaagggttcgccttgtgaggttcgatccattagggcactatcttctgaccgcaattgtgaatccctccaaccagcagggcgacgacgaaccggaaatcccaatagatggaaccgaactcagccattatcgccagcgcgcgctcctgcagtcacagccggtgcgcagaacgccactgcttcataacttccttcacatgttaagtagccgatcttctggcatccagacagaacctttccacccccccgagcaggcaagctccactcaacaggatcaggggctacttaatagacccagtgcattcagcaccgtccagtcttcgacagccggtaatacactccggaatcttagcctaggcccaacccgccgaagtctaggtggaccactgagctctcatccgagtagatatcaccgggagatcgcccctggtctgactggtagtgaatggaccagaaccgtcttaagcttgaattcacggagtgaagcagaatcgatgccgcctccaaggacgtccgcctcctcagtgagcctgctatccgtactgaggcagcaggagggtggttctcaggccagcgtctacacaagtgcgacagaaggccggggtttccctgcatccggattagccactgagtccgatggaggcaatggctcttctcaaaataattctggatctattcgacacgaattgcagtgtgacctgcgaagatttttcctggagtacgatcgtttgcaggagcttgaccaatccctgtcaggcgaagcacctcagactcaacaggcacaggaaatgttaaacaacaacattgaatcggaacggccaggaccgtcccaccaacctacacctcacagttctgagaataactctaacctctcgagaggccatctcaaccgctgtcgcgcatgtcacaaccttctcacatttaacaatgataccctgcgctgggagcggacgacgcccaattattcaagtggcgaggccagttcatcgtggcaggtgccctcatccttcgagagtgttccctcctcaggatctcagttacccccactggagaggaccgaggggcagaccccttcttcatcccgacttgaactgagcagcagcgccagccctcaggaagagcgcaccgtaggggtggctttcaaccaggaaacaggtcattgggagcgcatttatacacagtcgtctaggagcgggactgtaagccaggaggccttgcatcaagacatgccggaggagagcagcgaagaggacagtctgcgaagaagatctcttgcactgtctcctcgactcgagtattccggagctatcctggcccattgtaagctcaggttacccggaagttgtcacagccccgcgtcagcctctcaggtggccgggaccacgggtgctcaccaccacgcgaggttaatttttgccttcctggtggagatggaattccatcatgtttctcaggcaggtttggagctacttaccagtggcgacttaccaacatcggcatcccagagcgctggcattaccggggtgagccatagagcatggcctcgcttactggagtcatcactcatatcattatcaaggtatgatggggccggatctagagagcacccgatctaccccgatccagcctag

SEQ ID NO: 180130 - DNA, 3627 bp, synthetic construct
  misc_feature 1..3627: note = Description of Artificial Sequence: Synthetic coding sequence
  source 1..3627: mol_type = other DNA
atgaaggtggtgcccgagaagaacgccgtgcggatcctgtggggcagggagcgcggagcccgagctatgggcgcacagaggctcctccaagagctggtggaagacaagacaagatggatgaaatgggagggaaaaagagttgagctccccgatagccctagatctacctttctgctggccttcagtccagataggacacttttagcatctacccacgttaatcacaatatatacattactgaggtgaaaacaggaaagtgcgtgcacagcctgatagggcacaggcgcacgccctggtgcgtgacttttcatcccaccatcagcggattgatcgccagcggctgcctggacggcgaggtgcgcatctgggacctgcatggcggttccgaaagttggtttaccgactcgaataacgcaatcgcctctctcgcattccaccccactgcacaattgttgctgatcgccacagcgaacgagattcatttctgggactggagtcgacgggagcctttcgcagtggtgaagacagcatcagagatggaacgcgttcgtctcgtgagatttgacccattgggccattacttactaactgccattgttaatccctccaaccagcagggtgacgatgagcctgagatacccattgacgggaccgaactgagtcactatcgccaacgcgctttactgcagagtcagcccgtcagacgcactcccctgctccacaactttctgcacatgttgtcatctaggtcctccggcatccaaactgagccgtttcacccacccgagcaggcctccagcactcaacaggatcaaggactccttaacaggccgagcgcctttagcacggtccagagcagcacggcaggaaacaccctacgcaatctcagcctgggaccaacccggcgctccttggggggcccgctgagctcgcatccgtcccgctaccaccgcgagatcgcccccggcttgaccggatcggaatggacaaggacggtgttgtcactcaatagtcgatctgaagctgagtctatgccgccaccgaggaccagcgcttcatccgtcagcctcctaagcgtcctgaggcaacaggagggtgggtcacaggcctccgtgtatacatctgctacagagggacggggctttcccgcgtctggccttgcaaccgaatccgatggcgggaatggctcttcccaaaacaacagtggctccattaggcacgagctgcagtgtgatctgagaagatttttcctagaatatgataggctgcaggagctggaccagagcttaagtggtgaggctccacagacacagcaggctcaggagatgcttaataacaatatcgaaagcgagcggcccggcccttcacatcagccgacaccccactccagcgagaacaattccaacttgtccagagggcaccttaatcggtgccgtgcatgccacaacctgctgaccttcaacaacgacactctccggtgggagcggaccacccctaactactcctctggagaagcgtcatcctcctggcaagttccttccagctttgagtctgtgcccagcagcggatctcagctgccgcctcttgaacgtacagagggacagacgccttctagttccagactggaactgtcctcaagcgctagtccacaggaggaacgtaccgtgggcgtggcttttaatcaagagaccggtcactgggagcggatctacacacagtcgtcacgcagcgggacagtaagccaagaggctctccaccaggatatgcctgaggagagttcagaagaggatagtttgaggcgccgcctcctggaatcgagcttaatctcactttcacgatatgatggggccgggtcccgggagcatcccatttaccctgatcccgcaagactgagccctgccgcatactacgcacagcggatgatccagtacctctctcgccgggatagcattagacagagatcaatgaggtaccagcaaaatcgacttcgcagtagtaccagttcgtctagttctgacaatcagggtcctagcgtagagggcactgacttagagttcgaagactttgaagataacggagaccgctctagacatcgcgcccctcgcaatgcccggatgagcgctcccagcctcggccgcttcgttcctaggcggtttctgctgcctgagtacctgccatacgctggaattttccacgagcgcggtcagccaggactggcaacacatagctccgtaaatagagtcctggccggagccgtcatcggcgatggtcagtcagctgtggcttctaacatagcaaatacaacgtaccgtcttcagtggtgggattttaccaagtttgatctccctgaaattagcaatgcctccgtgaacgtgcttgtacagaattgcaaaatctacaatgatgcctcctgtgatatatcagcagacgggcaactgctggccgcctttattccaagctcccagcggggttttcccgacgagggcatactggctgtctacagccttgctccccacaaccttggggagatgctgtatacgaaaaggtttggccctaatgcgatttccgtctcgctcagccccatggggcggtatgtcatggttggactcgcttctcgaagaattttactacacccctcaaccgaacacatggtcgcacaagtgttcagattacagcaggcccacggaggcgagactagcatgcgaagagtctttaacgttctgtacccaatgccggccgatcagcggcgccatgtgtccatcaatagtgcaaggtggcttcctgaacccggcctggggttggcatacggcactaataagggtgacctcgtaatttgccggccggaagcgctgaattctggagttgagtattattgggaccagcttaacgaaaccgtgttcactgtgcacagtaatagtcggtcctctgagaggcccgggacttctcgggcgacttggcgaaccgatagggacatgggccttatgaatgccatcggactccagccacgaaatcccgcaacaagcgtgacctcccagggaacacagacactagcattacagcttcaaaacgcagagactcagaccgaacgggaggttcctgaaccggggactgccgcttcgggccctggcgagggagaaggcagtgagtatggcgcgtcaggcgaggatgctctgtctcggattcagcgcttaatggccgaaggcggtatgaccgccgtggtgcagagagaacaaagcacgaccatggccagtatggggggctttggcaataacattatcgtgtcccatagaatccacagaagttcacagaccggcacggaacctggcgccgcccacaccagttcccctcaaccttcaacctccaggggcctcctccccgaagctgggcagctcgcagagaggggtttgtcacctcgcactgcgtcctgggatcagccaggtactccaggcagggagccaacccagcccactcttccttcttccagtcctgttcctattcccgtctctctgcctagcgctgaaggccccactctgcactgcgagctgacaaataacaatcatctgttagatggaggcagttcacgtggggacgcagccggtcctcggggagaacctcggaacaggtag

SEQ ID NO: 180131 - DNA, 3810 bp, synthetic construct
  misc_feature 1..3810: note = Description of Artificial Sequence: Synthetic coding sequence
  source 1..3810: mol_type = other DNA
atgaaggtggtgcccgagaagaacgccgtgcggatcctgtggggccgcgaaaggggagcacgagcgatgggtgctcagagattactgcaggagttggtcgaagataagaccagatggatgaaatgggagggaaagagggtggagttgcctgattcaccgaggtccacgtttctcttagcattttctcctgatcgtaccctgttagcctctactcacgtcaatcacaatatttatatcacagaggtcaagacagggaaatgcgtgcattctctgataggccacagaagaaccccctggtgcgtgacatttcatcccactatatcagggttaattgcctcagggtgtctggatggcgaagttcggatatgggatctgcatggagggagcgagagttggttcacagattccaacaatgctatcgcaagcctggccttccaccccaccgctcagcttctgctgatcgccacggccaatgagattcacttctgggactggtcccggagagagccctttgcagtggtgaaaaccgcctctgagatggaacgggtcagactggtgcggtttgatcccctgggacattatctgctgactgccatagtgaacccatcgaaccaacagggagatgacgaaccggagatacccattgacggaaccgaactaagccattacaggcagcgtgccctgctgcagagtcagcctgttaggcgtacaccattattacacaatttcctgcacatgctgagcagcagatccagtggaatacaagttggcgaacagtccacggtccaggattctgcgaccccctccccaccgcccccgcctccgcagccaagtaccgagcgtcccagaacgtccgcgtacataagactgcgccaacgcgttagttatcctactgccgaatgctgtcagcacttgggcatcctttgcttatgttccaggtgcagcggtacccgagtaccttcgttgctgccgcaccaggattccgttcctcctgcttcagcccgcgcaacgactccgtctttctcttttgttcagaccgaaccctttcatccccccgagcaggctagttccacccagcaggaccagggtctcctcaatcgacctagtgcattttccactgtgcagtcatccaccgcaggaaacacgctgaggaatctgtctcttggtccaactcggcgaagtctaggtggccctctttctagccatccaagcagatatcaccgagaaatagctccgggcctgacgggttcagaatggacgagaacagtattgagcctgaatagccgctccgaagcagagagtatgccaccacctcgcaccagtgcatccagcgtgtccctgcttagtgtgctgagacagcaagagggcggaagtcaggcctccgtctacactagcgccaccgaggggcgaggattccctgcatccggcctcgccaccgagtccgacgggggcaatggttccagccagaacaatagtggaagcatccgccacgagctgcagtgcgatctgaggaggttctttttggaatatgatagactgcaggagttagaccagtccttgtcaggagaggccccccagacccagcaggcacaggagatgctgaataacaacatagaatcggaaagacctggaccatcccaccaacccacaccccactccagtgaaaacaactcgaatcttagtcgagggcacttaaacaggtgccgtgcctgccacaacctcctgacatttaacaatgacacgctccgatgggagcgcactacacctaactactcatcgggagaggccagctccagttggcaggtgcctagcagctttgagagtgtgccgtcgagcggatctcagctgccacctctggagcggacagagggccaaacgccgagctcttcccggttggaactctcaagctcagcgagcccccaagaagagagaactgtgggcgtcgcattcaaccaggagacgggccattgggaacggatctatacccagagctcaagatctggcactgtatctcaagaggccctgcatcaggacatgcccgaagaatcttccgaagaggattctctcagaaggttatctcctgcagcctactatgcccagagaatgatacagtaccttagccggagagattctatccggcagcgctccatgcggtatcaacagaaccgccttaggtcgtcaactagtagctcatcttcagacaatcaggggccatcagtagaagggacagaccttgagtttgaggatttcgaagacaacggtgatcggtcccgacaccgcgcgccccggaatgcgagaatgtccgcgcctagtctgggacgcttcgttccaagacggttcctgctgccagagtacctgccttatgcaggcatttttcacgaacgcggacagcctggactggctacgcactccagcgtaaaccgcgtcctagccggtgccgtcattggagatggtcagagcgcagttgccagtaatatagctaatactacgtatcgcctacagtggtgggattttactaagttcgacctgcctgaaatatccaatgcaagtgtgaatgtgctggtgcaaaattgtaaaatttacaatgacgcatcttgcgatatttctgctgatgggcagctcctcgccgcttttatccctagtagccaaagaggattccctgacgagggtatactggctgtctattcgctcgcgcctcacaacctgggtgagatgttatacacaaaacgctttggcccgaatgccatcagtgtcagccttagtccaatgggtaggtacgtcatggtcgggctggcatcaaggaggatcctcctccacccatcaacggagcacatggtcgcacaggttttccgactgcagcaagcgcatgggggggagaccagcatgagacgcgtgttcaacgtcctgtatcccatgcccgccgaccaacggcgtcatgtcagtatcaactcggctaggtggctccccgagccaggactgggactggcttacgggactaataagggggatctagttatttgcagacccgaagcacttaactccggggttgaatactactgggaccaactgaacgagaccgtgtttacagtgcattccaacagtcgttccagtgagcgtcctggaacgagccgcgccacatggcggactgatcgtgacatgggtctgatgaacgccattggcctgcagccacggaatcccgccacatcagtgacatctcaaggaactcagaccctggcactgcagctccaaaatgctgagacacagaccgagcgtgaggtgcctgaacctggcacagctgccagcgggcccggagaaggggaggggtcagagtatggcgcaagcggagaggacgccctgagtcgcatccaaaggctgatggccgagggtggaatgacagctgtggtgcagagggagcagtctactaccatggcctctatgggtggatttggaaataatatcatcgtctcccacagaatccataggagcagccaaacaggaactgaacctggggccgctcacacgtcatccccacaacccagcacctcccgtggcctactacctgaagcaggtcagctggctgagaggggcctgagtcctcggacggcaagttgggaccagccaggtacgcctggcagagagcctacacaaccgaccctgccaagcagctcgccggtgcctatacccgtctcactcccttcagcagagggacccacactgcactgcgaactgacaaacaataaccacctattggatgggggatccagccggggagatgcagccggcccccgaggcgagccgaggaaccgatag

SEQ ID NO: 180132 - DNA, 3897 bp, synthetic construct
  misc_feature 1..3897: note = Description of Artificial Sequence: Synthetic coding sequence
  source 1..3897: mol_type = other DNA
atgaaggtggtgcccgagaagaacgccgtgcggatcctgtggggcagagagaggggtgcacgcgcaatgggagcacagcggctcctgcaggagttagtggaagataagactcgatggatgaaatgggaaggcaagagagtcgaattacccgattcaccccggagcacctttttgcttgccttcagccctgacaggacactccttgcttctacccacgtgaaccacaacatatacatcaccgaagtgaaaaccgggaagtgtgtgcactcgctcatcgggcaccggagaacgccttggtgcgtaacattccatcccacaatttcaggtctcattgcgtccggctgcctcgacggtgaagtcagaatctgggatctacatgggggttccgagtcttggttcactgattctaacaacgctattgccagcctcgcctttcacccaactgcccagctgctcctgatagctaccgccaacgagatacacttttgggactggagccgccgtgaaccttttgccgtcgtgaaaactgcgagtgaaatggaacgggtgcgtcttgtgcgatttgatccactcggccattatttgttaacagccatcgtgaacccctccaaccagcagggcgacgacgagcctgagatccccattgatggcaccgagctgtcacactatcgccagcgggcactgctgcagtcacaaccggttagaaggacccctctgctgcacaatttcctgcacatgctctcaagccgcagctctggcattcaagtgggggagcaatcgacagtccaggattcagctacacccagtcctccccctcctcctccccagccttctacggagcgcccaaggactagtgcctacatccgacttcgacagcgagtcagttatccaacagcggaatgttgtcaacacctggggattttatgtctgtgctcccgatgtagcggaactcgagtgccttccctgctcccacatcaggactctgtgccacccgcttctgcacgcgccactaccccctctttcagcttcgtgcagaccgagccctttcaccctcctgaacaagcatcctctacccaacaggatcagggactactaaaccgtcctagcgctttttctacggtccagagcagcacggctgggaacacactgcgcaatctgagtctggggcctacacggcggtcattgggggggccactgtcttctcatccttcaagatatcaccgtgagatcgctccagggttaactggaagcgagtggacccgcaccgtgttgagcctgaacagtcggagcgaagcagagtccatgcctcctcctcggactagcgctagttcagtcagcctcttatccgtgttacgccagcaggaaggagggagccaggccagcgtgtatactagcgctaccgaaggaaggggatttcctgctagcggacttgctacggagtctgacgggggtaatggcagctcccagaacaatagtgggagcatccggcatgagttgcaatgcgacttgcgaaggttcttcctcgagtatgaccgccttcaggaactcgatcagtcactgtcaggggaggctcctcagacgcagcaagcccaagaaatgctgaataacaacattgaatctgaaaggccgggtccctcgcaccagccgacccctcactcctcagaaaataacagcaacctgtccagggggcatctgaacaggtgccgagcctgtcataatctgttgaccttcaacaatgatactttgaggtgggagaggaccacgcccaattattcttctggcgaggcctctagtagctggcaggtgccctcctcgttcgaatcagtaccaagctcgggttcgcaactgccccctttggagcgtaccgagggacagacaccttcaagcagtcggcttgaactgtcttcaagcgcgtcacctcaggaagaacgaaccgtcggtgttgctttcaaccaagagacgggccactgggagaggatctacacccagtcttcccgttctggtacagtcagccaggaggccctgcaccaggatatgccagaagaatctagtgaggaggatagtctccgccgacggctgctcgagtcctcactgattagtctgagcaggtacgacggtgcgggatctagggaacatcctatctaccccgaccccgctcgcctgtcccctgccgcgtactacgcgcaacgcatgatacagtatctctcaagacgcgatagcatccggcagaggagcatgcgctaccagcagaaccgcttgcgcagtagcacatcaagctcaagttcagacaaccaggggccctcagtggagggcacagatttggaattcgaggatttcgaagacaacggcgacagatccagacatcgggcaccccgaaatgctcggatgtccgctcccagcctggggcgtttcgtaccccggcgctttctgcttcctgagtatctgccttatgccgggatcttccatgagaggggtcagcccgggctggctacacattctagcgtgaacagggtactggcaggagcagttattggggacggccagtctgctgtggccagcaacatcgcgaatacgacctacagattacagtggtgggactttactaaattcgatttacccgaaatcagcaacgcatccgtgaatgtgctcgttcaaaattgcaagatctacaatgacgcaagctgtgacatttctgccgatggccagctgctagcagccttcattccctcctcccagcgggggtttcccgacgaggggattctggcagtgtattcactcgccccccacaacctgggggaaatgctatacacaaagagatttggccctaacgctatctcagtttccctgagtcccatggggaggtacgtaatggtgggcctggcgtctcgcagaatactgctgcacccttctaccgaacatatggtagcgcaggtgttcaggttgcagcaggcccatggcggggaaacatccatgcggcgcgtgtttaatgtgctctatcctatgccagccgaccaaagaagacacgtgtccatcaactcggcgagatggctgccggaaccaggcctcggcctcgcctatggcacgaacaaaggcgatctggtcatctgccgaccagaagccctaaattcaggagtggagtactattgggatcagctgaatgaaacagtatttaccgtgcatagcaacagtcggtcctcagaacggcccggaacgtcgcgcgccacttggagaaccgaccgcgacatgggactgatgaacgctataggtctgcagccgaggaatcctgccactagcgtaaccagtcaaggcactcaaaccctggccttacagcttcagaacgcagaaacccaaaccgaacgcgaggtgcctgagcccggcaccgccgcctctgggcctggagagggggaaggctctgagtatggcgcttctggcgaagacgctctgtctcggattcagcgactgatggcggagggcggaatgactgccgttgttcagagggagcagagcaccacaatggcgagcatgggtggcttcggaaataacattatagtgtctcataggattcacaggtcaagccaaacgggaactgagcccggagctgcccacacctcgagcccgcaaccctctacctcacggggacttctgcctgaggccggccagctggccgaaagaggcctgagcccacgaacagcttcgtgggatcagcccggtacgcccggccgggaacctacacagccaaccctgccatccagttctcccgttccaatccccgtcagtctaccgtccgccgaaggcccgactctgcattgcgaactgacaaacaataaccatttgttggacgggggatctagtagaggtgatgccgctgggcctaggggagaacctagaaacagatag

SEQ ID NO: 180133 - DNA, 75 bp, synthetic construct
  misc_feature 1..75: note = Description of Artificial Sequence: Synthetic coding sequence
  source 1..75: mol_type = other DNA
atgaaggtggtgcccgagaagaacgccgtgcggatcctgtggggcagggaaaggggagcgcgggccatgggatag

SEQ ID NO: 180134 - DNA, 3810 bp, synthetic construct
  misc_feature 1..3810: note = Description of Artificial Sequence: Synthetic coding sequence
  source 1..3810: mol_type = other DNA
atgaaggtggtgcccgagaagaacgccgtgcggatcctgtggggccgcgaaaggggtgcccgagctatgggcgctcagcgcctactgcaggagcttgtcgaggataagacccgttggatgaagtgggagggtaagagggtcgagctgcccgactcaccacgttcaacctttctgctcgcattttcgccagaccggacactgttggcctctacacacgttaaccacaacatttacataacagaagtgaagacaggaaaatgcgtgcattcacttatcggacatcgccgcacgccctggtgcgtcaccttccaccccacaatctctggactgatcgcatcagggtgtcttgatggcgaagtcagaatttgggatttgcacgggggctccgagtcctggttcactgacagtaataatgccatagcctctctggcattccaccccactgctcagctgctcctgatagcgacggctaacgagatccacttctgggactggagcaggcgagaaccatttgctgtggtgaagacagcctctgagatggagcgggtgagactcgttaggttcgatcccctgggtcactacctcctcaccgcaattgtaaatccttctaaccagcagggagacgacgagccagagatccccattgacgggactgaactcagccattaccgccagagagcgctacttcagagtcagcccgtcagacgtacccctctgctgcacaattttctgcatatgctgagctcacgctccagcggtatccaggtcggagagcagtctaccgttcaggacagcgcaaccccttccccaccccccccaccaccacagccttccaccgaacggccaagaaccagcgcttacattcggctcagacaacgcgtctcttatccgaccgcagaatgctgccagcatcttgggattttgtgtctctgcagccgttgttccggaacgcgcgtgccatctctgctgccacatcaggactccgttcccccagcttctgccagggccactaccccaagcttctcattcgtgcagacagagcccttccatccaccggagcaggcatcctccactcaacaagaccagggccttctcaaccgcccttctgcattttcaaccgtccagtcgtcaactgccgggaacactttaaggaacctgtcacttggtcccacccgcaggtctctgggaggacccctgtctagtcacccatcgcgttaccatcgcgagatcgctccaggtctgaccggttctgaatggactcgtacagtgctgagtctgaacagtaggagtgaagcagagagcatgccacctcctaggacttccgccagtagcgtgagcttgttaagtgtgctaaggcagcaggagggcgggtcccaggcatctgtttacacttccgccaccgagggtaggggcttccccgcctctggcctggccacagaaagtgatggaggaaatggcagcagtcagaataattccggctcaatccgccacgaactgcagtgcgatttgcgaagattcttcctggaatatgaccggctgcaggagctggaccagtccctgtcaggcgaagccccccagactcagcaggcgcaagagatgctaaacaacaacatcgagagtgaaagaccgggaccatcacaccagcctacaccgcactctagcgagaacaacagtaacctgtcccgggggcacttgaaccgctgcagggcctgccacaatctactcacttttaataacgataccttacgatgggaaagaacaacaccaaattactcctctggcgaggcaagcagttcttggcaggtgccgagtagttttgagtcggtgccttctagtggctcacaactcccccccctcgagaggacggaggggcagaccccctcctcctcccggctcgagctgagcagcagtgcatctccacaggaagagaggacagtgggggttgcttttaatcaggagaccggccattgggagcgtatctatacccagtcctccaggtcaggcacagtcagtcaggaagctttacaccaggacatgcctgaggagagcagtgaggaagactcccttcgcaggctgtcacccgcagcttactacgcccagaggatgattcagtacctttcccgccgcgattcgattcggcagcgctcaatgcgctaccagcaaaatcggttgcggtctagtaccagcagttcttcgtccgataaccagggcccatcagtcgaggggaccgatttagagtttgaagacttcgaggataacggagacaggagtcggcacagagctccacggaacgcaagaatgtctgccccttccctaggcaggttcgtgccccgaagatttctgttgccagagtacctcccttacgctggaattttccacgaacgagggcagcccgggctcgcaacccattctagtgtaaatcgagtgcttgccggggctgtcattggcgacggccagagtgccgtggcttccaatattgcgaataccacgtacagactgcagtggtgggactttacgaaattcgacttgcctgagatttccaacgcttcagtgaacgtgctcgttcagaattgcaagatttacaatgacgcctcctgcgatatctccgcagatggtcagttgctagctgcctttattccctctagccagagggggttcccggacgaggggatactggccgtctacagcctggcgccccacaatctgggggagatgttgtataccaaaagatttggtccaaacgccatcagcgtgtctctttccccaatgggacgctacgtcatggtcgggctggcctctcgtaggatactcctccacccttctacggaacatatggttgcccaggtgttccgcctccaacaggctcacggaggcgaaacatcaatgcgacgcgtgttcaatgtgctgtatcccatgccggctgaccaacgccgacacgtgtcaattaacagcgccaggtggctgcctgagcccggcttagggttagcctacggtaccaataaaggcgacctcgtcatctgtagacctgaagcactgaactcgggagtcgaatactactgggaccagctcaacgagactgtgtttaccgtgcacagcaattcgaggtcatcggagagacccggcacctctcgtgctacctggagaaccgatcgagacatgggattgatgaacgccattggtctccaaccaaggaatcccgccacaagcgtgacctcacagggcacccagactttggcactgcaactgcagaacgcagagactcagactgagcgcgaggtgcccgagccaggaacggctgcatccggtccaggcgagggagagggatccgagtacggcgccagcggcgaggatgccctgagtcgaattcagcggctcatggctgagggcggcatgactgccgtagtgcagcgagagcaatcaactactatggcttccatgggaggattcggcaataacataattgtttctcaccgaatccatcgcagttcccaaactggaactgaacctggggccgctcatacaagctctccccaaccctctacttcccgtggccttttgcctgaggcaggacagttggctgagcgaggattaagcccaaggacagcctcctgggatcagccgggcactcccgggcgagagcccacgcagccgacactccctagtagctcaccagttcccatacccgtgagtcttccctctgctgaaggccctacattgcactgcgagttaaccaacaacaaccatctcttggacggtggctcctctaggggcgatgctgctggacccaggggagagcctagaaacaggtag

SEQ ID NO: 180135 - DNA, 3717 bp, synthetic construct
  misc_feature 1..3717: note = Description of Artificial Sequence: Synthetic coding sequence
  source 1..3717: mol_type = other DNA
atgaaggtggtgcccgagaagaacgccgtgcggatcctgtggggcagggagcggggcgcaagggcgatgggcgcacagagacttcttcaggagctcgtggaggacaaaaccagatggatgaagtgggagggcaagcgagttgaactgccagattcacccagaagcacctttctgctggcattctcccctgatcgaacattgctcgcatctacccacgtgaatcataacatctacattaccgaagtgaaaaccggtaagtgtgtgcactctttaattgggcatagacggaccccgtggtgtgtcaccttccatcctacaatatcagggctgatcgctagtggttgtctcgacggcgaagtgcgtatctgggacctgcacgggggctctgaatcgtggtttacagactctaacaacgccattgccagtttggcattccatccgactgcacagctgctgctgatcgctacagccaacgaaatccacttctgggactggtcaagaagggagccgttcgcagtggtcaagacagcctccgaaatggagagagtgaggctcgtgcggttcgatccattaggccactatctactgaccgcaatagttaacccttcgaatcaacaaggagatgatgaacctgagattccaatcgatggaaccgaattgagccactaccgccagagagctctcttacaaagccagccagtgaggcggactccgttgctccataactttctgcatatgctcagttcccgttccagcgggattcaggtgggcgagcagtcaactgttcaagactctgccacacccagtcctcctcctcctccacctcaaccttctacggagaggcctcgcacaagtgcttacattcgcctgcggcagagggtcagttaccccacagcagagtgctgccagcacctgggtattctctgcctgtgttcacgttgctccggcacccgagttccctcacttctgccacatcaggacagcgtaccacccgcttcggcccgggcgacaaccccctcttttagttttgtccagactgagcccttccatcccccagaacaggcctccagcactcagcaggatcagggattattgaatagaccttccgcattcagcactgttcaaagtagtaccgccggaaacaccttaagaaatttgagcctcgggcctacaagaagatcacttgggggcccactgtcctctcacccttcccggtaccacagagagatagccccaggcctgaccggctctgagtggacccgcaccgttctctctctgaactctcggagtgaggcagagagcatgccccccccacggacaagcgcaagcagcgtctctttgctgtctgtcctgaggcagcaagagggtggctcccaagctagtgtctacaccagcgcaaccgaagggcgcggattccctgccagcggtctggcgaccgagtccgatggcggcaacgggtcttctcagaataatagtgggtccattagacacgaactccaatgcgacctgcgcaggtttttcctagaatatgaccggctgcaagaactggatcagtccctttcaggtgaagcccctcagacacagcaagcgcaagagatgctgaataacaatattgagagcgagcgaccaggcccgtctcaccagcccaccccccactcatctgaaaataattctaatttgtccagaggccacctgaatcggtgcagagcctgtcataacctccttaccttcaataatgatactctccgatgggaacggaccacgcccaactactcctcaggcgaagcaagttcctcctggcaggtcccaagttccttcgagtccgtgccaagtagcggctctcagctccctcccctcgagagaactgaagggcagaccccctcatctagtcggttggaactctctagttctgcctcgccacaagaggaacgtacagttggagtggcctttaatcaagagaccggtcactgggaaagaatatatacccagtcatccagatctgggacggtttcacaggaagccttgcaccaggatatgcccgaggagagctcggaggaggattccctccgacgccgcctgttagaaagctctctgatcagcctcagcaggtacgacggggccggaagcagggaacaccccatctatcctgaccccgccagagataacggggaccgctctcgccatagagcaccaagaaacgcccggatgagtgcaccttctctcggcagatttgtgccaagacgttttcttctgccagagtacctgccatacgctgggatatttcatgagaggggtcagcctggtctggctactcacagttcagtgaaccgcgttctggctggcgcggtgattggtgacggccaaagcgccgtcgctagcaatatcgccaacacgacgtacaggcttcaatggtgggattttaccaaatttgatctccccgagatcagcaatgcctccgtcaacgtgctggtccagaattgtaagatctacaatgacgcatcttgcgatatcagtgctgatggacagttgctggcagccttcatcccatcttcccagagaggtttccctgacgagggcattctggccgtttacagtctggcacctcacaacctcggggagatgctgtataccaagcgatttggccctaatgccatcagcgtctcattatctccaatggggaggtacgtgatggtggggctggccagtcgcaggattctcctccatccgagcaccgagcatatggttgcacaggtctttcggcttcagcaagcacatggaggtgagacttccatgcgacgggttttcaacgtgctgtatcctatgccagctgatcagaggaggcacgtgagcatcaattccgccagatggctgcctgaacctggcctcggtctcgcgtacggtacgaacaagggagatttggtcatctgtaggccagaggcactgaatagcggagttgagtactattgggaccagcttaatgaaaccgtttttaccgtccatagtaatagcaggtcatctgaacgcccaggaaccagtcgggccacctggagaaccgacagggatatgggtctgatgaatgctattggcctgcagccccggaaccccgccacaagcgtcacttcccagggcacacagaccctcgccctgcaactgcaaaatgctgaaacccaaacagaaagggaagtgccagagccaggaaccgccgcgtccggtccgggggagggagagggaagcgaatacggggcatctggtgaggatgctctgtcacgaatacaacgccttatggcagagggcggaatgaccgccgtcgtgcagcgagagcagagcacaacaatggcctcaatgggcggtttcggcaataacattatcgtttctcataggattcatcgctccagccagaccggcacagagcctggagccgcacacacctcgagcccacagccatcaacatccagagggctgttacctgaggctggccagctggcagaaagagggctgagcccccggacggcatcatgggatcagcctggcactccaggacgagagccaactcagcccacactgccgagttcatctcctgtgccaatccccgtatcgcttccttccgccgagggacccacgctacattgtgagctcaccaataataaccacctattggatgggggctcttcaaggggagacgccgccggtccacgcggtgaacctagaaaccggtag

SEQ ID NO: 180136 - DNA, 3540 bp, synthetic construct
  misc_feature 1..3540: note = Description of Artificial Sequence: Synthetic coding sequence
  source 1..3540: mol_type = other DNA
atgaaggtggtgcccgagaagaacgccgtgcggatcctgtggggcagggagcgtggcgccagagcaatgggggcccagcggctccttcaggagttggtggaagacaaaaccaggtggatgaagtgggaaggaaaacgggtggagctcccagactcaccacgatccaccttcctgctggcattctctcccgataggacattgctcgccagtacacacgtgaatcataatatatacatcactgaggttaagactggaaaatgtgtgcacagcttgataggacacagaaggaccccatggtgcgtgacttttcacccaacaataagtgggctcattgctagtggatgcctcgacggcgaagtgcgcatctgggatctacatggtggatcagaatcgtggttcacagacagtaacaatgcaattgccagtctagctttccacccaaccgcccagctcttactgatcgcgaccgcaaatgagattcatttctgggactggtcccggcgggagccgtttgctgtcgtaaagacagccagtgagatggaacgcgtgcggttggttagatttgatcctctcggtcattacctgctgacggcaatagtgaatccatcaaaccagcagggggacgatgagccggagatcccgattgatgggacagagctatctcactaccggcagcgagccctgctgcaatcccagccagtgcgacggacccccctgctgcacaatttccttcacatgctcagcagtagaagtagtggcattcagactgagccctttcatcccccagagcaagcgagttccacacagcaggaccaagggctcctgaaccggcccagcgccttttctaccgttcaatcatctaccgctggtaacacccttaggaacctatccctggggcctacgagacgcagtctgggcgggccccttagcagccatcctagccggtaccatagggagatcgcgccagggcttactggtagtgagtggacacggactgttttgagcttgaactcaagaagtgaagctgagagcatgccaccgccccgaacttctgccagttccgtgtctttgctgagcgttctgcgccagcaggaaggaggttcccaagcctccgtgtatacgagtgctacagagggaagagggttccccgcctccggccttgccacagagagcgacgggggaaatggaagctcccagaataattcaggttcaatccggcacgaactgcagtgtgatctccggcgcttctttctagaatatgacaggctgcaggaacttgaccagagtctaagcggcgaagccccgcagacccagcaggcacaagaaatgttaaacaacaatatcgagagcgagaggcccggtccctcccaccagcccacaccacactcttccgagaataattccaatctcagtagagggcatctgaacagatgtagagcgtgccacaaccttctgactttcaacaatgatacgctgcgctgggaacgtaccacccctaactactcgagcggggaagcaagttcctcctggcaagttcccagcagctttgaatctgtgccctcatccggttcccagctcccccccttggaacgtacagagggccagactccctctagctctcggctcgagctgtcttcttccgctagcccacaggaggaacgaacagtgggcgtggcttttaaccaggagactggacactgggagaggatctacacacagtctagccgcagcggcacagtgtcccaagaagctttgcaccaagacatgcctgaggagagctcagaagaagactccctccgacgcctctcccctgcggcgtattatgcccaacgcatgatacagtacttgtcccggagagatagcatccgccaacggtctatgagataccagcaaaatcgcttgcggtcatccacatcttcttcatcctccgacaaccagggcccatcagtggagggcacggatttggagtttgaggactttgaagacaacggcgatagatcacgccaccgggctccacggaacgctaggatgagtgccccttctctgggcagattcgtgcctcgtcggtttctgctaccggaatatcttccgtacgccgggatctttcatgagcgcggacagccaggcctggctacccattccagcgtaaaccgagtgctggcaggtgcagtcattggagacggacagtcggccgtcgccagcaacattgctaatacgacctatcgactccagtggtgggattttaccaagtttgatctcccggaaatctctaacgcttctgttaacgttctcgtccagaactgtaaaatctacaacgatgccagctgcgatatatcagctgatgggcaactcctcgctgcgttcatcccttcctcacaaagaggcttccctgacgagggtatactggctgtgtatagcctggccccgcacaatttaggcgagatgctttacaccaaacgatttggcccgaatgccatcagcgtttcgctgtcaccgatggggcgatatgtgatggttgggttggcttccagacgaattctccttcacccgagcacggagcatatggtggcacaggtattcaggctccaacaagcccatggcggcgaaaccagtatgcgtcgagtctttaatgttttgtaccccatgcctgcagatcagcggaggcacgttagcatcaatagcgccagatggcttccggagccaggcctcgggctcgcatacggaacgaacaagggcgacctggtgatttgccggccagaagcattgaatagcggtgtggagtattattgggaccagctgaacgaaacggtgttcactgtgcattctaattctaggtcctccgagcgtcccggcaccagtagggctacctggagaacagatcgggacatggggttgatgaatgcaattggcttacagcctcgtaatcctgccacttccgtgacttctcagggcacacagacgctcgcattacagcttcagaacgccgagacccagactgaacgggaggtgccggagcccggcacagcagcttccggccccggagagggcgaagggtccgaatatggtgcatccggcgaggacgctcttagccgtattcaaaggctaatggcagagggcggtatgaccgcggtggtgcagcgggagcaaagtaccaccatggcgagtatgggtggattcggcaacaacatcattgtctctcaccgaatccacaggtctagtcagaccggtacggaacctggggcagcacacactagcagcccacagccctccacttccagaggccttctgcctgaggctgggcagctcgccgagcgggggctgagccccaggactgcaagttgggaccagcctggcactccaggcagggaacccacacagcccactctgccttctagttcccccgtccctattcctgtgagcttaccttcagctgagggcccaacgctccattgcgagctgactaacaacaaccacctgttagacggtggaagttcacgcggcgacgccgcaggtcctcggggagagccacgcaacagatag

SEQ ID NO: 180137 - DNA, 1947 bp, synthetic construct
  misc_feature 1..1947: note = Description of Artificial Sequence: Synthetic coding sequence
  source 1..1947: mol_type = other DNA
atggagaaggcccggcggggcggcgacggcgtgccccggggccccgtgctccatatcgttgtcgtgggctttcaccacaaaaaaggatgtcaggtcgagttcagttatccacccctgattcccggagatggtcatgatagccacacactgccagaagaatggaaatacctcccctttctggccctgcctgacggagctcataattatcaggaggatacggtgttcttccacctaccgcccagaaatggaaatggcgccaccgtcttcggtatctcatgctatagacagattgaagccaaggccctgaaagttaggcaagccgacattacccgagagacggtgcagaaaagcgtgtgcgttctctcgaagttgcctttgtacggactgcttcaagcaaagctgcagctgatcacccacgcttacttcgaggagaaggatttcagccagatcagcattctcaaggagttatacgagcatatgaattccagcctgggaggcgcgagccttgaggggagtcaggtgtacttgggactttcccctcgggatcttgtgctgcacttccgtcacaaagtgctgatcctgtttaagttaattctcctggagaagaaggtcttattctacattagccctgtaaacaagcttgtcggggccctaatgacagttctcagcctattccctggcatgatcgaacacgggttaagtgattgctcacagtaccggcccagaaagtccatgagcgaggacggcggcttgcaggaaagcaatccctgcgctgacgacttcgtgagcgccagcaccgccgacgtgtcacatactaatctcggcactatcagaaaggttatggctgggaatcacggggaggacgcggccatgaagacagaggaacctctcttccaggtcgaggacagcagcaaaggccaggagcccaacgacacaaatcagtacttgaagccgccttcacgtccctctccggatagctcggagtccgattgggaaactctggaccctagcgtcctggaggaccccaatttgaaagaacgtgagcagctgggctcggatcaaacaaacctgttccccaaggatagtgtgccctctgaatctctgcccataaccgtccagccccaggccaacaccggacaggtggtgctgatacctgggttaatctcaggccttgaggaggatcaatatggcatgcccctggcaattttcactaaagggtatctgtgcctcccatatatggcactgcagcaacatcatctgctttccgatgtcactgtcagaggtttcgttgccggggccacaaacatattatttcgacaacagaagcacttaagcgatgccatagtggaagttgaagaagccctgatccagattcatgacccagaactgagaaaactcctcaatcctaccacagcagatttgcgttttgcagattacctcgtgcggcacgtgaccgaaaaccgtgacgacgtgttcctggacggcactggatgggaaggaggggacgaatggatccgtgctcaatttgctgtgtacattcatgcactgttggccgcgactttacagctggataatgagaaaatactctccgattacggcacgacattcgtaacagcttggaaaaatacccacaattatcgggtgtggaatagcaacaagcatccggctctggctgagatcaaccctaaccatccctttcaaggtcaatactccgtgtccgatatgaaactgcgcttctctcactcagtccagaacagtgagagaggcaagaaaattggcaatgtgatggttacaacctcacggaacgtggtgcagacaggtaaggctgtgggccagtctgtgggcggtgccttcagcagcgctaagaccgcaatgtcctcctggctgagtacattcaccacaagcacgtcccagagcctgacggaaccccctgatgaaaagccctag

SEQ ID NO: 180138 - DNA, 1773 bp, synthetic construct
  misc_feature 1..1773: note = Description of Artificial Sequence: Synthetic coding sequence
  source 1..1773: mol_type = other DNA
atggagaaggcccggcggggcggcgacggcgtgccccggggccccgtgctccacatcgtggtggtcggcttccatcacaaaaagggctgtcaggtggagttctcctaccccccactcatacctggtgacggtcatgactcacacaccctgcctgaggaatggaagtatcttccatttcttgcactgcctgatggagcccataactaccaggaagacacggtattctttcacctccccccaaggaatggaaacggagcaaccgtattcggcatatcatgctacagacagatagaagctaaagctctcaaagtcagacaggccgacatcaccagggagacagtccagaaaagcgtgtgcgtgctctctaaactgcctctgtatgggctgctgcaggccaaattgcagttgatcactcacgcttactttgaagagaaagacttttcccagatctctatactgaaggaactgtacgagcatatgaatagctctctaggaggcgcaagcctcgagggatctcaggtttatctggggttgagccccagggacctggtgctgcatttccggcacaaggtactgatattattcaagctaatcttgttggagaaaaaagtcttgttctacatttctcctgttaataagctggttggcgcccttatgaccgtcttgagcttgtttcccgggatgatcgagcacggcctgtccgactgcagccagtacaggcccaggaaaagcatgagtgaagatgggggcctacaggagtccaacccgtgcgctgacgacttcgtgtcggcatcaaccgccgacgtcagtcacaccaatctgggaactattagaaaggttatggccggcaatcacggcgaggatgccgctatgaagaccgaggaacctctgtttcaggtggaggattcttctaaaggacaggagcccaatgacactaatcagtatttaaaaccaccatcgcgaccctccccggacagtagtgagagtgattgggaaacgctagacccatctgtcctcgaagacccgaacctgaaagaacgggaacagctgggttcagaccaaacaaatttgttccccaaagatagtgtccccagcgaatccctcccaataacagttcagccacaagcaaacacgggccaggtcgtcctgatcccaggactgataagtgggttggaggaggatcagtacggcatgcctctggccatcttcaccaaaggctatctgtgccttccctacatggcgttgcagcaacaccacctcctgtccgatgtcactgtgcggggattcgtcgctggagccacgaatattctgtttcgtcaacagaaacacctttctgatgccatagtggaagtggaagaagctctcattcagattcatgaccctgaactccgcaagctgttgaatcccactacggctgatctcaggttcgctgattacctggtgcgccacgttacagaaaaccgagatgatgtgttcctggatggcacaggatgggagggcggagatgagtggattcgggctcagtttgctgtttacatccatgctctgctagctgctactttgcagctagtgctcttcagaatcgttaacgtgaagaagatcggaaacgtaatggtgaccacatcacgcaacgtggtccagactgggaaagccgtcggccaaagcgtgggaggagcctttagttctgcaaagactgctatgagcagttggttgtccacattcacgaccagcacatcccagagcttgacggaaccgccagacgagaagccgtag

SEQ ID NO: 180139 - DNA, 1392 bp, synthetic construct
  misc_feature 1..1392: note = Description of Artificial Sequence: Synthetic coding sequence
  source 1..1392: mol_type = other DNA
atggagaaggcccggcggggcggcgacggcgtgccccggggccccgtgttgcacatagtggtggtcggattccatcacaagaaaggctgccaggtcgagttcagctacccaccccttattcctggagacgggcacgattcccatactctcccagaagagtggaagtacctaccctttctcgctttacctgacggggctcataattatcaggaggacactgtgtttttccacctgccgcccagaaacggcaatggcgccactgtgttcggaatctcttgttaccgccagattgaggctaaggcgttgaaggtgagacaggccgatattacccgcgagacagtgcagaagagcgtttgtgttctgtccaaactcccactctatggacttcttcaagcaaaattgcaattaatcacacacgcttattttgaggagaaggacttttcacagattagtatcctgaaggaactgtacgaacacatgaattcgtcccttgggggagcatctctggaggggagccaggtttatctgggcctgtctccgagagatctggtcttacacttccgccataaagtgttgatactcttcaagttaatcctgttggaaaaaaaggtgcttttttatatttctccagtgaacaagctagtgggcgcattgatgactgtgctgtccctctttccagggatgattgaacatggtctgtcagattgtagccaatatcgaccaagaaagagcatgtccgaggacggaggcctgcaggagtctaatccctgtgccgacgattttgtttcagcctcgactgcagatgtctcccataccaacctcggaacaattcgcaaggtaatggctgggaaccatggggaagatgccgccatgaagaccgaggagcccctatttcaagtggaagactctagcaagggtcaagagcccaacgatactaatcagtacctaaaacctccctctaggcccagccccgatagcagcgagagtgactgggagaccctcgacccatctgttctagaagacccaaatctgaaggaaagggagcagctgggatctgatcagacaaacttgttccccaaagattcagtgccgtccgagtctttacctatcaccgtccagccacaggccaacactggccaggtggttctcattcctggcctgatctccggccttgaagaagatcagtatggaatgccactggccattttcaccaagtgcacgcaggatgtgctgccgcaggccaaccatagtttcaagtttcttattacagatagacggattacaccaagacccctgcggaggcgtctagtttcagccacactgaccaacatgctccaggagaagtcttgctggaagaaacatatcaagtgtcggaggcgcgtacaaaaatag

SEQ ID NO: 180140 - DNA, 2532 bp, synthetic construct
  misc_feature 1..2532: note = Description of Artificial Sequence: Synthetic coding sequence
  source 1..2532: mol_type = other DNA
atgagcagcgccatgctggtgacctgcctgcccgaccccagcagcagctttagggaggatgctccgaggccgccagttccaggagaagagggcgagaccccgccgtgccagccgggcgtgggcaaagggcaggtgacaaagcccatgcctgtgtcttccaacacgagaaggaacgaggatggcctgggagagccggagggcagagcctcccctgactcccccttaacaagatggaccaagtctctgcattcactattgggagaccaggatggagcctaccttttccgaacatttctggagagggaaaagtgtgtggacactcttgacttctggtttgcttgtaacggctttcgtcagatgaatctcaaagatactaagaccctgcgagtggcaaaagccatttacaaacggtatatagagaataatagcatcgtgtcaaagcagctgaaaccggcaactaagacatacatccgagacgggattaagaagcagcaaatagattctattatgtttgatcaagctcagactgagattcagagcgttatggaggagaatgcttatcagatgttcctgacctccgacatttatttggagtacgtccgatctggaggcgaaaacacagcatacatgtctaatggaggtctggggagtctcaaagtggtctgcggttacctccctacactaaacgaagaagaggagtggacctgtgcagactttaaatgtaaactgtcgccgaccgtcgttgggttgtcttcaaaaaccttgcgtgctaccgcaagcgtgcgaagtacagaaactgtcgactctggatatcgttctttcaagcgatccgatcccgtcaacccttaccatatcggctctggttatgtgttcgcccccgccacctccgccaacgactcagagattagctccgacgcccttaccgacgatagtatgtcgatgaccgactctagcgtggacggcatccctccctatcgcgttgggagcaagaagcagctacagagggaaatgcatagatcagtgaaagctaacggacaggtgtcgctgcctcacttcccgcgcacacacaggttgcccaaagaaatgacccccgtggaaccagctacttttgccgcagagctgatcagccgtctggagaaactgaaactggagctagaatctagacactctctggaggaacgcctgcagcagatcagggaggatgaggaaagggagggcagtgaactgactttaaattcccgcgagggcgctcctacccagcaccccctctctctgctgccatcagggtcatacgaggaggaccctcagaccatcctcgatgaccatctatccagggtgttgaagaccccagggtgtcaatctccgggggtgggccggtactccccgagatccagaagccctgaccatcatcatcatcaccactcgcagtaccactctttactaccccctggcgggaaactgccacccgccgccgcctccccaggagcttgtccactcttaggcggaaaaggatttgttaccaagcaaactactaagcatgtgcaccaccactacattcatcatcatgctgtgccaaaaacgaaagaggagatcgaagccgaggcaacacaaagggtccactgtttttgcccgggaggctcggagtactactgctactccaagtgcaagtcgcacagcaaagccccagaaaccatgcctagcgagcagttcggaggctcacggggctcaacactcccaaagaggaacggaaaggggacggagccgggtttggctctgccagctagggaaggcggggcccctgggggcgccggcgccctccagctcccgcgagaagagggcgataggtcccaagacgtgtggcagtggatgctggagtctgagcgacagagtaaacctaaaccacacagtgcccagtctacaaagaaagcttatccattagaatctgccagatcaagcccaggagagcgagcttcaagacatcacctgtgggggggaaattccgggcacccccgtactactccaagagcacatctgttcactcaggaccccgcaatgccacctcttaccccacctaatacattagctcagcttgaagaggcttgtcgcagactcgctgaggtttctaagccaccaaaacagcgatgttgcgttgcttctcaacagcgggacaggaatcattcagcgaccgtccaaacaggggccactcccttttctaaccccagcctggctcctgaggatcacaaggagcccaaaaaacttgccggagtgcacgcactgcaagctagcgaactggtcgtgacctacttcttttgcggcgaagaaatcccttacagaagaatgctgaaagcacaatcgctgactctcgggcattttaaggaacagttatcaaagaagggtaactatcgctattatttcaagaaggcaagcgacgagttcgcctgcggggctgtcttcgaagagatctgggaagacgagactgtcttgcccatgtatgagggcaggattttgggtaaagtggagcggattgactag

SEQ ID NO: 180141 - DNA, 2337 bp, synthetic construct
  misc_feature 1..2337: note = Description of Artificial Sequence: Synthetic coding sequence
  source 1..2337: mol_type = other DNA
atgagcagcgccatgctggtgacctgcctgcccgaccccagcagctctttccgtgaggacgccccacggcccccagtccctggagaggagggtgaaactcccccctgtcagccgggcgtaggcaaggggcaagtcaccaagcccatgccggtaagctctaatactcgcagaaatgaggacgggctgggcgaacccgaaggcagggccagccccgattcacccctgacgaggtggacaaagagccttcattccctcttgggggaccaggacggagcctacttattcagaactttcttagaacgcgagaaatgtgtggatacactcgatttttggtttgcatgtaatgggttcaggcaaatgaacctcaaagataccaagacccttcgcgtcgcgaaggccatatacaagagatacatcgagaataatagcatcgtatctaagcagctgaaacctgcgaccaagacctacattagagatgggatcaaaaaacagcagattgacagtattatgttcgaccaggctcagaccgagattcaatcggtgatggaagaaaacgcgtaccagatgttcctgacctcggatatttacctggagtacgttagatctggcggagaaaatactgcctatatgagcaacggaggtttgggcagccttaaagtagtgtgtgggtacctcccaactctgaacgaagaagaagaatggacctgtgccgacttcaagtgtaagctttccccgaccgtggtgggcctcagctccaagactctaagagccacggctagcgtgcgctctacagaaaccgtggacagtggctaccgctcatttaagcgcagtgatcctgtcaatccgtatcacattgggtccgggtatgtttttgctccggcaacatcagccaatgatagcgagatctcaagcgatgcattaacagatgacagtatgtcaatgacagattccagcgttgacgggatccccccttatcgtgtgggctctaaaaagcaactgcagcgcgagatgcacagatctgtgaaggcaaacggtcaggtgagcttgcctcacttccctagaacacacagactgccaaaagaaatgaccccagtggagccagcgacttttgcagctgaactgattagcagactcgagaagctgaaactcgaattagagtcacgccactccctcgaagaaaggctgcagcagattcgagaggacgaagaaagggaggggagcgagctcaccctcaattcacgcgagggagcgcccacacagcaccccctgtcactgctcccatcaggcagctacgaggaagacccacagaccattctggatgatcatctctctagagtgctaaagacacccggctgccagagccctggggtgggccgctatagccctaggagtaggtctcctgaccatcaccaccaccatcattctcaatatcattcgctgctgccaccaggtggaaaactgccccccgctgctgctagtccgggagcgtgtccgctattgggaggaaagggatttgttaccaagcagactactaaacatgttcatcaccattacatacatcaccatgccgtgcccaaaaccaaagaggaaatcgaggctgaggcgactcagcgggttcattgcttttgtcctggcggatccgagtactactgctatagtaagtgcaaatcccacagtaaggcccctgagaccatgcccagcgaacagtttggggcacagagcacaaagaaggcctatcctctggaatccgctagatcttcaccgggtgaacgcgcttccaggcatcacctgtggggagggaatagcggccacccacgaactaccccccgggcccacctgtttacccaggatccggctatgcccccactcacacctccgaatacattggctcagctggaggaagcctgccggaggcttgccgaggtctcgaaacctccaaaacaacgctgctgcgtcgcctctcagcagcgagacagaaatcatagcgctaccgtacagactggagcaacaccattcagcaatccttcactcgccccagaggaccataaagagcccaaaaaactggcaggagttcatgccttgcaggcctcagaactggtggtcacatacttcttctgtggggaggagattccctatcgacgtatgctcaaggctcagtcattgaccctaggacactttaaagagcagctgtcaaaaaaaggaaattaccggtattattttaaaaaggcctcggacgagtttgcgtgcggcgccgttttcgaagagatctgggaagatgaaacagtgctgcccatgtacgaaggacggattctaggaaaggtggaaagaatcgactag

SEQ ID NO: 180142 - DNA, 483 bp, synthetic construct
  misc_feature 1..483: note = Description of Artificial Sequence: Synthetic coding sequence
  source 1..483: mol_type = other DNA
atgagcagcgccatgctggtgacctgcctgcccgaccccagcagcagctttcgcgaagatgctcctaggccaccagtgcctggggaagaaggtgaaaccccaccttgccagccaggcgtgggaaaaggccaagtgactaaacccatgccagtgagctccaacaccagacggaacgaagacggattaggcgaaccagaggggagagccagtcctgatagtcccctgacccgctggaccaaaagtctacattccctgctaggagatcaggacggtgcttatttatttcgtacttttctggagcgcgagaaatgtgtcgacacactcgacttctggttcgcttgtaatggattcagacaaatgaacctcaaggatacaaagactttgcgcgtcgtgaacgacttctgccacgacatactcttctatttgtattgcaagctctgcatcataaagtctagttttaaggagaattacttggttcagtag

SEQ ID NO: 180143 - DNA, 921 bp, synthetic construct
  misc_feature 1..921: note = Description of Artificial Sequence: Synthetic coding sequence
  source 1..921: mol_type = other DNA
atgagcgaggtgacccggagcctgctgcagcggtggggcgccagcttccgacgcggtgcggactttgatagttgggggcaactggtcgaggctattgatgaataccaaatacttgcccgacacctccagaaagaggcccaggctcaacacaacaactctgagttcaccgaggagcagaaaaagaccatcggaaaaattgctacttgtcttgagctgcgttccgccgccctccagagtacacaaagtcaagaggagttcaagcttgaggatctgaagaagctagaacctatcctgaagaatatcctcacttacaataaggaatttcctttcgacgttcagcctgtaccgctaaggcgcatactggccccaggggaggaggagaatcttgagttcgaagaggacgaggaagaaggaggggcgggtgctggcagccccgactccttccctgctcgggttcccggtaccctcctgcctagactgccctccgaaccaggcatgacactactgacaatcagaattgagaagatcggcctgaaggacgccggccagtgcatcgatccgtatattaccgtaagcgtaaaggacctcaatggcattgatcttactccagttcaggatacgcctgtggcttcccgcaaagaagatacatatgtgcattttaacgtggatattgaactccagaaacatgtggaaaaactgacaaagggtgccgcgatttttttcgagtttaagcattataaaccaaaaaagcggtttacttctacaaaatgttttgcttttatggagatggatgaaattaaacccggacccatcgtgatcgaactttataagaagccaacagattttaagcgtaagaaactccaacttctgactaagaagcccttatacctgcacctgcaccaaacactccataaggagtag

SEQ ID NO: 180144 - DNA, 675 bp, synthetic construct
  misc_feature 1..675: note = Description of Artificial Sequence: Synthetic coding sequence
  source 1..675: mol_type = other DNA
atgagcgaggtgacccggagcctgctgcagcggtggggcgccagctttaggaggggtgcagacttcgactcatggggtcaactcgtggaagctatcgatgagtaccaaatcttagcccgacacctccagaaagaagcccaggcccagcacaataactccgaattcacagaggagcagaaaaagactattggtaaaattgctacctgcctggagctgcggtctgctgccctccagagtacccagtcccaggaggaatttaaacttgaggatctgaaaaaactcgaacccatcctgaaaaatattcttacctacaataaagagtttccattcgatgtgcagcctgtgccactgagacgaattcttgctcccggagaggaagaaaacctggagtttgaagaggatgaggaggagggaggagcaggagccggatctcccgattcctttccagcccgcgttcctggggccgcgatcttctttgaattcaagcactataaaccaaaaaaaagattcacaagcacgaagtgctttgcctttatggaaatggatgaaatcaaaccaggtccaatcgttatcgaactatacaaaaagcccaccgatttcaagcggaaaaagctgcagctgctcactaaaaagcccttatacctccacctgcaccagactctgcacaaggagtag

SEQ ID NO: 180145 - DNA, 849 bp, synthetic construct
  misc_feature 1..849: note = Description of Artificial Sequence: Synthetic coding sequence
  source 1..849: mol_type = other DNA
atgatcgccaccgaggccgtggtgcgggccgcccagggcctggcccgtcatctccagaaggaggcccaggcccagcacaacaatagtgagtttacagaggagcagaagaaaacgatcggcaaaatcgctacctgcctggaactgcgctccgcggcacttcaaagcacacagagccaggaagaatttaagttagaagaccttaaaaagcttgaacccattcttaaaaatatcctgacctataataaagagttcccatttgatgtgcaaccggtcccattgcggagaattttagctcctggcgaagaggagaatctggagttcgaagaggatgaggaagaaggcggggcaggagcagggagcccagactccttccctgctcgtgtcccaggcacgctgttacccagattgccctccgagcccggcatgactctgctgaccattcggattgaaaagatcggcctcaaagacgccggccaatgcattgacccatacattaccgtaagtgtcaaggacctcaatggaatcgaccttacccccgtgcaggacacccctgttgcatcaaggaaagaggacacctatgttcatttcaacgtggatatcgaactgcaaaagcatgtggagaaactcacaaaaggggcggccatctttttcgagtttaagcattacaaacctaaaaagagattcacaagcactaaatgctttgcctttatggagatggatgaaattaaacccggccctatcgtgattgaactgtataaaaagcctacggacttcaagaggaagaagctccaattacttacgaaaaaacctctttatttgcatctgcaccagacgctccataaagagtag

SEQ ID NO: 180146 - DNA, 2685 bp, synthetic construct
  misc_feature 1..2685: note = Description of Artificial Sequence: Synthetic coding sequence
  source 1..2685: mol_type = other DNA
atggcctggcggtgcccccggatgggccgggtgcccctggcctggtgcctcgccctttgtggctgggcttgcatggcaccaaggggaacccaggcagaagaatccccttttgtcggcaatcccggcaacatcaccggtgcacgaggcttgacaggtactctgagatgccagcttcaggtacaaggagaaccacccgaggtgcactggttacgcgacggtcagattttggagctggcagattccactcagactcaggtacctttaggggaggatgaacaggacgattggatagtggtaagtcagttgcggataacctcacttcagctgagtgatacaggtcagtatcagtgtcttgtgttcttgggccatcagacgttcgtatcccagccgggctacgtgggattggaaggattgccctattttttggaagagccagaggatcgcaccgtggccgccaatacacccttcaatttgtcctgccaggcacaggggccccccgaacccgttgatcttctctggctgcaagacgccgtcccccttgcaacagcccctggacatggaccacagagatctcttcacgtgccgggactcaacaaaacatccagtttctcctgtgaggctcataacgctaaaggtgtgaccacctctcgtactgccaccatcacagttctcccccagcagccgcgtaacctgcatctggtatctcgccagcctacggagttggaagtcgcatggaccccaggcctgagcggaatttatcccctcacacactgcaccctgcaggccgtcctgagtaacgacggcatgggcatacaagccggggagcctgatcccccagaagaaccgctgacaagccaagccagcgtgccgccccaccagctgagactcggctctctgcaccctcataccccctaccatattagggtcgcttgcacctctagccaggggccaagctcatggacgcactggttgccggtcgaaacacccgaaggagtgcccctcgggccccctgagaacatttcagctacccgtaacggatctcaggcgttcgtgcattggcaggaaccccgcgcccctctgcagggtacccttctgggctaccggctggcctatcaggggcaagatacgcccgaggttctgatggatattgggttgcggcaagaggtcacgttagagctccagggcgacgggagtgtctcgaatctgactgtgtgcgtggctgcttatacggctgccggtgatggcccttggagcctccctgtccctttagaagcttggcgcccaggccaggctcagcccgtccaccaactggtaaaggagccttcgaccccggctttttcgtggccgtggtggtatgtcctgctgggcgccgtcgtggcagctgcatgcgtgctgattctggctctgtttctggtgcaccggcggaagaaagaaacaaggtacggggaggtcttcgagcccactgttgagcggggcgaactggtcgtgaggtacagggtgaggaaaagctatagtaggcgcacgactgaagccactctgaacagtcttggaatctcagaagagttaaaggagaagttgagggatgttatggtggatcgtcacaaagtggctttggggaagacgctcggggagggcgaattcggagctgttatggagggacagcttaaccaggatgatagtattctgaaggtggcagtgaagaccatgaaaattgccatctgtactcggtcggagctggaggacttccttagcgaggccgtgtgcatgaaagaatttgatcacccaaacgtaatgaggctcatcggcgtatgtttccaaggatctgagcgggaaagtttcccagcccccgtagtgatactcccattcatgaagcatggagacttacactccttcctcttgtactcccggctgggagaccagcctgtgtacctaccaactcagatgctagtcaagtttatggcggacatcgcttccgggatggagtatctaagtactaaacgcttcattcaccgtgatctagctgccaggaactgcatgttgaacgaaaatatgtcggtttgcgtcgcagattttggactctcaaaaaagatctataacggagattactaccgtcagggccgcatcgccaaaatgccggtgaaatggatcgccatagaatcgctggccgatagagtttatacctccaaatctgatgtgtggtcgttcggggtaacaatgtgggagatagcaacacgaggccaaaccccctaccctggggtggaaaattctgaaatttatgactatctccgtcagggaaataggctcaaacaacctgctgactgcctagacggcctttacgccctgatgtcaagatgctgggaattgaacccccaggatcgcccttcctttaccgagcttagagaggatctcgagaacacgcttaaagccctaccacctgcccaggagcccgatgaaattctgtacgtcaacatggatgaaggaggcggatatcccgagcctcctggtgccgccggcggcgcagacccaccaacacaaccagacccgaaggacagctgctcttgtctaactgctgcggaggtccatcccgctggaagatacgtcctatgcccatcaactacaccttcacctgcccagcctgctgatagaggctcaccagcggcacctggccaagaagatggggcatag

SEQ ID NO: 180147 - DNA, 2658 bp, synthetic construct
  misc_feature 1..2658: note = Description of Artificial Sequence: Synthetic coding sequence
  source 1..2658: mol_type = other DNA
atggcctggcggtgcccccggatgggccgggtgcccctggcctggtgtctagccctctgtggatgggcctgtatggcccctagggggacccaggccgaagagtctcctttcgtcggaaaccccggcaatataactggggctcgggggctgacaggtactctgaggtgccaacttcaagtgcagggagagcctcctgaggtccactggctcagggacggccagatcctggagctagcagacagcacacagactcaagtgccactcggtgaagatgagcaagacgattggattgtggtctcccaattgaggatcaccagccttcaactgagcgatacaggtcaatatcaatgtctggtgttcctgggacaccaaacattcgtttcccagcccggatacgttggacttgaagggcttccttattttttggaggagccggaggacagaactgtcgcagctaacaccccattcaacttgtcctgtcaggcccaagggcctcctgaaccagttgatttactgtggctccaggacgctgtgccactcgctactgcccctggtcacggtcctcagaggtccctccatgtccccggccttaacaagactagctccttttcttgcgaagcacataatgctaagggtgttacaacatcgcgcaccgcaaccattacagttttgccacagcaaccccgaaatttacacttggtgtcccggcaaccaacagagttggaagtggcctggacacctggactttctggtatataccccctcacacactgtacgttgcaagcggtgttgagcaatgatggaatggggattcaggcgggtgagcctgatcctcccgaagagcctttgacatcacaggcctccgttccaccgcatcaactaagattgggctctcttcatccacacacgccttaccacatccgcgtagcttgtactagcagccaaggtcctagtagctggactcactggctcccagtggagacgcctgagggtgtgcctctgggtccacctgagaatatttcagccacccgaaacggctctcaggccttcgtccactggcaggagccacgcgcccccctgcagggcacacttctcgggtacaggctcgcttatcaaggccaggacacacccgaagtgctgatggatataggcctgaggcaggaggttactctggagctgcagggcgatgggtctgtcagcaacctcaccgtgtgtgtggcggcctacacggctgccggagatgggccatggagtctgcctgtaccactggaggcgtggcgccccgtgaaggaaccttctactcccgcattcagctggccctggtggtacgtcttactcggggccgttgttgccgccgcttgcgtgctgattctcgccctttttctggtccacagacgcaagaaagaaactagatacggagaagtcttcgagccaacagtggaacgtggggaacttgtggtgcgatatcgtgttcgtaaatcctacagtcgccggacaaccgaagccacactcaacagcctcggcatttccgaggaactaaaggagaaactgcgcgacgtgatggtcgacaggcataaagttgccctgggcaagacactgggtgaaggcgaattcggtgccgttatggaaggccagctgaatcaggacgatagcattctgaaagtagcagtgaagacgatgaaaattgctatatgcactcgttctgagttggaggattttctgtccgaggcagtgtgcatgaaagagttcgaccatccaaacgttatgagattgatcggagtctgttttcagggctccgagcgtgagtctttccccgccccagtggtcattttgcctttcatgaagcatggagatcttcactccttcctgctctactcaagattgggggaccagcctgtctaccttcccacccagatgctggtcaaattcatggccgacatcgcatcaggaatggaatacctgtctacgaaaagattcatccacagggatctagctgccaggaactgtatgttgaatgagaacatgagcgtctgcgtcgctgactttggattgagcaaaaaaatatataatggagactactacaggcaagggcgcatcgccaagatgcccgtgaaatggatcgctattgagagcctcgctgaccgtgtctacacgtctaagtcagatgtgtggtcttttggcgtcacgatgtgggaaatcgctaccaggggtcagactccttatcctggagttgagaattcagaaatctatgattatttacgccaaggaaatcgcttaaagcaacctgccgactgtctagatggcctgtacgcactgatgagccggtgttgggaactgaacccccaggataggcctagctttacggagcttagagaagatctcgagaacaccttaaaggccctgccccccgcacaggagcctgatgagatcctatatgtcaatatggatgaaggggggggctatcctgagccaccaggagccgcagggggcgcagatcctccaacccagccagatcctaaggattcctgctcttgcctcacggcggccgaagtgcatccagccggaaggtatgtgctatgtcctagcacaacacccagtccagcgcagccagcagaccgcggatccccagccgcccctggtcaggaagatggcgcctag

SEQ ID NO: 180148 - DNA, 2439 bp, synthetic construct
  misc_feature 1..2439: note = Description of Artificial Sequence: Synthetic coding sequence
  source 1..2439: mol_type = other DNA
atggagcccctgggcaactggcggagcctgcgggcccccctgccccctatgctgttactgctgttgctgcaggtggcgggaccagtgggagctctggccgagaccctgctcaatgctccacgggccatgggcacctcctcatcacctccatcccccgcttccgtggtggccccagggaccacgctgttcgaggagagcaggctgcctgtgtttacactcgactatcctcacgtccaaatcccatttgagattaccctgtggattctgcttgcgagcctggctaaaattggatttcacctctaccataaactgcccacaatcgtgccggaatcttgcctgttaattatggtgggtctactgctcggcggaataatctttggggtggatgaaaagtcgccccccgccatgaaaactgatgtgtttttcctgtatttactgcccccaatcgttttggacgctggatatttcatgccaaccaggccgttcttcgaaaacattggtacgatcttctggtatgcagtagtcgggacgctttggaattccatcggtattggagtgagcctgttcggtatctgtcagatcgaggctttcggcctttctgacataaccttgctgcagaatttgctttttggatccctgatctctgctgtagatcccgtggctgttctggccgtgtttgaaaatattcatgtgaatgagcagctctatatcctagtctttggcgaatcactattgaatgatgcagttaccgtggttctgtacaacctgtttaagtcattctgccagatgaagacaatcgagaccatcgacgtgttcgcaggcatagcaaacttctttgtggtgggcattggcggagtattaatcggaatatttctgggcttcattgccgccttcaccactcgcttcacccacaacattcgggtgatagagcccctttttgtgttcctgtatagctatttatcctacataaccgccgaaatgtttcacctatcgggtatcatggcaatcaccgcctgcgccatgacaatgaacaagtacgtagaagaaaacgtaagccagaaatcttacaccacaataaagtacttcatgaagatgttgtccagcgtgagtgaaacactaatttttatttttatgggcgtgtctacagtggggaagaatcacgagtggaattgggcctttgtttgtttcacgctcgcattttgcctgatgtggcgagctctaggcgtctttgttctgactcaggtcatcaaccgattcaggacaattcccctgacatttaaagatcagtttatcatcgcctatggagggctgaggggtgccatctgttttgccctcgtcttcttactcccagcagcagtgttccctaggaaaaaactctttatcacagctgcaattgtggtgattttcttcaccgtgtttattttgggaattaccatacgaccgctggtggagttcctcgacgtgaaacggagcaataagaaacagcaggccgtcagtgaagagatctactgtcggctgttcgaccacgtaaagacggggatcgaggacgtgtgcgggcactggggacacaatttctggcgtgataagtttaaaaagtttgacgataaatacctgcgtaagttactgatcagggagaaccaaccaaagagctctattgtgtccctttataagaaacttgaaattaaacacgccatcgaaatggctgaaactggcatgatctcaacggtcccaacatttgcctctttgaacgactgcagggaagaaaaaatcaggaaagtgacaagctctgaaaccgatgaaatccgagaattattgagccgcaacctgtatcagatcaggcagaggaccctaagttataatcgtcactcacttaccgctgatacaagcgagcgccaggccaaggaaattctgattcgccggcggcacagtctgcgtgaaagtatccgcaaagactccagcctgaaccgggagcacagagcttccacctctacaagtagatatctgtctctccccaaaaatacaaaactgcccgaaaaactccagaaaaggaggactatcagcatcgctgacggaaatagtagcgacagcgacgccgatgcaggaactactgtgctgaaccttcagcctagagcgaggcgcttcttacccgagcagtttagcaaaaagtctcctcagagttataagatggaatggaagaatgaggtcgacgtcgatagcgggcgggacatgccctccacacctccaacacctcacagtagagagaaggggacccaaactagcgggttactccagcagccgttgttaagcaaggaccagtccggaagcgagcgtgaggacagcctcactgaggggattccgcccaagccacctccaagactggtctggcgggcatccgaaccgggcagcaggaaggccaggtttggatccgaaaagccatag

SEQ ID NO: 180149 - DNA, 681 bp, synthetic construct
  misc_feature 1..681: note = Description of Artificial Sequence: Synthetic coding sequence
  source 1..681: mol_type = other DNA
gccgagggcaagtggggcctggcccacggccgggccgaggcccacgtctggcctggacaggggggctggcggctaggccctccccagggcaggtggacaggctcatctcccctactcgacatcgtaggcggccgcaaggccagacctcgacagtttcctttcctcgcatccatccagaaccaagggcggcacttctgcggaggagcgctgatacatgctcggtttgttatgacagccgcttcatgttttcagagccagaaccctggtgtcagcacagtggttctcggggcctatgacctccgcagacgggagcggcaatctcgacagacattctctattagctctatgtctgagaatggctacgaccctcaacagaacctcaacgacctgatgctcctacaactggaccgcgaagctaatctaacgtccagcgttaccatccttccgctcccgctgcagaacgccactgtggaagccggcacccgctgccaagtcgcaggctggggaagccaaagatccggaggcaggctgagccggttccctcgttttgtgaatgtgacagtgacaccagaggaccaatgccgccctaacaacgtgtgtaccggcgttctgacgagaaggggaggtatttgcaacgtttctgccccctgtggggggagacgcggtccggagaggtattag

SEQ ID NO: 180150 - DNA, 7875 bp, synthetic construct
  misc_feature 1..7875: note = Description of Artificial Sequence: Synthetic coding sequence
  source 1..7875: mol_type = other DNA
atgttccggcgggcccggctgagcgtgaagcccaacgtgcggcccggagtcggcgcacgcggtagcaccgctagcaatccacagagagggagggagtcccctcgccctcccgatcccgccaccgatagcgccagcaagcccgcagaacctaccgacgttcctacagtcgactttgggggggcggagccacaagaaaaagccccacgatcttctaccgagaagactggcggagataacgatgttgaggaaagctctcggagtagcagcactgtttcacagagacggaaacgcatcagttctacatcttctctggttaaatcatctgtatctgttcccagcgagtcccaccccctttcaaccattaatcaggaagccccacagcccacagcaacttccaccaaggagaaacagccctgttccgaccggtataggatatacaaggcacagaagctaagagagatgctgaaggaggaactcagaaaggaaaagaagcagtggaagaacaaatacgccattaacgagtcccagagaccaccagatcgatccaagatgactatgcgcgacttcatctactaccttccagataacaatccaatgacctcgagcctggaacaggagaagaaaacagagaaaccaagtacgcccgtgcagacccgggagcaagaggggaagtctactcccaacgctgaggacaacgagatggaagaggaaaccgatgatggtccactcctggttccacgtgtgaaggtcgcagaggacggaagtatcatcctagatgaagaatcccttaccgtggaggtcctccggaccaaaggaccatgcgtcgtcgaagaaaatgacccaatcttcgaaagagggtccacaaccacatacagctccttccggaaaaattattactcgaaaccttggtcgaacaaagagactgacatgttcttcctggccatctcaatggtgggtactgacttctcaatgattggtcagctattcccgcatcgagcacgcattgagattaagaacaaattcaaacgtgaggagaagacgaacggatggagaattgacaaagcgttccaagagaagcgccccttcgattttgattttttcgcccaccttctacaaaaggtgctggccgaagaggagaagcgcaagcagaaatcggtaaagaatcattccctgaaagaaaaaaagagcaccaagccgcggaagaatgtcaaagtgaaaaaagtcgcctgcgaaggggtcaacaatgatccggacgaaagcatgagctcaaggatctctgacacggagcgtagccagaaggatgcccagacagtcgaagaggagtcccttactcttagtcgcgaggacgcagagcaggtcgctttggaagtggacctcaatcagaagaaaaggcggaggaagaaacaggacggagcaaatgagctcggggtaaacaacctgctcgagaacgctacagtccaggctggaccgtccaagggggaaaagcataaaaacaagtgccaggccattcgtccagagctcaaggaaggcgagtgtagcaaggaacaaatgttgtcatgcactcaaaatatcgacgggatcgtcggtttcgcaagcaccgaaaaagtggaaaagagaaccgatccgatcctgagcctcagcaatcagcaggatgccacctctgtcgcgacggagagctccgaatcaagcacgagcgatctgccaagttttgaggtgggaattcgcgccttatgtgaagttaataatgccgaggggtcgtgcattgaggagagaaatgtagacttaaagaataattctctcgagatcgatcagaccgagaacgtgaagcctatgctccgtggacgattccagcgcccgaagccgaatctgagtagggcaggcaaaaagagtgtgctttcgcaagggaaaaccgaaagtgagtctaaaaactctcactccaagacgtccgtcgagaagaaccatgttgagaaagacaaaatgaacactctggacattcttcggatggaaaccacagaacgagagaacccggaagcagagacagtcagcgtattgggcgaaaagaactgccttcaagaaggatctcagctgaaggccctgcgcccggtgcaggttcgtggcagactgcagaagccaaagcccaacgccggcaaggctgcagaacgcaaagaaattcttatttcgcaggaagaaatcggagcaaacgtggaaaaaaacgagaacgagagctgcgcggatagggataccccacagcacatggaggaccagagccggaaagacttcgaggaggaagatgtgatcttacagccagaaaaaaacgattcattccagaatgtccaaccagatgaacctaaggtcctgaatgaatgcctgagcgtgcaggagaacaataaagctaacaaactgaaccaggtacctattctgaggacccggtttcagaagccgaagcctaatatcgggagaggaacaggacgcagggagatctcaagcaaggaagaggtcctcgagaagatcctcgtgagcggcgaaatggcagctgcgctgcgcgagaccgtccgattggacacgtctcctaaggagatggtgccggcggagattaatacaaaagaaatgcaatcggatctgaaggagactggtcgccgagcgatatccccaagggaaaaaattcttgatgtcattgatgatactatcgagatggaaaccggattaaaagcgatgggtagagagatctgtctaagggagaagacacccgaagtaattgacgccacagaagagatcgacaaggatctggaggaagcaggccggagagagatcagtccccagaaaaacggcccagaagaggttaaaccactcggtgaggtagagacagacctgaaggcgacaggcaacgagtcaagtcctcgggagaagaccccagaggtaaccgacgccaccgaagaaattgacaagaaccttgaggagactggtaggcgaaagatctcacctagagagaacggaccagaggaagtaaagcccgttgacgaaatggagacggacttgaacgcaacgggtagggagtcatccccaagagaaaaaactcctgaagtgatagatgcaaccgaggagatcgacctggaagaaaccgaaagggaggtgtcccctcaggaaaacggactcgaggaagtgaagcccctgggggaaatggagaccgatcttaaggccacagggagggacagcttcccccgtggaaagaccccagaagtgatagacgctattgaggagattgaaattgatctggaagagactgaacgcgaaatcagcccccaagaaaatgggttggaagaagtcaagcccctgggcgagatgcagactgatttaaaagccaccggtcgcgagatctccccacgtgagaagacacctgaagtgatcgatgctactgaagagattgataaggatctcgaggagactgggagacgggagataagccccgaagaaaacgggcctgaggaagtgaagcccgtggacgaaatggaaactgacctgaaaactactggccgcgagggatcttccagagaaaagactagagaagtgattgatgcagccgaagttatagagacagatttagaggagaccgagcgagaaatatcaccccaggagaatgggcccgaagaagtaaagccggtaggcaagatggagactgatctgaaagagatcagagaggagatctctcagcgcgaaaaggtcctggccgaattctccgccattcgcgagaaggaaatcgaccttaaggaaacaggtaagcgagatatccctatcatggagaaagtttctggcaagatggccgttgtcgaggagatggaggccgatctgaaggaaaccggaaaagaaaatttcagagaacgtgggtccgaggagatctgtgttacagaggagaaggtggcagaactgaagcagacagggaagaccgatatctcacccagagaaaatgagctggaggaaacatctacaagccggcaaaccgatacccatctgatgcaaagtggttctaacgatttctccgccgtcccttcgctcgatatccagaatatttcctctgaggtgttgagcatgatgcacactcctgtcgaagagaagagaaacagcgagaaagaagtgtccagccatttttctcacttcaaaatcagcagtcaaacccacgaatctgacaaaactgaagtgcagggaattcagtcaccagatgtccccgagcagttcagtgacattaatctctccaaaagcctgccacaggagcagaaacccctggagattaaaccggcaccgtttgttcggtcccggtttaagcggcccaagcccaatctggcccgggctgccctcaagagggagaccaccgaatccgagaagtatatatatgagaaaaagtccgaaacaaaaaaaatggaaactatcgtaatgcaagaaaataacgagcaaaccgacactctgccatcccagcacgacgaagcaagtctgatgatctccagggagaaggataccttagggcaccgcaacgaggaggccgtcatactgccctgtactcaaactgagcgcaacttgtccccctcaaacagctgcgaaccgaaagaagagtctcagtctgcaccagtacagaaaaatgactctgtggtgtctgtggggaccaataatgtaaacacgtttcagcaggagatgaaggagagtgtgatacagaccgctcggcaagtacgaggtcggctgcagcgtccacgccccaacatacggaagacgggacagaggcagattgtggataaaggggaagccaaagggattattaaggaggggaggactatcctgccaaaggatgaaactgaaaaaaaagtgctcactgtatctaattcccagatcgaaactgaaatcgaagtgccttcaagcgctgtcccagagcataggatgtatgaaaaccagagtcaagtggtactagtagaaaacctgcacgtgaataaaactaacgagacgattcgtcatgaaaataagccatacgtgcctagctcagcacagatgacaaggaggaagttccagaaggctaaacccaacttgggcagggcacactccaaaaaagaggaacctgtgctcgagaaggtgacaaccgaccagagtaaggagggaaagcccgaagatcatcttctccagaaaggcgccagcaacacacagctgcttctgaaggagaaggcagaactgctcacctctctggaagtgtccgcacgaaaggattgcgttgggagcaaagagagtgccctcgccaaaattgatgccgagctggaggaggttgggcccagccgcagggtgggcgaggaaactgtaggggacaactctccctcaagtgttgtcgaagaacaatacctgaacaaattgacatcatgccctcagcctctgaacgagaccagctacagtaagattgccttggatggcaagacgactatttctagcacctctgagtatgagcgcaataggggtgaaaggagaagtcataagaagttcaaacctaatgtgaccagggggaggggctccaagagggtgcgggggaaaacctccaagaaggagccccgtgcaagcaaggccatgctggtgactctgcgcgcatcgcaagaagaggacgacgacgcagatgatttcgagagcgattatgaagaagagtcataccatcttgctccggaagaagtgaacaaggcacctgtgttcgtcccagtggggctgcgctccccagagccagtgtcggcgcagatcgaggaaacaatggaagagctggagattactgtcaacgtgcccgatgtgggatgcatagccgtcgtagaacatgaattacctaacactgacgtgaccaccgaagaaatgaagcaggaggagaacctctctgtgccatttgagatgactaccagcgaacacatccaggacgagcctgggactaacgatggctctactgaggcagccatcactttgcttacaatgggtgacctggtgttacagtctgaaatctcttcagagcagggagatgtgggagtatgcatcatcccacatgtgcacagcaaagataagagccacataccttcctccctggataatgtgaatcacaaaatcgttcacgagtgtcaggaactgtcatctcccgttatcaccacctcccctgcgagttttgaggaaaataaaattgtactggaggagcaaagctcgagggaggagatctccctgatggagaaagtgaaggaaaacgcgacgccaacacgaaacacaataagcaaggtcactagtaacctgcgaatacgcagccggctagccaagccgaaacctaacctcgagaagaccctgggcacaaaccggcttgatgactaccaggaggtatcctccctttgtgttacgaaaggagccgagatggaaactcagcgagagacagagaagaatgcatccaaagccaccgagttggaaaataaaaatttggggcctgttacaaccgccgagaacaaagaccaaagtaagctggcctgtgtacacggcatcaagggcactagcatcagcagcgaagtgaatctcaccgagaggaatgagaaccaggaagagtcctctcaggaagtgcatatgctcagcgtggcacccgtcgcgtcgtccgagacgggtccttgcaccctagggttggaccgggggttaggggaaaacagcgtggaggagccacagatcaaggattcaaaaggtgattccgtactgactctgcccgtccctgaatacacacccacatctatcccagaggtgcaacaggaaaacattatcaatcctcaggatctcactgtgaacctcgtcgctaatgtgccccaggacggcgaggatgagcaagcattcatactgaccctcgttgagatccccgccaatgctgtggaagaatttaccgatgcaacggcccagtttatgcccaacccacttttgcctgcccccatcttggtgaagtcagtgaacactgaagagcgcggtgacatgtctatctgccttccagccacatcagtcggtcaggacgctatgggcctcagtattagtgggcgcgataattccaaaaagccaccggacaatctggacctcgtatcgcgaaagcgctttcagtgccgcctggacaagaatgaccatatcccccccgctaagaaacgatctttgaccctgagggatgactgtcaggagtatactacagaggtgcattccaaagaactcaccaacgtgtttgaggaaactggggaaagccataagggccaggatatctttcttacttcgggcagcacccttacaactccggagcctcagcgacagcaggtagaagcggcctttcaatcccgtggctcaagatctccagatgcctgcatggacaagaatgtcccccagctgccccaggacgagatgatcgtgtccgacaaggaagaacggacagatgctgcccctaagtcacagcagatggattcacgaacctcctcctccaaggctagtctctcccgaccaggacgacgcccactgggctttctaagcttgatttgcagcaaaaattcgctcgagtcagacgaaccaatgcaggttcactctaagaagcgacttaagccattgatccccggcctccgcaagaaattaaaacgcagcaatccattcaatgagtcgcaagaaaaaaatagggaaagttccgatttgctgccctccccctccgtgatcactacccagagcgaaaatatttcgtcatccgcaactcaggtgtcatgcgaccagcctctgttgaaggaggggtataaaagcgcccaaaagcgcgccccacaaggggaggctacaactgttagcgagtacttcttcaacgatatcttcatcgaagtagatgaaactgaatag

SEQ ID NO: 180151 - DNA, 1392 bp, synthetic construct
  misc_feature 1..1392: note = Description of Artificial Sequence: Synthetic coding sequence
  source 1..1392: mol_type = other DNA
atgctggtgaccctgcgggccagccaggaggaggacgacgacgccgacgattttgaatctgactatgaggaggagtcatatcatcttgcacccgaagaggtcaacaaggcacccgttttcgtgcccgtcggattgcggtctcccgagcctgtgtctgctcagattgaggagactatggaggaactggagatcaccgtgaatgtgcctgacgtgggttgtatcgccgtcgttgagcatgagctgcctaatactgacgtgaccacggaagagatgaagcaggaagaaaatttgtccgttccatttgaaatgactaccagcgagcacatacaggatgagccaggaacaaacgacggatctactgaagccgcaattaccttgctgacaatgggagacctggtgcttcagtctgagatttcttcagaacagggagacggcgtctgcataatcccacatgtgcatagtaaggacaagagccacataccaagttcactggataacgtcaaccacaaaattgttcacgagtgccaggaattatccagtcctgttataaccactagccccgcatcgttcgaagagaataagattgtgctagaggagcagtcgtctagagaggaaatttcgctgatggagaaagtcaaagaaaacgcaacccctactagaaacacgatctcaaaagtcacgtccaacctccggattcgttccagattggcaaagcccaagcctaatctggaaaagacactggggacgaatcgcttggatgattaccaggaggtgtcgtccctgtgcgtaaccaaaggggctgagatggaaactcaaagggagacggagaagaacgcgagcaaggcaaccgagctggaaaataagaatttgggccccgtcacaactgcggaaaacaaagaccagagtaaactcgcttgcgtgcatggaatcaagggcacgagtatttcatccgaagtgaatctgaccgagcgtaacgagaaccaagaggagtcctcgcaagaggtacacatgctgagtgttgcacccgttgcttcatcagagactggcccatgtaccctagggctagacagagggctgggcgaaaactccgtggaggagcctcagatcaaagattcaaaaggagatagcgtattaaccctaccagttcctgagtatacgccaacaagtattccggaagtgcagcaggaaaatatcatcaatcctcaagacctgacagtgtttgtgtaccagcagctccagctcgtaaagatgccatgggtttacttatttctcgaggagatcatactgaaaagtagactgatcatttggatcctatacttaggtagggatttcaacgcaggattgattaagatgactacttttctcctgcctaaaaacgtgcattcactgtag

SEQ ID NO: 180152 - DNA, 2445 bp, synthetic construct
  misc_feature 1..2445: note = Description of Artificial Sequence: Synthetic coding sequence
  source 1..2445: mol_type = other DNA
atgttccggcgggcccggctgagcgtgaagcccaacgtgcggcccggcgtcggagcacggggcagtaccgcctcgaacccacagaggggacgggaaagccctcgaccacctgacccagctactgactcggcttcaaaacctgccgagcctacagatgttcccacagtcgacttcggaggcgcagaaccccaggaaaaagccccccgcagcagtaccgaaaagactgggggggacaacgacgtagaggagtcctcaagaagcagcagcactgtgtcccaacgacggaaacggatctcctcgacatcctctttagtgaagtcctcggtatcggtcccttctgaatcgcatcccctgagtaccatcaaccaggaggcacctcagccaaccgcaacttctacaaaggaaaagcagccatgttccgaccggtaccggatctataaggcccagaaactcagagagatgctgaaggaagagctacgtaaggaaaaaaaacagtggaagaataaatacgcgatcaatgagtcacagagaccccccgaccggtccaaaatgacaatgcgagattttatctactatttacccgataacaaccccatgacgtccagtttagaacaagaaaaaaaaactgaaaaaccaagtacaccagtccagactcgggagcaggaaggtaaatccacacctaacgccgaggacaacgagatggaagaagagactgacgacggaccattgttagtcccaagggtgaaggttgctgaagacggctccattattctggatgaggagagtctcacggtcgaagtgctcaggactaagggaccatgtgtcgttgaggagaatgaccccatcttcgagaggggcagcactactacttactcttccttccgcaagaattattactccaagccttggtctaacaaagaaaccgatatgttcttcctggctattagcatggtaggaacggatttcagcatgattggccagcttttccctcaccgtgcccggatcgagattaaaaataagttcaagagggaggagaagacaaatgggtggaggatcgataaagcctttcaggaaaagagacctttcgattttgatttctttgctcacttactccaaaaggtgctggctgaggaggagaagcggaaacagaaatccgtgaagaatcatagcttaaaggagaagaagagcaccaagcctcgcaagaatgtgaaggtcaaaaaagtcgcctgtgaaggtgtaaataacgacccagacgaatctatgtccagtcgcattagcgacacggagaggtcccaaaaggacgctcagacggtggaggaagagtcactgactctgagtagagaggacgccgagcaggtcgctcttgaagtcgaccttaaccaaaagaagcgtcggagaaagaaacaggacggagcaaacgagcttggcgttaataacctgttggagaacgctactgtgcaggctgggccatcaaagggcgagaagcacaagaacaagtgccaggctatacgcccagagctcaaggagggggaatgcagcaaagaacagatgctgtcctgcacccagaacatcgatggcattgtcgggtttgcctcgacagagaaagtagagaaacgtactgatcctatactgtccttgagtaaccagcaggacgccacctccgtagctaccgagtcatccgagtcaagtacatctgatctgccatcgtttgaggtcgggatccgcgccttgtgtgaggtgaacaatgcagagggatcatgcatcgaagaacggaatgtcgacctgaaaaacaattcgttggagatcgaccaaaccgaaaatgtcaagcctatgctccgtgggcgatttcaacgcccaaaacccaatctgagtagagctggcaagaaaagcgtgctgtctcaaggcaagacggagtcagaatctaagaactcccactccaaaacctcagtggagaaaaatcacgtggagaaagataagatgaatactctcgatatcctgagaatggaaacaacagagagagaaaaccctgaggccgaaacagtctctgtgctcggcgagaaaaattgtctgcaggagggttcacagcttaaagcactacgcccagtgcaggtcaggggcagactgcagaagcctaaacccaacgcaggtaaggcagctgaaaggaaggaaattctaatttcacaggaggagataggtgcgaatgtcgaaaaaaatgaaaacgagagctgtgcggacagggacacgccccagcacatggaagatcagtctcggaaagactttgaggaagaagacgtcattctgcaaccagaaaagaacgattcattccagaacgtccagccagatgaacccaaagtgctgaatgagtgcctttcggtccaggagaacaacaaggcaaacaaattgaatcaggtgccaatcctcagaacacgtttccagaagccctag

SEQ ID NO: 180153 - DNA, 2541 bp, synthetic construct
  misc_feature 1..2541: note = Description of Artificial Sequence: Synthetic coding sequence
  source 1..2541: mol_type = other DNA
atgttccggcgggcccggctgagcgtgaagcccaacgtgcggcccggcgtaggggcaaggggttctaccgcctcgaatccacagcgcgggagagaaagcccccgcccccccgaccctgcaacagatagcgcttcaaagcctgcagaacccactgatgttccgacagtggattttggaggtgcagagccccaggagaaagcaccacggtcttccaccgagaagaccggtggagacaatgacgtcgaggagtcctctcgatctagctccactgtgtcccagagaagaaaacggatctccagtacatcaagcctcgtcaagagctcggtttccgttccttccgaatcacatcctttaagcaccatcaatcaagaggcaccacagccgactgccacctctactaaggagaagcagccatgttccgatcgctaccgtatctataaggcccagaagttgagagaaatgctcaaggaagagctccggaaagaaaaaaagcagtggaaaaacaaatatgctattaatgaatctcagagacctcccgatcgctccaagatgaccatgcgggactttatctattacttgcccgacaataaccccatgacgtcaagtttagaacaggaaaagaagactgagaaacctagcactccagtgcagactcgcgaacaggagggaaaatctactccaaatgctgaagataacgaaatggaagaagagacagatgacgggcctcttctcgtgcctagggttaaagttgccgaggacgggagtattattttggacgaggagtccctgacagttgaagttctgcgaacgaagggcccatgcgtagttgaggagaacgacccaatattcgagcgaggcagcacaaccacttacagttcattccggaagaactattattctaaaccttggagcaacaaggagacggacatgttcttcctggccatttctatggttggaacggacttttctatgattggacagttgttcccacacagggctagaatcgagattaaaaataagttcaaacgcgaggagaagactaacgggtggcgcatcgataaagctttccaggagaagcggcctttcgatttcgacttttttgcccacctgctccagaaggtcttagccgaagaagaaaagcgaaagcaaaagtccgttaaaaaccactcactcaaagagaagaagagcacgaaacctcgcaagaatgtaaaagtgaaaaaagtggcctgtgagggggtgaacaatgacccggatgagtcaatgagttccaggatttctgacaccgagcgctcacagaaggatgcgcagacagtggaggaagagtcactcacactcagccgcgaagatgctgaacaggtagcccttgaagtggacctcaatcagaaaaaacggcgccgaaaaaaacaagacggagcaaatgagctgggcgttaacaatttgctagagaatgccactgtccaggcgggccctagcaagggcgaaaaacacaaaaataagtgccaggcaatacgtcctgagctcaaagaaggagagtgttccaaagagcagatgctctcttgcactcaaaacatcgatggcatcgtgggatttgcgtcaacagaaaaggtggaaaaacggactgaccccattctaagtctctccaaccagcaggatgcaacttcagtggcaacggaatcgtctgagtctagcacgtccgacctccctagttttgaggtgggaatcagggctttatgcgaagtcaataacgccgagggctcatgcatcgaggagcggaatgtagatcttaaaaacaatagcctagagatagatcagactgagaacgtcaagcctatgctgaggggacggttccagaggcccaaacctaacctgagtcgggctggcaagaagtcggtgcttagtcaaggcaagaccgagagtgaatcgaaaaacagccattccaagacctctgtggagaagaatcacgtggaaaaggacaaaatgaatactctggatattctgcgcatggaaaccaccgagcgggagaatcccgaggccgagacagtgagcgttctcggagagaaaaattgtctccaagaaggatcacagctgaaagctctcagaccagtccaggtcagggggcggctgcagaaacctaaacccaatgctggaaaggctgccgaacgcaaggagatacttattagccaggaagagataggagccaatgttgagaagaacgaaaacgaaagctgcgcagatcgtgatactccccaacatatggaggaccagtctaggaaagactttgaagaagaggacgttattctgcaacccgagaaaaatgactcatttcagaacgtgcagccggatgagccaaaagtactcaacgagtgtctgagcgtgcaagagaataacaaggccaacaaattaaaccaggtcccaatccttcgaacacggttccagaagccgaaacccaatattgggaggggtacgggccggcgcgagattagctccaaggaggaggtacttgaaaagatcctgagcctaggcaaatggagacagcattag

SEQ ID NO: 180154 - DNA, 6399 bp, synthetic construct
  misc_feature 1..6399: note = Description of Artificial Sequence: Synthetic coding sequence
  source 1..6399: mol_type = other DNA
atgagcagccggatcagcgacaccgagcggagccagaaggacgcccagacagtcgaagaagagtctcttacgctaagccgtgaggacgccgaacaggtggcgctagaagtcgacctgaatcagaaaaagcggagaaggaaaaagcaggatggcgctaacgagttgggcgtcaacaacctgttggagaatgccaccgtgcaggctggaccgtcgaaaggggaaaaacataaaaataagtgtcaggcgattagaccggaactcaaggagggtgagtgctccaaggaacagatgctctcctgtacccagaatattgacggcattgtgggcttcgccagtactgagaaagtagagaagagaacggatcccattttaagcctgagcaaccagcaggacgctacctctgtggccactgaatcgtcagaatccagcacctcggacctgccctcttttgaagttggtatcagggctctatgtgaggtgaataacgcggaagggtcatgtatcgaggaacggaatgtggacctcaaaaacaactcccttgaaatcgatcagaccgagaacgtcaagccaatgcttcgcgggcggttccaacgccccaagccaaacctaagtcgagctggcaagaaatctgtgctgtcccagggaaagactgagtccgagtctaaaaattcacactccaaaaccagcgtggagaaaaatcacgtcgagaaagataaaatgaacacccttgacattctgcggatggaaacgaccgaacgcgagaaccctgaggcggaaacagtatctgttctcggtgagaagaattgtttgcaagagggctcacaattgaaggcgctcagacccgtgcaggtgcgcggcaggctccagaagcccaagcccaacgccggaaaggcagctgaacggaaagaaatcctcatctctcaggaagagattggggctaacgtcgagaagaacgagaacgaaagctgcgccgaccgcgacacacctcagcatatggaggatcagtctcgcaaagattttgaggaagaggacgttatattacaaccagaaaaaaacgattctttccaaaacgttcagccagatgaacccaaggtgttgaacgagtgtctgagcgtgcaggaaaacaataaagcaaacaagctgaatcaagtgcctatcttgagaacccggtttcagaagccaaaacccaatattggacgcggaacgggacgcagggagatctcatctaaggaagaggtcctcgaaaaaatcctcgtgagcggagaaatggcggctgcgcttcgagagactgttaggcttgacacgtcccccaaagagatggttcccgcggagatcaacaccaaggagatgcaaagcgatctcaaagagacaggcaggagggctatttcccctcgggagaagattttggacgtgatcgacgatacaatcgagatggagacaggcctgaaagctatgggtagagaaatttgcctgcgcgagaagacaccagaggtgatagatgcgactgaggaaatcgataaagacttggaggaggcaggtcgccgcgagatatcgccccaaaagaatggaccagaggaggtcaagcctttaggggaagtggaaactgacttgaaggcaacaggcaatgaaagctccccgcgagagaaaacgccagaggtgactgatgctacagaggaaattgacaagaatttggaggagaccggcagacgcaaaatctccccgagagaaaatgggcccgaggaggtgaagcctgtggatgagatggaaactgatctcaacgctacgggacgggaatcaagtcctcgcgaaaaaactcccgaggtgatagatgcaacagaagagatcgatcttgaagagaccgagagagaagtctcgccacaggagaatggcctcgaagaagtgaagcccctcggcgagatggaaacagacttaaaggccactgggcgagacagctttccgagggggaagaccccagaagtcatagacgccatcgaggagatcgagatagatctcgaagaaaccgagcgcgaaatttcaccgcaagagaacggactagaagaggtgaagcctctcggagaaatgcagaccgacctgaaggcgactggacgggaaatttctccccgagagaaaactcccgaggtgatcgatgccaccgaggagatcgataaggacctcgaagaaacgggccgaagagaaatttctcccgaagagaacggccccgaggaagtgaaacctgtggatgagatggaaactgacttgaagaccacaggacgggagggaagcagccgcgagaagacacgggaagtcatcgacgccgcggaagtgatagagacagatttggaggaaactgaaagagaaatcagtccacaggaaaacggccctgaggaggtgaagccagtggggaagatggagaccgacctgaaggagatcagagaggagatttcccaacgggaaaaggttctggcggaattctcagccatccgggagaaggagatagatcttaaagagacaggaaagcgggacattccaatcatggaaaaggtgtcgggaaaaatggccgttgttgaggaaatggaagcagacctcaaggagacgggaaaggaaaatttccgtgagcgcggctcggaagaaatctgcgtgacggaggagaaggtcgccgaactgaagcagaccggtaaaactgatatttccccacgcgagaacgagctcgaggagacctctacctcacgacagactgatacccacctaatgcagagcgggtcaaacgacttttcagccgtgccttccctggacatccaaaatatcagctccgaggtgttgtctatgatgcatacgccggtcgaagagaagcgcaactctgagaaagaggtctcgtctcacttcagtcattttaaaatctccagccagacccacgagagcgacaagaccgaagtccaaggaatccaaagtccggacgtgcccgagcagttttctgatatcaacctgagcaagtctctgccgcaggaacaaaagcccctggaaatcaagccagccccttttgtacgaagtcgatttaagcggcccaagcccaacctggctcgggcggcactgaaacgcgagaccactgagtcagagaagtacatttacgaaaagaagtccgaaaccaaaaagatggagacaatcgtgatgcaggagaataatgagcagactgacactctaccaagccagcacgacgaagcatccctgatgataagccgggagaaagatacgctgggccacaggaacgaggaggctgttatactgccgtgtacccagacggaaagaaacctctcgcccagtaactcctgcgaacctaaagaggaatctcagagtgcccctgtccagaagaatgacagcgtagtgtccgtgggaactaacaacgttaacacctttcagcaagaaatgaaggaatccgtcatccaaactgctaggcaggttcggggacggttacagcgaccccgccccaacatccgcaaaacaggccagagacaaattgtcgataaaggagaggccaaaggcatcatcaaggaaggtcgcaccatactcccaaaggacgagactgagaaaaaagtactcaccgtcagtaacagccagattgagaccgaaattgaagtaccatcctctgcagtcccagagcatcgcatgtacgaaaaccagagccaggtcgttctggtcgaaaatctacatgttaataaaaccaacgagaccataagacacgagaataaaccctacgtccccagcagcgcacaaatgactcgtagaaagtttcagaaagctaaacccaacctcggcagagctcactctaagaaggaggaacctgtcctggagaaagttaccactgatcagtccaaggagggtaagccggaagaccacttacttcagaagggggcctcaaatactcagctgctcctgaaggagaaggccgaactcctgacctcgttagaagtaagtgcgaggaaagactgtgtgggttctaaggagagcgcccttgccaagatcgacgctgagctggaggaagtcggaccttctaggcgcgtaggcgaagaaaccgtgggcgacaactctccgtcgtcggtcgtagaggaacagtacctgaataagctgacctcttgccctcaaccactgaacgagacgtcctatagcaaaattgctctggacgggaaaaccaccattagctcaacctctgagtatgagcggaatcggggcgaaaggagaagccacaagaagttcaagcccaatgtcacgagaggacggggcagcaaacgggtgagggggaaaacctccaaaaaagagcctagagcttcaaaagctatgcttgttacactgcgggctagtcaggaggaggatgatgacgcggatgatttcgagagtgattacgaagaggagtcttaccacctagcccccgaggaggtcaacaaggccccagtgttcgttccagtcggcctacgtagcccagagcctgtctcggctcagatcgaagaaacaatggaagagcttgaaataaccgtgaacgtacctgacgtcggttgcatagctgtggtcgagcatgagctgccaaacacagatgtgaccaccgaagagatgaaacaggaggaaaaccttagcgtcccatttgaaatgaccacttctgagcatattcaagacgaaccaggggtttgtatcatcccccacgtgcattcaaaagataaatctcacattcccagcagtctagataatgtgaaccacaaaattgtacatgagtgccaggaactgagctcgcctgtaattacaacgagcccggcatccttcgaggaaaacaagattgttcttgaggaacagtcatcgagagaagagatctccctgatggagaaagtgaaagaaaacgctacgccaacaagaaacactatctccaaggtgacttccaatcttcgaatccggagtcgcctcgcaaagcctaagccaaatctggagaaaacccttggaacgaacaggttagatgattatcaagaggtcagttctctatgtgtgaccaagggtgctgagatggagacccaacgggagacagagaaaaacgccagtaaggcaaccgaacttgagaataagaatttggggccggtgacaactgccgagaataaagatcaaagcaagttggcctgcgtgcatggtatcaaagggacaagcatatcatcagaggttaatttgacggagcgcaacgagaaccaggaagagagctcccaggaagtccatatgctcagcgttgccccagttgcttccagtgaaactggaccgtgtactctgggcctggatcgcggcctgggagaaaattcagttgaggagccccaaatcaaagactccaagggagatagcgttctgactctcccagttccagaatatactcctacgagcattccagaagttcagcaggaaaacatcattaacccccaggatctgactgtaaacctggtggctaatgtgccccaggatggggaggacgagcaggcttttatcttaaccctggtggagatccccgcaaacgctgtcgaggaatttacagatgccactgcgcaattcatgccgaatcctttgttgcctgccccgattctggtgaagagcgtcaacaccgaagaacggggtgacatgtcaatatgtctccccgcaacatctgtgggtcaggatgccatgggcctatcgatcagcgggagggacaattccaagaaaccacctgacaatctggatttagtgtctagaaagcggttccaatgcagattggataaaaacgatcacatccccccggctaagaagcgtagcctgacgctgagagacgactgtcaggagtacacaaccgaggtccattctaaggaacttaccaacgttttcgaagaaactggagagtcacataagggccaagatatctttttaacctccggaagcacattgacaacaccagagccacagaggcagcaggtggaggcggctttccagtctaggggtagtcgctcccccgatgcatgcatggacaagaacgtgccacagctgccgcaggacgagatgatagtgtctgataaggaagagcgaactgacgccgctcccaaaagccagcagatggactctaggactagctcctccaaggcatccctctcccgtcccgggcggcgccccctgggctttctgtcactcatttgctctaagaattccttagagtccgatgagcccatgcaggtccatagtaaaaagaggcttaagcccctgatacccggacttcggaagaagctgaaacggagtaaccctttcaatgaaagccaagaaaaaaaccgtgaatcttctgacctgctcccctcccccagcgtcatcacaactcaatccgaaaacatcagctccagtgccactcagagtccgttttag

SEQ ID NO: 180155 - DNA, 1392 bp, synthetic construct
  misc_feature 1..1392: note = Description of Artificial Sequence: Synthetic coding sequence
  source 1..1392: mol_type = other DNA
atgctggtgaccctgcgggccagccaggaggaggacgacgacgccgacgactttgagtcagactacgaagaggagagctaccatctcgccccagaggaggtgaacaaggcacctgtgttcgtcccagtgggactgcggagcccagaacctgtgtcagctcaaattgaggagacgatggaagaactggagataacagtcaacgtgcccgacgtgggatgcatcgccgtggtggaacatgaactgccgaatactgatgtgacgaccgaggaaatgaagcaggaagagaatctgtccgtgcccttcgaaatgactacaagtgaacacattcaggacgagcccggcacaaacgacggaagcacggaagcggccatcacactgctgacaatgggcgacctcgtgctgcagagcgagatatcgtccgaacaaggagacggcgtgtgtatcatcccccacgtccacagcaaggacaagagccatatcccttccagtctcgacaatgtcaaccataagatagtgcacgagtgtcaggagctctctagccccgtgattacaacatctccagcttcatttgaggagaacaagattgttttagaggagcagtctagcagagaggaaatttctttaatggaaaaagtaaaagagaacgctacccctacaaggaacaccatatcgaaagtgactagtaatctgcggatacggtcacgtttggccaagccaaaacctaatctggaaaaaactctgggtaccaacagactagatgattatcaggaagtaagttctctatgcgtgactaagggcgctgaaatggagacacagcgggagaccgaaaaaaacgcctcgaaagccaccgaactggagaataaaaatctgggacccgtgactacagcagagaacaaggatcagagcaagcttgcgtgcgttcacggcatcaagggtacctcaatctcaagtgaggtgaaccttacagaacggaacgagaaccaagaagaatcatcacaggaggtccacatgctgtctgtagcgccagttgctagttccgaaaccggcccctgcactctcggcctggatagaggcttgggcgagaattcggtggaagagccccaaatcaaggactctaagggagatagtgtgttaacccttcctgtaccagagtacacaccaacttccattcctgaggtacagcaggagaacatcattaatcctcaggatttgaccgtgttcgtataccagcagctgcagcttgtcaagatgccgtgggtctacttgttcctcgaagagattatcctgaagagtagattgatcatctggatcctatatctggggagggatttcaacgcagggctcatcaagatgactacctttctcctcccaaagaacgtccacagcctgtag

SEQ ID NO: 180156 - DNA, 1518 bp, synthetic construct
  misc_feature 1..1518: note = Description of Artificial Sequence: Synthetic coding sequence
  source 1..1518: mol_type = other DNA
atgggcctggtgagcagcaagaagcccgacaaggagaagcccatcaaggagaaggacaaagggcagtggtccccccttaaggtgagcgcccaagataaggacgctcctcctcttcctccactcgtggtgtttaatcacctaacccctcctcccccagatgagcatctggacgaagataaacattttgtcgtggctctctatgattacacggctatgaacgatcgggacctgcagatgctaaagggcgagaaactccaggtactcaagggtactggagattggtggctggcacgaagtctggtcacaggacgggaaggttatgtgcccagtaatttcgtggcgcgcgtagagtctctggagatggaacgctggttcttcagatcgcagggcaggaaagaagccgagaggcagttacttgcgcctattaacaaggccggttcatttcttatcagagaatccgaaacaaataaaggcgctttcagcctgagcgtgaaggacgtgacaacccaaggcgagttgattaagcactacaagatacgctgcctggacgagggcgggtattacatttccccccggattactttcccaagcctgcaggcccttgtgcagcactactccaaaaagggcgacggcctgtgtcagcgcctgacactgccttgcgtgaggcctgcaccccaaaatccgtgggcccaggatgagtgggaaatacccaggcagtctctgcgcttagttaggaagctcggtagtggccagtttggggaggtgtggatggggtattacaagaataacatgaaagtggcaattaaaacgctgaaagagggcactatgtccccagaggcatttctaggagaagctaatgtcatgaaagctctccagcatgaaagacttgtgcggctctatgccgtcgtcacaaaagaacccatatacattgtgacagagtatatggctagaggttgcctgctggactttctaaagacagatgaaggaagtcggctaagtctacccagactgatcgatatgtcggcccaaatcgcagaagggatggcttatatcgaacggatgaattctatccaccgagaccttagagcagcaaacatattggtgagtgaggctctttgctgtaaaatcgctgactttgggttagctaggattatcgactctgaatataccgctcaggagggggccaagtttcctattaaatggacggcccccgaggccattcactttggggtattcaccattaaagcagatgtgtggtctttcggcgttctgctcatggaagtcgtgacctatggaagagttccttacccaggaatgtcaaaccccgaagtcatacgtaacttggaacgaggttataggatgccaagaccagacacctgccccccggaactgtacagaggcgtgatcgccgagtgttggagaagcaggcctgaagaaagaccaaccttcgagtttctccaatctgtgttggaagacttttacaccgcaacagagaggcagtatgagctgcagccctag

SEQ ID NO: 180157 - DNA, 1773 bp, synthetic construct
  misc_feature 1..1773: note = Description of Artificial Sequence: Synthetic coding sequence
  source 1..1773: mol_type = other DNA
atgggcctggtgagcagcaagaagcccgacaaggagaagcccatcaaagaaaaagacaaggggcagtggtctcccctgaaggtcagtgcccaggacaaggatgctcctccattgccccctctggtcgtgtttaatcaccttactcctccgccacccgacgagcacctcgacgaggataagcacttcgttgtggccctatacgattacaccgccatgaatgaccgcgatttacagatgcttaaaggagaaaaactgcaggttctcaaagggaccggggattggtggctggctagaagcttggtaactgggcgggagggatatgtcccttcaaacttcgtggcccgagtggaaagtcttgagatggaacgatggttcttccggtcccagggccggaaggaagctgagaggcagctgttggcccctattaataaggcggggtcttttctaatcagggaatctgagaccaataagggcgcatttagtctctccgtcaaagatgtgactactcaaggcgagttgattaagcactataagatccgatgtctggatgagggcgggtactacattagccccagaattacattcccatctttacaggcgctggtgcagcactactccaagaagggcgacggcttatgtcaacgtttaacccttccatgcgtgaggccggcaccccagaatccgtgggcccaggatgagtgggaaatcccacgtcaaagcctgcgcttggtccgaaagctgggctccgggcagtttggtgaagtttggatgggatactataaaaataacatgaaggtggccatcaaaacgctgaaggagggcaccatgagccctgaggcgtttcttggggaggcaaatgtcatgaaggctctccagcacgaacgacttgtgcggctgtatgccgtggttaccaaggaaccaatctacatagtcacagagtacatggctcgggggtgtttgctggacttccttaaaacggatgaaggatccaggctgtccctcccacggcttattgacatgtcagcacagattgccgaagggatggcgtatattgagagaatgaattctattcatcgagacctacgagccgcaaacattctcgtgtcagaggccctctgctgcaaaatcgctgacttcggtcttgcaaggattattgattcggaatacacggcacaggagggcgccaagtttccaatcaagtggactgccccagaggccatccatttcggtgtgttcacaattaaggctgacgtgtggtccttcggggtgctgctgatggaggttgtaacctacggccgcgtaccatacccggggatgtcaaatcctgaagttattcgtaatctggaaagaggttatcgcatgccccgaccggatacatgcccacccgagctctaccggggcgtgattgctgagtgttggagatcacggcctgaggagagacccacgttcgactgcacacctggcagagttacccgacctctgtgcgcggcctcgttcgtggagggctgcaattcggatcttgccaggtcatcgggcgtgttatccccaagcaaagtgtttcgcactggaaaaaggctctcgtcaagtaaggctcctgtgctgggcaccccaagggccggcagagttcctgctagcgcaccatgcgtagaccccgctctgcccaggtaccggagtcagaccggctctcgcgggcggcaacagggacaaccccagccaagactcagaagcagcacggctggcctcttttgtaataaagtcactagcgtccgttag

SEQ ID NO: 180158 - DNA, 615 bp, synthetic construct
  misc_feature 1..615: note = Description of Artificial Sequence: Synthetic coding sequence
  source 1..615: mol_type = other DNA
atggccaccgccagccccagcgtgttcctgctgatggtgaacggccaggtagaatcagcccagttcccagagtatgatgatctctattgtaaatattgctttgtgtacggtcaggattgggccccaaccgcaggtctggaggaaggcattagccagattacctccaaatcccaggacgtacgccaggccttggtgtggaacttccctatcgatgtgacctttaaaagcactaatccttacggatggccccaaatcgtactgtccgtatacggccccgatgtgttcggaaatgacgtagtccgagggtacggcgctgtgcacgtacccttctctcccggacgccacaaacgtactatcccaatgttcgtccccgaaagtactagtaaacttcagaagttcaccagctggtttatgggtaggagacccgaatacacagaccctaaggtggtcgcccagggagagggcagagaggtcacacgcgttcgatcacagggattcgtcaccctgctgtttaatgtcgtgactaaggatatgcgaaaactggggtacgataccggacccagcgacacccaaggggttttaggtccgtcaccgcctcagagctttccacagtag

SEQ ID NO: 180159 - DNA, 462 bp, synthetic construct
  misc_feature 1..462: note = Description of Artificial Sequence: Synthetic coding sequence
  source 1..462: mol_type = other DNA
atggccaccgccagccccagcgtgttcctgctgatggtgaacggccaggttgaaagtgcccaattccccgagtacgacgatctgtactgtaagtattgttttgtctacggtcaggattgggctccaaccgcaggactggaggagggcatctcccagatcacttctaaatctcaagatgtgcgccaagctttggtgtggaattttcccatagatgtaacattcaaatccactaatccttacggctggccccagatagtattgagcgtgtatggacctgatgttttcggaaacgacgttgtccgcggatacggagccgtgcatgtgccctttagtcctggtaggcacaaaagaacgatacccatgttcgtacctgaatcaacgtccaagctgcaaaaatttaccagcctctgtctcgtggcaagcagcgatctgcaggccgccccacctaccgaagacaagtag

SEQ ID NO: 180160 - DNA, 486 bp, synthetic construct
  misc_feature 1..486: note = Description of Artificial Sequence: Synthetic coding sequence
  source 1..486: mol_type = other DNA
atggccaccgccagccccagcgtgttcctgctgatggtgaacggccaggtggagtcagcccagttccccgaatacgatgatctctattgtaagtactgtttcgtctacggccaggactgggctccaaccgccgggttggaggagggtatctcccaaatcaccagtaaatcccaagacgtgcgacaggctttggtgtggaatttcccaatcgatgttactttcaagtctaccaatccatacgggtggccccagatagtgctgagtgtttacggccctgacgtgttcggcaacgacgttgtgcgcgggtatggggcagtccatgtgccttttagccccggacgccataaacgaactattccaatgttcgtgcctgagagtacctctaagctgcagaagtttacctcctggtttatgggacggcgccccgaatatacagatcccaaggtggttgcacaaggggagggccgggaggcgcagcctggctag

SEQ ID NO: 180161 - DNA, 564 bp, synthetic construct
  misc_feature 1..564: note = Description of Artificial Sequence: Synthetic coding sequence
  source 1..564: mol_type = other DNA
atggccaccgccagccccagcgtgttcctgctgatggtgaacggccaggtcgaatccgcccagtttcctgaatacgacgatttgtattgcaaatattgctttgtgtacggccaagactgggcccccacggccggactcgaggaggggatttctcaaattacatctaagagtcaggatgtgcgtcaggcgctggtgtggaattttcccatagacgtcacctttaagtctactaatccatatggatggcctcagatcgtcctgagcgtctacggcccagatgtgtttggaaacgatgtcgtgagaggctatggagcagtgcatgttcctttcagtccaggtcggcataagcggactatccccatgtttgtgcccgagagcactagcaagttgcagaagtttacatcctggtttatgggcagacggcctgagtacacagaccctaaagtggtggcgcaaggtgaggggcgtgaggatgagaacgccgaagcggaaatccctcgctccacatgggtctcactctgtccatcccccgcgtggctgatgttgccgttctgcccccagtag

SEQ ID NO: 180162 - DNA, 402 bp, synthetic construct
  misc_feature 1..402: note = Description of Artificial Sequence: Synthetic coding sequence
  source 1..402: mol_type = other DNA
ctgctgatggtgaacggccaggtggagagcgcccagttccccgagtacgacgacctgtactgcaaatattgcttcgtctatggccaagactgggcacccaccgccggtctggaagaaggcataagtcaaatcacaagcaagagtcaggacgtgcggcaggctctcgtgtggaactttcccatagatgtgaccttcaagagcaccaatccctatgggtggccccagatagtgctttctgtatatggccccgacgttttcggcaatgatgttgtgcgcggatatggtgccgtccacgtgccattctcacccgggcgccacaaacgaaccattcctatgtttgtacctgagtcaacttccaagctccagaagtttacgaggtctgcatcttgctcaactcactag

SEQ ID NO: 180163 - DNA, 615 bp, synthetic construct
  misc_feature 1..615: note = Description of Artificial Sequence: Synthetic coding sequence
  source 1..615: mol_type = other DNA
atggccaccgccagccccagcgtgttcctgctgatggtgaacggccaggtggaatcggcgcagttcccagaatatgacgacttgtattgtaagtactgcttcgtctacggccaggactgggcccctaccgcgggcttagaggaaggcatttcccagatcacttccaagtctcaagacgttcgacaggctttggtatggaacttcccgatcgatgtcacctttaaatcaactaatccttatggctggccacaaattgtcctctcagtctacggcccagacgttttcggcaatgacgttgtcaggggctacggagctgttcacgtaccattttcccctggcaggcacaagaggaccatccctatgtttgtaccggagagcacctccaagctccaaaagtttacttcttggttcatgggcaggcgtcccgagtatacagacccaaaggtagtggctcagggggaaggccgcgaagtgacccgagtcaggtcacaaggattcgtgacgctcctgtttaacgtcgtcaccaaggacatgcggaagctcggctacgacactggcccttccgacacacagggcgttctgggtcccagccctccccagtcatttcctcagtag

SEQ ID NO: 180164 - DNA, 444 bp, synthetic construct
  misc_feature 1..444: note = Description of Artificial Sequence: Synthetic coding sequence
  source 1..444: mol_type = other DNA
atgatgaccagcaccgccagcaccgccctgtgcaccgcccggaccggtcctccgcagagggtgtggaggcggggtagtcaccggtctcaccccagggctaagatgtgcggcaaacactggtgcggtacaagccccctgatgagccccctcaaggcccccacccctactgctggccacaggtcatgctcagcctgcatggaccaaatgtgcagtgggacaatgtggtttgaagcaatgggtccgtgtacttgtccatcacacttagcgggcacaaaggggccgtctccttgtctctcgcagaatcttaggctcaattgtaggtccctgcaggccggatcctggggaggtgggccatccactcagacgccaagatggtggctccgagttaaggcagggaagccgcccagcgggttgagcgtaaaagattcatcagtgtcgagatag

SEQ ID NO: 180165 - DNA, 528 bp, synthetic construct
  misc_feature 1..528: note = Description of Artificial Sequence: Synthetic coding sequence
  source 1..528: mol_type = other DNA
atggccgaggtgcacgtgatcggccagatcatcggcgccagcggcttctcagaaagttccttgttctgtaagtggggaatccataccggtgccgcttggaaactgttatcaggcgttagggaggggcagactcaagttgatactccccagattggcgatatggcttactggtcacatcctattgacctccacttcgcaacaaaaggattacaaggctggccgagactccattttcaggtatggtcccaggatagctttgggagatgccagcttgcgggttacggattttgtcatgttccctcctccccaggcacgcaccaacttgcatgccccacatggcgtcctttaggcagctggcgcgagcagcttgctagggcattcgtaggaggtgggccacagcttctacatggcgacactatttactctggagcggaccggtatagattgcataccgccgcgggggggacggttcaccttgagataggtctactcctgcgcaactttgaccgatatggtgtcgaatgttag

SEQ ID NO: 180166 - DNA, 1452 bp, synthetic construct
  misc_feature 1..1452: note = Description of Artificial Sequence: Synthetic coding sequence
  source 1..1452: mol_type = other DNA
atgaccgaggtggagtacacccagctgcagcacatcctgtgcagccacatggaagccgcagctgatggggagttggaaactaggcttaacagcgcccttttggcggctgccggccccggagcaggagcgggcgggttcgcagctggggggcaggggggcgcagcccccgtatacccggttctctgcccgagcgcattggccgcagatgcgccttgcctgggccacatcgacttccaggagctgagaatgatgttactgagtgaagcaggcgcagcagaaaaaacctcgggcgggggcgatggcgccagagcgcgggcagacggagcggccaaggaaggggctggggccgctgccgccgccgcaggacctgacggcgctcctgaggctcgggctaaacccgccgtcagggtaaggttagaggaccgatttaactctatcccagcagagcccccacccgcaccgaggggcccggaacccccagaaccagggggtgccttgaacaatctggttaccctaattcgtcatccctccgagctgatgaacgtgccgctgcagcagcagaacaagtgcaccgccttagtgaagaacaaaactgccgcaaccacaaccgctctccagtttacctatccactttttaccacgaacgcttgttctacttcagggaactccaacctgagtcagacgcaatcatcttccaactcctgttctgtcctcgaggccgcaaaacaccaggacataggcctgccccgcgctttctctttctgttatcaacaggaaatagagagcacaaagcaaacgctggggagccgaaacaaagttcttcccgagcaggtatggatcaaggtgggagaggccgccttgtgcaaacaagctctaaaaaggaatagaagtcggatgcgccaactagacacgaatgtcgagaggcgggcactgggggagattcagaatgtcggcgagggtgcaacagccacccagggcgcatggcagtcctctgaatcaagccaggcaaatttaggggagcaggcccagtccggcccccaaggtgggaggtcccagcgacgagagagacacaatcggatggagcgcgaccggaggaggcggattcggatttgctgtgacgaactgaacctgctggttcctttttgcaacgcagagactgacaaggcgaccactttgcagtggaccaccgctttcttaaagtatattcaggagcgccatggggactctctaaagaaagtgctgtcaactaacagtcgctatgtaatgctatggacctgctttttaaagatgaaatctgcggttgacggcaaaaacccacagcacgcttaccggacagcaaatcacaaatggttgtgtctgcacgaagcccggtctttcgctttcgaggtatccatctgggcccattttcagctctttagggtgagaattccagagggatttctgagcatatag

SEQ ID NO: 180167 - DNA, 843 bp, synthetic construct
  misc_feature 1..843: note = Description of Artificial Sequence: Synthetic coding sequence
  source 1..843: mol_type = other DNA
atgggccccaaggacagcgccaagtgcctgcaccggggcccccagccttcccactgggcagcgggtgatggaccgactcaggaacggtgtggcccacggagcttgggtagccctgtgttgggtctcgacacctgtcgggcctgggatcatgtggatggccagatcttgggacagctgcgaccactaactgaagaagaggaagaagaaggcgccggcgcgactctatcccgtggaccggcttttcctggcatgggctctgaagagctgagactggcctcgttttacgactggccactaactgctgaagttccacctgagttgctagccgccgcaggattttttcacaccggacaccaggacaaggtccgttgctttttctgctacggcggcctgcagtcatggaagaggggtgacgatccttggacggagcacgcaaagtggttccctagttgtcagttcctcctacgcagcaagggccgtgacttcgtgcattccgttcaagaaacccactcccagttgctcgggtcttgggatccgtgggaagaacccgaagacgccgcacctgtggcgccctcagtgccagccagtggctatccagagctgcccactccgagaagagaggtgcagtccgagtccgcccaggaacctggagcccgcgacgtggaggcacagttacggaggctacaggaagaaaggacgtgcaaggtctgcctggaccgagctgtctccattgtttttgtgccctgcggacatttagtgtgcgcagaatgtgcgcctgggctccaactgtgccctatttgtcgcgcaccagtgcggtctcgcgtgagaacctttctatcctag

SEQ ID NO: 180168 - DNA, 3564 bp, synthetic construct
  misc_feature 1..3564: note = Description of Artificial Sequence: Synthetic coding sequence
  source 1..3564: mol_type = other DNA
atgcggccccggggcgccgccttcgccgccggcccccccggcgacctgcacctcgggacagccataggcttcgccggagcgatttggcgtagccgatctcctgccatgtccaccttgctcgatattaagagcagcgtgctgaggcaggtccaagtgtgcccttcatttcgacggagaactgagcaggacccggggagtgcatccgccgacccccaggaacccgcgactggtgcatggaaaccaggggacggcgtcgagttcttcgcccacatgagactgatgctgaagaagggggaaggtaggcaggggctcccctgtttggaagtgccactgaggagtggctctcccgcgcctcccgagcccgtggacccatcgcttggcctccgtgccctggcgcccgaagaagtggagatgctctacgaggaagctctttataccgtcctatatagggcaggcaccatgggacccgaccaggtagacgatgaagaggccctcctctcttatctccagcaggtcttcggtacatcgttggaagagcacactgaggcaattgaacgcgtacgcaaggccaaggccccaacttatgccttaaaggtctcagtgatgagagctaagaacctcctcgccaaagatcccaacggtttctccgatccatattgtatgctgggtatcctgccggccagcgatgccacaagagagcccagggctcagaaagagcagaggttcggattcaggaagggatcaaaacgagggggcccccttccagccaagtgtatacaagtgactgaagtgaaatcttccacacttaaccctgtctggaaagagcactttctctttgaaatcgaagacgtgagcactgatcagctacatctcgacatctgggatcacgatgacgacgtgagtctcgtggaggcatgcaggaagttaaatgaggtgatcggcctcaagggcatgggcagatacttcaaacagattgtaaagtccgccagagccaacggcacagcaggacctaccgaagatcacactgacgactttcttgggtgtctgaatatacctgtccgggaggtccccgtggcgggagtggacagatggttcaaactggagcctcgatcgtccgcaagtagagtgcagggccattgtcacctagttctgaagctgatcacaacgcagcgagataccgctatgagccagcggggccgcagcggttttctatctcatcttcttctactgagccacctgctgcgactcgaacactcagcagaagaacccaatagcagctcctggcggggcgagctgtctaccccagctgccacaattctgtgcttgcacggcgctcagtcaaacctctcccccctccagctggcggtgttacattggcaggttagcagccgacatcaccaaacatgcactcttgactattcttacctgctaggactgttagaggacatgcaagcccactgggaggaagccccgtcactgcctcaggagcaggaggaatcgctggcagactcgctgtcagccttcagcgaattcggactgcagctgcttagacagctgcgcgactatttcccagcaacaaacagcaccgccgtgcatagactcgagctgctgcttaagtgtttgggcaagcttcagctctttcagccaagtttcgagatctgtccctttgagtccgagctaaacatggatatcgcagcggcgctcaagcgcggcaaccgcgaatggtatgatcgtatcttgaatgacaaaagtccccgcgaacagcctggcccgcagcgattgcccgggcttgttgtcctggcagacgctgtgtacgacgatcttcagttttgctactccgtgtatgctagcctttttcactccatccttaatgttgatgtcttcactcttacatttcgtcaattggaacgcctggtggctgaagaagcctgggtgcttactgaggagttgagtcccaagatgacccttgaggttgcttccggcctgttcgagctgtacctaacactagcagacctacagcgcttctgggactcgattcccggcagggacagtagatctctcgcccttgctgggattcacgcccccttcctcccagcagttaagctgtggttccaggtgctccgcgatcaagctaagtggcggctgcagggggcagtggatatggacaccctggaaccggtcgatgcgagtagcagacattcgtctagtgcggccaccgcaggactttgcctttcacatatccaagaactgtgggttaggctggcttggcccgacccagctcaagcccagggcctggggacccaacttgggcaagacgtctgtgaagccacactgttctacaccgagctattgagaaaaaaggtcgacactcaacctggtgccgccggcgaagcagtctccgaggctctgtgtgttgtactgaacaatgtggaactggttcgcaaggcagctgggcaggccctcaagggcttggcgtggccggagggcgcaacaggaccagagggcgttctccctaggccactcctgagttgtacgcaggctctcgatgatgatctgcaacgcgaggcccataccgttacagctcacttgacctctaagatggttggagacatcagaaaatacgtgcagcacatttccctttcacctgattcaatacagaatgacgaggcagtcgcgcccctcatgaaatacctggacgagaaactggctctgttgaacgcctccctcgtgaaaggaaatctctcaagagtgctcgaggcgctgtgggaactcctcctgcaggcgatcctgcaggctctcggcgcaaatcgagacgtctccgctgacttctactctagattccacttcactttggaagctctggtcagctttttccacgccgagggccagggactgccacttgagtccttgcgagacggatcctacaaacggttaaaagaggagttaagactgcacaagtgcagcacgagggagtgtatcgagcagttttatctcgacaagctgaagcagagaaccctcgagcagaataggtttggcagactctccgtccggtgccactatgaggccgccgagcaacgtctggcagtggaggtacttcacgctgccgatttactgcctctggacgcaaatgggctgtccgatcctttcgtgatagttgagcttggcccaccacatctattcccactggtgcgctcgcagcggactcaggtcaaaacacgaacactgcatcccgtgtacgatgaactgttctacttcagcgtgcctgccgaagcatgtcgccgtagggccgcgtgtgtgctgtttacagtcatggaccacgactggctttcgacgaatgactttgcaggcgaagcggccctcggactgggtggcgtgaccggcgttgctcgacctcaggtaggcggtggtgcgcgtgctggccagcccgtgacacttcatttgtgcagaccgcgcgcccaggtcagaagtgcgctccgtaggctcgagggccggacgtcaaaggaggcccaggaattcgtgaaaaagctgaaggaactcgaaaagtgtatggaggctgacccttag

SEQ ID NO: 180169 - DNA, 3510 bp, synthetic construct
  misc_feature 1..3510: note = Description of Artificial Sequence: Synthetic coding sequence
  source 1..3510: mol_type = other DNA
atgagcaccctgctggacatcaagagcagcgtgctgcggcaggtgcaagtgtgcccaagtttccgaaggcgcaccgagcaggatccaggctctgcctcggcagacccgcaagagcctgccacgggcgcttggaaacctggcgatggcgttgaattttttgcacatatgagactaatgctgaagaaaggcgaggggaggcagggcctgccatgcctggaggcatggggatcgccgtgccgtcagtccccccacccaggcccgcacacacaggttccactgagaagcggaagtccagctcccccagagcccgtcgacccatctctgggtctcagagccctcgccccggaggaagtggaaatgttatacgaggaggctctatacaccgtactctatcgtgccgggacaatgggcccagatcaagtggatgatgaagaggccttactgtcttaccttcaacaggtattcggaacttccctggaagaacacactgaggccatcgagcgggtccgcaaagctaaagctcctacttatgcactaaaggtctctgtgatgcgagctaaaaacctcttggctaaagaccccaacggattttcagacccctactgcatgctgggcattctgcccgcgagtgacgctacacgcgagcctagagcccaaaaggagcaacggttcggatttagaaagggctctaagcggggcggccctctgcccgcaaagtgcattcaggtcactgaggtgaagagctcgaccctgaatcccgtttggaaggagcacttcctgtttgagatcgaagatgtatcgaccgaccagttacacctggacatctgggaccatgacgatgatgtgtcccttgtggaggcctgcaggaagctgaacgaggtaatcggacttaagggcatgggtcgatacttcaagcaaatcgtgaagtccgcccgcgccaatgggactgcagggccgacagaagatcacacggacgatttcctaggctgcttgaatatcccagtccgggaggtgcccgtggccggtgttgaccgttggttcaagctcgaaccccgctccagcgcctcaagggtccagggtcattgccatctagtgcttaaactcataaccacccaacgcgacaccgcgatgagtcaacgcggtagaagcggttttctgtcccacctgttgctgctctcccacctgcttcgcctcgaacacagtgcggaggaaccaaattcgagctcctggcggggggaactgagcaccccagctgcaaccatcctgtgtctacacggggcgcagtccaacctaagcccgcttcagctagcagtacttcattggcaggtgagctcccggcaccaccagacatgcaccctcgactactcatatttgttagggctgctggaggacatgcaagcgcactgggaggaagcacctagcttaccccaggaacaggaggagtctctcgccgacagtcttagcgctttctctgagttcggactgcagttgttgagacagctgcgagactattttcccgctacaaatagtacagctgtgcatagattggagctgctgctgaagtgcctcggcaagcttcaactgtttcagccatcctttgagatctgccccttcgagtccgagctcaacatggatatcgcagccgccctcaaacgcggcaatagagaatggtacgacagaatcttaaatgataaatcaccccgggagcagccaggcccacagaggcttccaggcttagtcgtcctcgccgacgccgtttatgatgacctgcagttttgttatagcgtctacgcctccctgttccacagtattctgaatgtagacgtgtttacactcacttttaggcagttggaaagattggttgccgaggaggcgtgggtgcttactgaggagctatcacccaaaatgacattagaagttgcatctgggctgtttgagttatacctcaccctcgcagacctgcagagattctgggattccattcccggtcgagatagccggtcgctggcgctcgccggaattcacgcccccttcctgcccgcagtcaaattatggtttcaggtgttgcgggatcaggctaagtggcgcctgcagggcgcagtcgacatggacacattggaaccagtggacgcctcatcgagacattcttccagcgccgctactgcgggcttgtgtttgtcacatatccaggagttgtgggtgcggctggcttggcccgacccagctcaggcgcagggtttgggcacccagctgggccaagatgtttgcgaggccaccctgttctatactgaactactcagaaaaaaggtggacactcagcctggggccgctggagaggcggtctctgaggcattgtgtgtggttttaaacaatgtagagcttgtcagaaaagccgctggtcaggcacttaaaggcctcgcctggcctgaaggtgcaacaggaccggagggagtcctgccacgacctctcctcagctgtacccaagctttggatgatgacctgcagcgtgaagcacacacagtcacagcacaccttaccagtaaaatggtcggagatattaggaaatatgttcaacacattagcttgtcccctgattccattcagaacgatgaggccgtcgcacccctgatgaagtatctagacgagaagctggcactgctcaacgccagccttgttaagggcaacctctcacgggtgctggaggccctctgggagctgttgctacaagccattctacaggcgctgggcgctaatcgagacgtttctgccgacttctactcgaggtttcactttactctggaggcactcgtgtcctttttccacgccgagggacagggattaccactcgagtcattacgtgacggctcttacaagcgtttaaaggaagaactgaggctccacaagtgctccacacgcgaatgcatcgagcagttctacttagacaaattaaagcaaagaaccctcgaacagaacaggttcggccggctgtccgtgcgttgccattacgaggctgcagagcaaagactagccgttgaagtgctgcacgccgctgacctgctgcctctggacgctaatggactgtccgaccctttcgttatagtcgagctgggcccaccccatttgttccccttagttaggtcccagcgcacccaggtgaagacccgcaccctgcatccagtctatgatgaattgttttacttctccgttcccgcagaagcctgccgccgccgcgcggcgtgcgtgctgtttaccgtcatggatcatgattggctgtccaccaatgatttcgcaggcgaggccgcactgggactcggaggcgtgaccggggttgccagaccccaggtgggcggcggagcaagagcaggccaacccgtgaccctgcatctatgccgacctcgagctcaagtccgctccgccctgcgacgcctggaaggccgcactagcaaagaagcccaggagtttgtgaaaaaactgaaagagctggaaaaatgcatggaggccgatccgtag

SEQ ID NO: 180170 - DNA, 3510 bp, synthetic construct
  misc_feature 1..3510: note = Description of Artificial Sequence: Synthetic coding sequence
  source 1..3510: mol_type = other DNA
atgagcaccctgctggacatcaagagcagcgtgctgcggcaggtgcaggtgtgccctagtttccgaagacgaacagagcaggaccctggctctgcttctgccgaccctcaagagcccgccaccggcgcctggaaacccggggacggcgtggaattcttcgcccacatgagactgatgctgaaaaagggcgagggtcggcagggcttgccgtgcctggaagcctggggcagtccgtgccgacagagcccacaccctggcccgcatactcaggtgccgctccggagcggcagtcccgcgcctcccgagcccgtagatccctccctgggccttcgagccctcgcgccagaggaagttgagatgctatatgaagaagcgctctacaccgtgttgtacagagccggtaccatgggcccagatcaggtggatgatgaagaggccctgctttcttacctccagcaagtcttcggcaccagtctcgaggaacatacggaggccattgagagagtccggaaagcaaaggcacccacatacgccctcaaggtgtcggtgatgagggccaaaaacttgctcgccaaggatcccaacggattcagtgacccatactgcatgctcggcatactgccagctagtgacgctacacgcgaaccccgggcccaaaaagaacagcgatttggctttaggaagggtagtaagaggggggggcctcttccagccaagtgtatccaggtgacggaagtcaagtcaagcaccctgaatccggtttggaaggagcacttcttattcgaaatcgaagatgtgtcgactgaccaattgcacctggacatttgggatcacgatgatgatgtgtcactcgttgaggcctgcagaaagctgaacgaggtgattggtctgaaaggcatgggtaggtactttaagcagattgtcaaatctgcccgagcaaatgggactgcaggccccacagaggatcacaccgatgatttcctgggatgcctgaacattcccgtgcgtgaggtccccgtggctggcgttgaccggtggtttaagctggaacccagatcgtcggcttccagggtgcagggacactgtcatctggtgcttaagttaattaccacccagcgggataccgccatgtcgcaacgcgggcgcagcgggttcctcagtcatctcctgctattgtcacacctgcttcgccttgagcattcagccgaagaacctaactcatcatcttggaggggtgagctgtctactcctgccgctaccatcctatgtctccatggcgcccagagcaacctatctcctttgcagctagctgtgctgcattggcaggtctctagtagacatcaccaaacctgcacccttgattattcatatctcctaggactccttgaggatatgcaggcccactgggaggaagccccttcattgccgcaggaacaggaggagtcgttggctgatagcctgagtgccttctccgagtttgggctgcagcttcttagacagctgagggactactttccagccacaaatagtacggccgttcacaggctggagcttctgctgaagtgcctcggaaaactccagctgtttcagcccagcttcgagatttgcccgtttgaatctgaattaaacatggatatcgccgctgccttaaaaaggggaaaccgcgagtggtatgatcgcatcctaaacgataagagccctagggaacagcctggcccccaacggctgcccggtctcgtggtactcgctgatgccgtgtacgatgaccttcagttctgttactcagtctacgcaagtctctttcattccatccttaacgtggatgtgtttacgctaacattccgccaactagagaggctggtggccgaagaagcttgggtactgaccgaggaactgagccctaaaatgacacttgaagtggcctcggggctctttgaactgtaccttacacttgcggatctgcagaggttttgggattccatccccggtagagacagtcggtcactcgcattggccggtattcacgcaccgttcttacccgccgttaagctctggtttcaggtgttgagggatcaggccaagtggcgccttcagggtgcagtggatatggacaccctggaacccgtggatgctagctcaagacatagttcgtccgctgccactgcaggattatgcctgtcccacatacaggaactgtgggtgcgcctcgcctggcccgacccggcccaggcccagggtctgggcacacagctgggccaggacgtctgtgaagctaccctgttttacacagaactccttaggaagaaagtggacactcagccaggggctgccggagaagccgtctctgaagctttatgcgtcgtactgaacaatgtggagttagtccggaaagcagccgggcaggcccttaaagggctagcatggcccgaaggggctacaggacctgagggagttttacccaggccactgttatcttgtactcaagctcttgatgatgatctgcaaagggaggcccacacagtgaccgcgcatctgacttcgaaaatggtgggagacatccgcaaatacgtgcagcatatatcactctcacctgattctatccagaacgatgaggccgttgcacctctgatgaagtacttagacgaaaagttggctttattgaatgcatctctcgtaaagggtaacctgtcacgcgtactggaggcactttgggaactcttgcttcaagccattctgcaagcactaggagctaatagggatgtcagtgctgacttttattctagatttcattttactctggaagccttggtctccttttttcacgcagaagggcaaggactgccactcgagtcgctgagggacggcagctacaagcggttgaaagaggaactgcgactccataaatgctccacacgggaatgtattgagcaattttacctggataaactcaaacagcggacacttgagcagaacaggttcggccgactaagtgtaaggtgtcattatgaagccgcagagcagcgtctggctgtggaggttttacacgctgcagatctactccccctggacgccaatggcctttcagacccattcgtcatcgtggagctagggcctcctcatctgtttcctctggtaaggagccaaaggacccaagttaaaacccgaactctccaccccgtgtacgatgaactgttttattttagcgttccggccgaggcatgtagaagaagggcggcctgtgtccttttcacagtcatggaccacgattggcttagcacgaacgatttcgcaggtgaagctgccctggggttggggggtgtgaccggtgttgccaggccacaggtgggtggcggtgcaagggctggccagcctgtcacattgcacctgtgcaggcctagagcccaggtccgcagcgcactgcgtagactggaaggacgcacctcgaaagaggcccaggagtttgtgaagaagcttaaagaactcgaaaagtgcatggaagctgatccatag

SEQ ID NO: 180171 - DNA, 3351 bp, synthetic construct
  misc_feature 1..3351: note = Description of Artificial Sequence: Synthetic coding sequence
  source 1..3351: mol_type = other DNA
atgagcaccctgctggacatcaagagcagcgtgctgcggcaggtgcaggtttgtccttcttttagacgaagaactgaacaggaccccgggtccgccagcgctgacccacaggaaccagccactggagcgtggaagccaggcgatggagtggaatttttcgcccacatgaggcttatgctgaaaaaaggtgagggcaggcagggtctgccatgcctcgaagtgccgctccggtctggtagtccagccccccccgagcccgtggatccaagtctgggcctgcgggcactcgcaccagaggaggtcgagatgctgtacgaggaagctctctatactgtgctttacagagcaggaactatgggaccagaccaagtggatgatgaggaagctttgctgagctacttacaacaagtctttggcacgagcctcgaggagcacactgaagccatcgagcgggtgagaaaagctaaagcaccgacttacgcactgaaagtgtccgtcatgcgggccaaaaacctgctggccaaggatccaaacggattctctgacccttattgtatgttgggaattctccctgcctcagacgcaaccagggagcctagggcacagaaggaacagcgcttcggatttcgaaaagggtcaaaaaggggaggcccacttccagcaaagtgcatccaagtgaccgaggtgaaatcttcaaccttgaacccggtgtggaaagagcacttcctttttgaaatcgaagatgtatccaccgatcagcttcacttggatatttgggatcacgacgatgatgtatcactggtggaggcctgtcgcaaactgaatgaggtgattgggttgaagggcatgggccgctacttcaaacagattgtcaaaagcgcccgggccaatgggactgccggccccactgaggatcataccgacgactttcttggctgtctaaacatcccagtgcgtagagataccgccatgtcccaacgaggaaggtcagggttcctctcccacctgctcctactgtctcatctgctcagactggagcactcagccgaagaacccaatagctcgtcttggaggggagaactgtccactccagcggccaccattctgtgtctgcacggggctcagtctaatctctctccactgcagttggcagtgcttcactggcaggtaagcagcaggcatcatcagacgtgtactctggactattcttacctgctggggttgctggaagatatgcaagcccattgggaagaagcgccctcgctgccacaggaacaggaagagagcctcgctgactctttgagcgcattttccgaattcggcttgcagctcctgcgacaacttcgtgactacttccctgccaccaattcaaccgctgtacatagactcgaactactgctcaagtgcctgggaaagttgcagctttttcagccctctttcgaaatctgtcctttcgaatctgaactcaacatggacattgccgcagccctgaagcgcggtaatagagaatggtatgacaggattctgaacgacaaatccccccgtgaacagccaggcccccagagactgcctggtctggtcgttctggccgacgccgtatatgatgatttgcagttttgctactcagtctacgccagcctttttcacagcatacttaatgtcgatgtttttacactgacattcagacaactcgagaggctcgtggcagaagaagcatgggtgctgacggaggaattatctccaaagatgactctggaggtggcatctggtctgtttgagctttatttaaccctggctgatctgcaacgtttctgggatagtatccctggccgcgattcgaggtccctggcgttggcaggaatccacgctcccttcctccctgccgttaagctttggtttcaagtgctgcgggatcaagccaagtggagacttcaaggagctgtcgatatggacacactggagcccgttgatgcgagcagtcgacactcatcctccgctgccaccgccggactttgcctgtcgcacatccaggagctgtgggttaggctggcctggccagaccctgcacaggcccagggcctgggcacccagctgggccaagatgtctgcgaggctactcttttctacacagagcttttgcgaaaaaaggtcgatacccaacccggagctgctggagaggctgtctccgaagcactgtgcgtggtgctgaataatgtggagcttgtccgaaaggctgcgggccaggccctcaagggcctggcatggcctgagggcgcgactggacccgagggggtactgcccagacctcttttgtcttgtactcaggcactggacgacgacctccaacgggaggcccacaccgtgacggcccacctgacaagcaaaatggtgggtgatattcgtaagtatgtacagcacatctccctcagtccagattccatccaaaatgacgaggcggtagctccactaatgaaatacctggatgaaaaactggcattactgaacgcgtcgctagtgaaaggcaatctttccagggtgctggaagctctgtgggagctcctgcttcaggcaatcttgcaggccctgggcgccaatagggacgtgagcgccgacttttactccaggtttcacttcacactcgaagctctcgtgtcctttttccatgccgaggggcagggacttcccttggaaagcctgcgggatggttcttacaagagattgaaagaagagctgcgtctgcataaatgttccactcgtgaatgcatcgagcagttctacctggacaagctaaaacagcgtacattggagcagaataggttcggccgcctatcagtcagatgccattacgaagccgcagagcaacggcttgctgtcgaggtgctgcatgccgccgaccttctcccactagacgccaacgggctgtctgacccttttgtgattgtggagctcgggccccctcatctgtttcccctggtcagatcgcagcggacccaagtgaagaccaggacactgcaccccgtgtatgacgagttgttttacttctctgtacctgcagaggcgtgtagacggcgggccgcgtgcgtcctgttcaccgtgatggatcatgactggctgagtacaaatgacttcgccggagaagcagcgctcggattgggcggtgtgaccggcgtcgccagaccccaggttggtgggggtgctagggccgggcagccagtgacactgcatttgtgtcgccccagagcccaggtgagatccgcacttcgcagactagaaggtaggactagcaaagaggcccaggagttcgtgaaaaaactgaaggagttggaaaagtgcatggaagcagatccatag

SEQ ID NO: 180172 - DNA, 3459 bp, synthetic construct
  misc_feature 1..3459: note = Description of Artificial Sequence: Synthetic coding sequence
  source 1..3459: mol_type = other DNA
atgagcaccctgctggacatcaagagcagcgtgctgcggcaggtgcaggtctgcccaagttttagaagaaggacagagcaggacccagggagcgccagcgccgatccacaggagcccgccactggagcctggaagcctggtgacggcgtggagttcttcgcccacatgcgacttatgttgaagaagggcgaaggcaggcaaggcctgccttgcctggaggtcccactgagaagcggaagcccggccccaccagagcctgtcgatccaagcctggggctgagagccctcgcccctgaggaagtggaaatgctttatgaagaggccctgtacacagtgctataccgggcggggacgatgggcccggaccaggtggacgacgaggaagccctgctgagttacctgcagcaggtcttcggtacaagtcttgaggagcacacagaggctattgagagagtccgtaaagctaaagcccccacctacgcactgaaggtatcagttatgagagccaaaaacttgctcgcaaaagatcccaatggattttccgacccctactgtatgttaggcatccttccggcctctgacgctactcgggagccacgcgcccagaaggagcagcggttcggttttcggaagggaagtaagcgagggggcccactgcctgcaaagtgtatacaagttaccgaggtgaaatcttcaacacttaaccctgtctggaaggaacactttttattcgaaatcgaggatgtgtcgacagaccagcttcacctcgatatatgggaccacgatgatgacgtttcgctggtggaggcctgtcgaaagctgaatgaagttattggcctgaaaggcatgggacgctacttcaagcaaattgtgaaatctgcacgtgccaatggaacagctggcccaacagaagatcacacagatgacttcctgggctgcctgaacatcccagtccgggaagttcctgttgccggagtcgacaggtggttcaagttggaacctagatcttccgcttcgagggtgcagggccattgtcatctggtgctgaagttgatcacaactcagagagacacggccatgtctcagagaggaagaagtggatttctgtcccaccttcttcttttgagtcatttactgagattggaacatagcgccgaggagccaaatagtagttcctggcgaggcgaactttctacccccgcagctactatcctctgtttgcatggcgcccagagtaatctgtcccccctacagctcgccgtgttgcattggcaggttagctcccgccaccaccagacatgcaccttagattactcttatctcctgggactgctggaggatatgcaagcacactgggaagaagcgccgtctcttcctcaagaacaagaagagagccttgccgacagtctgtccgcctttagtgagttcgggctgcagctcctaaggcagcttagggattacttcccagcgaccaatagtaccgccgtccatagattggagctgctgctgaagtgtctagggaagctgcaactctttcagccgagcttcgagatctgcccgtttgaatcagagttgaatatggacattgcagccgctctgaaacggggcaacagggaatggtatgacaggattctgaacgacaagtcacctagagaacagcccggtccccagaggctgcccggcctcgtggtgctggccgacgcagtgtatgacgatctgcaattctgctacagtgtgtatgcaagcctgtttcacagtattttgaacgtcgacgtgttcactctgacatttaggcaactcgaacgtctggtcgcagaggaggcgtgggttctgactgaagagttgagccccaaaatgacgctagaagtagcatcaggattgttcgaactctacctcacactggctgacttgcagagattctgggacagtatcccaggtcgcgattcccggtccttagctctggccgggattcacgcaccctttcttcccgcagtgaagctgtggttccaggtgctgagagatcaggccaaatggcggttgcagggggcagtcgacatggataccctggagcctgtggacgcatcttctcggcattcaagctctgccgcaacggctgggctatgtctgtcacacattcaggagctttgggtaagactggcttggccagatcccgctcaagcccaggggctgggtactcagctgggtcaagacgtgtgcgaagccacccttttttacacagagctcctgcgtaagaaagtcgacactcagcctggcgccgcaggtgaagcagtgagtgaggcactctgtgtggttctgaataacgtagaactcgtgaggaaagccgcgggacaggccttaaaggggcttgcctggccagagggggcaacaggccctgagggcgtcctgccccgccccctgctcagctgcacgcaagcactcgacgatgacctacagagagaggcccacacagtgaccgcccatctcacatcaaagatggttggggatattagaaagtatgtccaacacatatcactgtcaccagactccatccagaacgacgaagcggtcgctcctctgatgaagtatctagacgagaagctggccctgcttaatgcttcccttgtgaaaggcaacctgtcccgagtgctggaagccctgtgggaattgttgctgcaagctatcctgcaggccctgggggctaacagggacgtgtccgcagacttctactctaggttccattttaccctggaggctcttgtaagctttttccatgctgaggggcaaggactccccctggagtctttaagagatggctcttataaaaggctgaaagaggagctccgattacacaaatgctcgactagggaatgtattgagcaattttacctcgacaaactcaaacagagaacactggaacagaataggtttggtcgcctgtccgtgcgatgccactatgaagccgcagagcagcgacttgccgtggaagtgctacacgcagctgatctgcttccactagacgcgaacggcctgtctgaccccttcgtcattgtggagctcggccctcctcatctgttcccactagtaaggtctcaaaggacacaagtaaagactcgaaccctgcacccagtgtacgacgaattgttctacttttctgttccagcagaggcatgcagaagaagagcagcctgtgtgctctttaccgtgatggatcacgattggctcagtacaaatgacttcgcaggggaagctgctttaggattggggggcgtcacaggggtcgcaaggccgcaggtagggggaggagccagagccggccagccggtgacactccacttgtgtcgaccacgagcccaggtgcgaagcgccctccgtagactggagggtcgtacatctaaggaggcgcaagaatttgtcaagaaactcaaagaattagagaaatgtatggaggcagacccgtag

SEQ ID NO: 180173 - DNA, 537 bp, synthetic construct
  misc_feature 1..537: note = Description of Artificial Sequence: Synthetic coding sequence
  source 1..537: mol_type = other DNA
atgagccagcggggccggagcggcttcctgagccacctgctgctgcttagccacttacttcgactggagcacagcgcagaggagcctaattcgtcttcttggaggggcgaactgtctactcctgctgccacgattctatgtctgcacggcgcccagtctaacttgtcccctctacagctagctgtcctacattggcaggtctcttcacgccatcaccaaacatgcacacttgactactcttatttgctcgggctgctggaggatatgcaggcccactgggaggaggcaccttctctccctcaggagcaggaggagtccctagccgattctctgtccgcctttagcgaatttgggctacagttgctaagacagcttcgcgactactttcccgctacaaactctacagctgtccaccgattggaactactgctgaaatgtctcggaaagttgcagctgtttcagccttcttttgagatctgtcccagagtgggagctgaacatggccactgttgcggccctgaagagaggcagccatag

SEQ ID NO: 180174 - DNA, 1782 bp, synthetic construct
  misc_feature 1..1782: note = Description of Artificial Sequence: Synthetic coding sequence
  source 1..1782: mol_type = other DNA
atggccgccgccagcagcagcgacagcgacgcctgcggcgccgagagcaacgaggctaatagtaagtggctcgacgcacactacgatcctatggctaacattcatacttttagcgcctgtctggctctcgcagatctccacggcgacggcgagtacaagctggtggtaggagacctgggccccggaggccaacaaccccgcttgaaggtcctaaagggcccgcttgtgatgaccgagagtcccctcccagccttgccggctgctgctgcgacatttctcatggagcagcatgaaccaagaacgcccgcacttgccctggcgtccggaccgtgtgtctatgtgtacaaaaacctgcgcccctattttaaatttagcctgccgcagttacctcccaaccctttggagcaagatttatggaatcaggccaaggaagatcgaatagacccgctcaccttgaaggaaatgcttgaatctattcgtgagactgccgaggaaccattgtccattcagtctctacgctttctccagcttgaactgagtgaaatggaagccttcgtcaatcagcacaagtcaaactctattaaacgtcagacggtcattaccacaatgaccactttgaagaagaacctcgcagacgaggatgccgtgagttgcctggtgctgggaacagagaataaggaacttctcgtcttagacccagaagctttcactatcctggccaagatgtcactgcccagtgtcccagtttttctggaggtgtctggacagttcgatgttgagttccggctcgccgccgcttgtaggaatgggaatatttacatcctccgacgggacagtaagcaccccaaatattgcattgagctgtctgcccaacctgtggggcttatacgcgtgcataaggtccttgtggttgggtcaactcaggatagtcttcatggattcacccacaagggaaagaagctttggaccgttcagatgccagccgcaatattaactatgaatctcctggagcaacatagccgcgggctgcaggcagtgatggccgggctcgcaaacggagaggtgcgaatttaccgggataaagctctcctgaacgtcatacatacgcccgacgccgtgacatcgctctgctttgggagatatgggcgggaagacaacactctgatcatgacaacccgcggaggaggtttaataattaagattctcaagcggacagcagtcttcgtagaaggcggatcagaggtgggacccccgccggctcaagctatgaagctaaacgtgccccgcaaaactcggctgtacgtagaccagactcttagggaaagggaggccggaacagctatgcaccgcgccttccagactgatctgtatttgttgcgactccgcgccgcccgcgcctatttacaggcccttgaaagttcattatcacctctgtcaactaccgcccgcgaaccattgaagctccatgctgtggttcaggggctcggcccaaccttcaaactcaccctgcatctgcaaaacacctctacgaccaggcccgtgctcggattgctcgtttgtttcctgtataatgaggccctgtatagtctcccacgggcattctttaaggtgcctctgctggttcctgggttaaactatcccctcgagacatttgtggaaagcctttctaacaaaggaatttcagacataataaaggtccttgtgctccgtgaggggcaatcagctcccctgctctccgcacacgtgaacatgcccgggtcagagggtctggctgccgcgtag

SEQ ID NO: 180175 - DNA, 498 bp, synthetic construct
  misc_feature 1..498: note = Description of Artificial Sequence: Synthetic coding sequence
  source 1..498: mol_type = other DNA
atgagccccggcccccagctgtggcacctgctgcaggccctggtgtctatgtgcattcggatttcagacccaacgagcagtagtgcttgccccaattgtctgcaaatattgtggaacaagacatttggcaccaggcctaaaagggaaaccgctgaagagccactgagtattcagagccttcgattcctgcaattggaactctccgagatggaagcatttgtgaaccagcataagtctaatagcatcaaacgacaaactgtgatcacgacgatgaccaccttgaagaagaacctggccgacgaggacgcagtgtcctgccttgtgttggggactgagaataaggagctcttagtgctggaccccgaggcgtttacaatcctcgcgaaaatgtccttaccttcggttccagtttttcttgaggtttccgggcagtttgacgtagagttcaggctggcagccgcctgcaggaatggcaatatctatatcctccgacggtag

SEQ ID NO: 180176 - DNA, 2172 bp, synthetic construct
  misc_feature 1..2172: note = Description of Artificial Sequence: Synthetic coding sequence
  source 1..2172: mol_type = other DNA
atgctgagcagcatggccgccgccggcagcgtgaaggccgccctgcaagtggcagaggtgctcgaggctatagtgagctgttgtgtaggtccagaaggccgacaggttctgtgtactaagccaaccggcgaagttctcctgtccagaaacggggggaggttgttggaagccctgcacctagagcatccaattgcaagaatgatcgtcgactgcgtcagttcccatcttaaaaaaaccggagacggagccaagacattcatcatattcctttgccatctgctcagaggattacatgctataacggatcgggaaaaagacccgctaatgtgtgaaaacattcagacccatggaagacattggaagaattgcagtaggtggaagttcatctcacaggccctactcacgttccaaacccagattctggatggcattatggaccagtatctgtcacgccatttcctttcaatcttctcttctgccaaggagcgtactctgtgtcgctcaagcctagaactcctgttggaggcatacttttgtggaagagtgggtcgcaacaatcataaattcatctcccaattgatgtgtgactacttttttaagtgcatgacttgcaaatccgggataggtgtcttcgaacttgtagacgatcatttcgtggaactgaacgtcggggtgacgggacttcccgtgtccgattcaagaattattgcaggtctggtcctccagaaagactttagtgtctaccgcccagccgatggcgatatgcggatggtgattgttactgaaacaatccagccactttttagtacctctggctcggagtttattctgaactctgaggcccagttccagacaagtcagttttggattatggagaaaacaaaggctatcatgaagcatctccactctcagaatgtgaaactcttaattagtagcgtcaagcagcccgacttggtctcttactatgctggcgtgaacggcattagcgtggtggaatgcctgtcttccgaagaagtgtcattgattcggagaatcatcgggctgtcaccatttgttcccccacaggcattcagtcagtgcgagattcctaatacagctctggtgaagttttgcaagccactgattttacgctccaaaaggtatgtccatctgggactgatctccacttgtgcgttcataccccactccattgtgctgtgcggtccagttcacggtctcatcgagcaacacgaggacgctttacatggggccttgaaaatgcttcgccagttatttaaagatttggatcttaactatatgacacagaccaacgaccagaacggaacatcctcactatttatatacaaaaacagtggggagtcctaccaagcccctgaccccggcaatggaagcattcagagaccctaccaggacactgtggcggaaaacaaggacgctctcgaaaaaacccagacatacctgaaagtgcattctaacctcgttatacctgatgtcgagctggagacatacattccatattctactcctacactgaccccaacagacacttttcagactgtcgagaccctgacttgtctgagtctggagagaaatcgtctgaccgattattatgaacccctgctgaaaaataactcaacagcttacagtaccagggggaataggattgagatctcctacgaaaacttacaggtgactaacattaccaggaaagggtctatgctccccgtgtcgtgtaaactgccaaacatggggacgagtcaaagctatctatcttcgtccatgcccgctggctgtgtcctaccagtcggcgggaacttcgagattctgctccattattatctgttgaactacgccaaaaagtgccaccagtccgaggagacgatggtgagcatgatcatcgccaatgctttgttaggcattcccaaagtactgtacaagagcaagaccggcaaatactcattcccacacacatacattagggctgtgcacgccctgcagacaaatcagcccctcgtctcatctcaaaccgggctcgagtctgttatgggcaaataccagctcctgacctctgtgctgcagtgcctaactaaaattctcactattgatatggtgataactgtgaagcgtcatcctcaaaaagttcacaatcaggactctgaggatgagctctag

SEQ ID NO: 180177 - DNA, 2133 bp, synthetic construct
  misc_feature 1..2133: note = Description of Artificial Sequence: Synthetic coding sequence
  source 1..2133: mol_type = other DNA
atggtgatggcctgccgggtggtgaacaagcggcggcacatgggccttcagcagctctcatccttcgccgagaccggcagaacttttctggggcccctgaagagctccaagttcattattgacgaggaatgccatgagtctgtgctgatttctagcactgtcaggctgttagagtctcttgatctgacctccgccgtagggcagcttctgaatgaagctgtccaagctcaaaataatacctaccgcacgggtatcagtaccctgctctttctggtcggcgcgtggagctccgcagtggaggagtgtctgcacctgggcgttcctataagcatcatcgtcagcgttatgtcggagggcctgaatttttgtagcgaagaggttgtcagtctgcatgtaccagttcataatatattcgattgcatggattccaccaagactttctctcagctcgagacattttccgtgagtttatgccccttcctgcaggtccccagcgacaccgaccttatcgaggaattacacggactcaaggacgtcgcgtctcagactttaacaatctctaacctgtcagggaggcctttgaagtcttacgagttattcaaaccgcagacaaaggttgaggccgacaacaacaccagccgcaccctgaagaattccttattggcggatacctgttgcaggcagtctattctgattcattcaaggcatttcaacagaaccgacaatacggagggggtgagcaaaccagacggcttccaagagcatgtgacagcaacacacaagacgtatcgatgtaacgatctggtggagctcgccgttggtctcagccacggcgaccactcatccatgaagctggtcgaggaagctgtacagctgcagtatcagaacgcctgtgtgcagcagggaaactgtaccaaaccattcatgtttgatatatctcggatctttacctgttgcctcccaggcctacctgaaacgagttcctgtgtgtgccccggatacattacggtggtctcagtgtccaacaatcccgtgataaaagagctccagaatcaacctgtgaggattgtgctcatcgaaggcgacctgaccgagaactaccgtcacttgggcttcaataaaagcgcaaacatcaagacagtgctcgattccatgagacttcaggaagatagctccgaggagctgtgggctaaccatgtactgcaggttctaatccagttcaaggtgaatctcgttctggtgcaggggaatgtctccgagaggctcattgagaagtgcatcaatagcaagaggttggtgattggctccgtcaatggatccgttatgcaggcctttgccgaggcggccggcgccgtccaggtggcctacatcacacaggtcaacgaagactgtgtaggcgacggcgtctgtgtgacattctggcgctcttctcccctcgatgtggtcgatagaaataatcgcattgctattcttctaaagacagagggaatcaatcttgttacagcggtgcttacaaatccagtgactgcgcagatgcagattaaggaagacaggttttggacttgcgcctatagactctactacgcactcaaggaagagaaagtgtttctggggggtggcgccgttgagtttctctgtctcagctgcctgcacatcctggccgaacagtcactcaagaaggaaaaccatgcatgctctgggtggctgcataacacctcatcctggctggcatccagtcttgccatctatcgccccactgtactgaagttccttgctaacggatggcagaaatacctttcaaccctgctgtataacactgccaactacagcagcgagttcgaagcttctacctacattcagcaccatttgcagaacgccacggacagtggcagcccctctagttacatcctgaacgagtattcaaaattaaattcaaggatctttaactctgacatcagcaacaaactggaacagatccctcgcgtttatgacgtcgtcaccccaaaaatcgaggcctggcgcagggctttggatttagtcttgctggtcttgcaaactgacagcgagatcataaccggccacggacatactcagataaacagtcaggaacttacaggttttttgttcctatag

SEQ ID NO: 180178 - DNA, 576 bp, synthetic construct
  misc_feature 1..576: note = Description of Artificial Sequence: Synthetic coding sequence
  source 1..576: mol_type = other DNA
atggtgatggcctgccgggtggtgaacaagcggcggcacatgggcctgcaacagctttccagcttcgccgaaactggacgcacctttctcgggcctttaaagtcctcaaaatttataatcgatgaagagtgccacgaatccgtgcttatctcctcgacagttcgcttgctggagagtcttgatctgaccagtgccgtggggcagctacttaacgaggctgtgcaggcgcagaacaacacgtaccgtaccggaatttctacactgttgtttctagttggcgcgtggtcttccgctgtggaagaatgcttgcacctgggcgtccctatctccataatcgttagcgtcatgtctgaaggactgaacttctgttccgaagaggttgtaagcctccacgtgccggtgcataatatattcgactgtatggattctaccaagacatttagtcagcttgagacgtttagtgtatccctatgtccctttttgcaggtgccctctgatacagatctcatcgaagaactgcatggcctcaaagacgtggcatcccaaacccttaccatatctaatctgtcaggatag

SEQ ID NO: 180179 - DNA, 2133 bp, synthetic construct
  misc_feature 1..2133: note = Description of Artificial Sequence: Synthetic coding sequence
  source 1..2133: mol_type = other DNA
atggtgatggcctgccgggtggtgaacaagcggcggcacatgggcctgcagcagctcagctccttcgctgaaacaggtcggacatttttaggaccactgaagtcaagcaaattcataatcgacgaggagtgccatgaatccgttctcatctcctcaacagtgcgcctcctggaaagtttagatcttacttcagctgtgggtcaactgctgaatgaggctgtccaggctcaaaacaacacctacagaacaggaatctctacactgctgttcctagtcggggcatggagctccgccgtggaagaatgtctgcacttaggagtgccaatcagcattatcgtctctgtgatgtcagagggcctgaatttttgcagcgaggaggtggtgagcctacatgtccccgtccacaacatcttcgactgtatggatagtaccaagactttctcccagttagaaactttcagcgtcagtctgtgcccatttttacaggtgcccagtgacaccgacctgattgaggaactacacgggttaaaagacgtggcatcccaaacactcaccattagcaacctgtccgggcgacccctgaagtcctatgaactcttcaagcctcaaactaaagtggaggcagacaataacacctcccgtaccctgaagaacagccttctggctgacacctgttgtagacagagcatcctaattcactctcgacactttaaccgtaccgataacactgaaggagtgtccaaacccgacggtttccaggagcatgtcaccgccacacacaaaacttatcgttgtaacgatcttgtcgaactggcagtaggactttctcacggtgatcactcctccatgaaactggtcgaggaggcagtccagctccagtatcagaatgcttgcgttcagcagggcaactgtacaaagcctttcatgttcgacatatccagaatttttacctgctgcctccctgggctgccagagacctcgtcttgtgtgtgccccggttatatcaccgtggtttccgtgagcaataatcctgtaataaaggaactgcagaaccagccagtgcgtattgtgttgattgagggagatctcactgagaattaccgacatctggggttcaacaaaagtgctaatattaagactgttctggacagcatgcgcctccaggaagactcaagtgaagaactgtgggctaatcacgtcctgcaggtcctgatccagttcaaggtgaatctggtcctggtccagggcaacgtgtctgaacggcttatagaaaagtgcataaattccaagagactcgtgattgggtcagtgaatggcagtgttatgcaggcttttgcagaggccgcaggcgccgtgcaggtggcctatataacccaggtgaatgaagattgcgtgggcgatggcgtgtgtgtgacattctggaggtcgagtccccttgacgtagtcgatcgcaataaccggatcgccattctcctcaaaacagaagggattaatctcgttacagccgtgttgactaacccagttacagcacagatgcagatcaaggaggaccgtttttggacgtgcgcttaccggctgtactacgcccttaaagaggagaaggtatttctcgggggcggcgccgtcgagttcctgtgcctctcttgtttacatatattggccgaacagtctttaaagaaggagaatcatgcctgctctggctggcttcataacaccagctcgtggctagctagttcattggcaatctatcggcctacagtgttgaagttcttggccaacggttggcagaaatacctctccaccctgctgtacaacacggcaaattacagctctgaattcgaggctagcacatacatccagcaccacctgcagaatgctactgatagcggcagcccttcctcatatattctcaacgaatacagcaaactgaactcacgaatttttaactctgatatctccaataagcttgagcagatccctcgcgtgtacgacgttgtgacaccgaaaattgaggcatggcgaagggcacttgatttggtcctgctggtgctgcagacagattcagaaatcattacaggacacgggcacacacagataaactcgcaggaactgacggggttcttgtttctgtag

SEQ ID NO: 180180 - DNA, 2166 bp, synthetic construct
  misc_feature 1..2166: note = Description of Artificial Sequence: Synthetic coding sequence
  source 1..2166: mol_type = other DNA
atgctgctgcccgtgttcaccctgaagctgcggcacaagatcagcccccgaatggtggccatcggccgctacgatgggacacatccgtgccttgccgcggctacacagaccggcaaggtgtttatccataacccgcatacgcgcaaccagcacgtctctgcctctcgggtctttcagtccccattggaatccgatgtgagcctcctgtctatcaatcaagctgtatcatgcctgactgcaggggtgctgaacccagagctaggctacgacgcacttctggtgggcacacagactaacttgctggcttacgatgtgtacaacaattctgacctgttctaccgcgaagtggccgacggtgcgaatgcgatcgtgcttggaacgctcggcgatatctctagcccccttgccatcataggcgggaactgcgcccttcagggcttcaaccacgaggggtctgacctgttctggacagtgaccggggataacgtgaattctctggccctctgtgattttgatggggatggtaagaaggagcttttagtcgggtctgaggattttgacattcgggttttcaaggaggacgaaatcgtggctgagatgaccgaaactgaaattgtgacgagcttatgtccaatgtacggttctcgctttggatacgcactgagtaatgggacggtcggcgtgtacgataagactagccgctattggcggatcaaaagcaaaaaccatgccatgagcatccacgcctttgacctgaatagtgacggcgtaaatgaactgattaccggttggagtaatggtaaagtggatgcaagatccgaccggacaggtgaagtaatcttcaaagacaatttttcatccgcaattgccggcgtcgtggagggggattataggatggatggtcatatccaactcatttgctgtagcgtagacggggagattagaggttaccttccaggcactgctgaaatgaggggaaatctcatggatacttctgctgagcaagatcttatcagagaactcagtcagaagaaacaaaacctgctgctggagctgcggaattacgaggaaaacgcaaaggctgaattggcgagcccgctgaacgaggcggatggtcacagggggataatccccgcaaacactaggttacacactaccctatccgttagccttggtaacgagacgcagactgcccatactgagctgcggattagcacctcgaatgatactataattagggcggtcctcattttcgctgaagggattttcacaggggagagccacgtagtacatccatccattcacaacctcagctcttctatctgtataccaattgtccctcctaaggatgtgcccgtcgacctgcacctgaaagcttttgtgggatatcgctcaagtacccagttccatgtgtttgaaagtacccgccagctgccccgcttctcaatgtatgcgctgacttccctggatccggcgtccgagccaattagctatgtcaacttcacaattgcggaacgcgctcaacgggtagttgtgtggttgggccagaatttcctgctgcctgaggacacacatattcagaacgctccgtttcaagtttgttttacctcacttcgaaatggagggcacctccatatcaagatcaagctttctggcgagattactatcaatactgatgatattgatctagcaggggacatcatccagtcgatggcatcttttttcgctatcgaggaccttcaggtggaggccgactttcctgtgtattttgaggaactgaggaaagttcttgtaaaggtggatgaataccactcagtccaccaaaagctttcagccgatatggcggatcacagtaatctgatccggagcctgctggtgggggccgaggatgcacggttgatgagggatatgaaaacaatgaaatcccgctatatggagttatatgacctgaatcgggacctgctgaacggctacaagatccgatgcaataatcataccgagctgctggggaatctgaaggccgtgaatcaggccatccagagagcgggccggctgcgcgttggcaagcccaaaaatcaggtgataactgcttgtagggacgcgataagatcaaacaatattaatactctgttcaagattatgagggtcggaaccgcatctagctag

SEQ ID NO: 180181 - DNA, 1560 bp, synthetic construct
  misc_feature 1..1560: note = Description of Artificial Sequence: Synthetic coding sequence
  source 1..1560: mol_type = other DNA
atggccgaggagcgggtggccacccggacccagttccccgtgagcactgagagccaaaagccgaggcagaaaaaggctcctgagtttcccattctggaaaaacaaaattggcttatccatctacactatattaggaaggactacgaggcttgtaaggccgtcataaaggagcagctacaagagacccagggactttgtgaatacgcaatatatgtgcaggccctgatctttcggctagaaggtaacatccaggagtccttggagttatttcaaacctgcgccgtgctcagcccccagtcggcagacaaccttaagcaggtcgcacgatccctgttcctcctcggcaaacacaaggctgccattgaggtctacaacgaggcagccaaactgaatcagaaggactgggagataagtcataaccttggagtctgctatatttacctgaaacagtttaacaaggcgcaggaccaattgcataacgctctcaatctgaaccggcacgatttaacctacatcatgctgggaaaaatccacctgctggaaggcgatctggataaggcaatcgaagtttacaaaaaggccgtggagttctcgcctgagaatacggagctgctcacgactctcggactcttgtatttgcaattaggcatctatcagaaggcttttgaacatctcgggaacgcccttacctacgatccaactaattataaggccatccttgccgccggttcgatgatgcagactcacggcgactttgacgtggccctgacaaagtaccgcgttgtcgcctgtgccgtgcccgagtcgccccccttgtggaataacatcgggatgtgtttctttggtaaaaagaagtatgtggcagcaatctcatgcctgaaacgggctaactacctggcaccattcgactggaagattctttataatttgggcctcgtccacttaaccatgcagcagtacgcctctgccttccacttcctgagcgctgcgattaattttcaacctaagatgggcgagctgtacatgctcttggccgtcgccctgaccaacttagaggacattgagaatgctaagcgcgcttatgcagaagcagtccatttagataagtgtaacccactggttaatctgaattacgctgtgctgctgtacaatcagggggagaagaaaaatgccttggcccagtaccaggaaatggagaagaaagtgagcctgttgaaagataatagttcgctagaattcgatagtgagatggtggaaatggcccagaagctaggagccgcccttcaggttggggaggcactggtttggaccaaacccgtcaaggacccgaagtcaaagcaccagactacatcaactagtaagcctgcgtcgttccagcagcctcttggttcgaaccaagccctgggccaggctatgagctccgcagcagcctataggaccttaccctctggggctggcggaacaagccagttcacaaaaccccccagcctgcccctggagcctgaacctgcggtggagtcatctccgaccgagacctccgaacagattagagagaaatag

SEQ ID NO: 180182 - DNA, 1584 bp, synthetic construct
  misc_feature 1..1584: note = Description of Artificial Sequence: Synthetic coding sequence
  source 1..1584: mol_type = other DNA
atggccctgaccgtggtgcccagcttcagcgtgagcggcgtgtggaaacgtactcagtttccggtcagtacagaatcacaaaagcctcgacagaagaaagcccctgaatttcccatcctggaaaaacagaattggctgatccacctacactatattaggaaggattacgaagcgtgtaaggcagtgattaaggaacagctgcaagagacacagggcctctgtgaatacgcgatctacgtgcaggctctgatctttcggctcgagggtaatattcaggagagtctggagcttttccagacctgtgccgtcttgtcccctcagtctgctgacaacttaaagcaggtggccagaagtttattcctccttggtaaacataaagctgccattgaggtgtataacgaggctgcgaaactgaaccagaaagactgggagatctctcacaatctgggggtgtgttatatttacctcaaacaatttaacaaagcccaggaccagctccataatgcgcttaaccttaaccggcatgatctgacatacatcatgctggggaaaatccaccttttggaaggcgatctagataaggccatcgaagtgtacaagaaagctgtcgaatttagccctgaaaacacagaactgctcaccactctgggactgttgtatttgcagctgggtatctaccagaaggcatttgagcatctaggaaacgcgctcacctatgaccccacgaattacaaggccatcctcgccgccgggagcatgatgcagacacacggagactttgacgtggctcttacgaaataccgagtggtggcctgcgccgtccccgaatccccgcctctgtggaacaacatcggtatgtgtttcttcggaaagaagaaatatgtggctgccatcagttgtctcaaacgagcgaattacttagcccccttcgactggaagattctgtacaacctgggcctggtgcacctaactatgcagcagtacgcgtctgcctttcacttcctgtctgccgccataaactttcaacccaaaatgggggaattgtacatgctgctagccgtcgcccttaccaatcttgaggacatcgagaacgccaaaagggcatacgctgaggcggtgcacctggacaaatgtaatccattggtcaatctgaactatgccgttcttctgtataatcaaggggagaagaagaacgctttagcccagtaccaggagatggaaaaaaaagtgtcgctgctgaaggataattcctccctggagttcgatagtgaaatggtggaaatggcccaaaagctgggtgccgccctgcaagtgggagaggccctggtctggaccaaaccggtaaaagatccaaagtctaaacaccagactacctctacgagtaagcccgctagtttccagcagccgctgggttcaaatcaagccctgggccaggccatgagctctgccgccgcatataggactttaccgtcgggagccggcggcacctcacagtttacaaagccgcccagcttgcctctggagccagaaccagcagtcgaatcctcgccaacagagacttccgagcaaataagagagaagtag

SEQ ID NO: 180183 - DNA, 1524 bp, synthetic construct
  misc_feature 1..1524: note = Description of Artificial Sequence: Synthetic coding sequence
  source 1..1524: mol_type = other DNA
atgatctggaacacccggaacagcacctacatcttcaccgcccccgaatttcctattctggaaaaacaaaactggctgatacacctgcactatatccgaaaagactacgaagcttgcaaggccgtgatcaaggagcaacttcaggagacacagggactttgcgaatatgcaatctatgtgcaggccctgatttttcgcctcgagggaaacattcaagagtccttggagctgtttcagacttgcgctgtcctgtcacctcaatccgcagataacctcaaacaagtggcaagaagtttatttctcttgggcaagcacaaggctgctattgaagtttacaatgaggcagcaaagcttaatcagaaggattgggagatttcacataatctgggggtgtgctatatctacctcaaacagtttaacaaggcccaagatcaactacataacgctctgaatttgaataggcatgacctcacatatattatgttagggaaaatccatctgcttgagggtgatcttgacaaagccatagaagtgtataaaaaggctgttgaattcagtcccgagaacactgagctgcttactactctgggactgctttacctgcagctaggaatttaccagaaggcctttgagcacttaggcaacgctctaacctacgacccgacgaattataaagctatcttggccgcaggaagcatgatgcaaacccatggcgattttgacgtggctctcaccaagtatcgcgtagtggcctgtgccgtgcctgagtcccccccattatggaataatatcggcatgtgcttctttggcaagaagaaatacgtggctgctatttcttgtctcaaacgggcgaattatctggccccattcgactggaagatcttgtacaacctggggctcgtgcatctgacaatgcaacaatacgcctctgctttccatttcctaagtgccgctattaatttccagcctaagatgggggaactctatatgctgctcgcagttgccttaaccaacctcgaggatatcgaaaacgccaaaagagcgtacgccgaggccgtgcacttggacaaatgtaatcctctcgtgaacctgaattacgccgtgctgctctacaatcagggagagaagaagaacgctctggctcagtaccaagagatggagaagaaggtgagcctgttgaaggataacagctctctggaattcgacagcgaaatggtagagatggcccagaaactgggggccgccctccaggtgggggaagcgctggtgtggacgaaaccagtgaaagaccctaagtcgaagcaccaaactactagcacaagtaagcccgcttccttccaacagccactggggagtaaccaggccttgggccaggctatgagttccgctgctgcataccgtacactgccatccggagcgggggggacctcacagtttacaaagcctcctagcctgccacttgagcctgagcctgccgtagagagctcgcctaccgaaaccagcgagcagattagggagaaatag

SEQ ID NO: 180184 - DNA, 1044 bp, synthetic construct
  misc_feature 1..1044: note = Description of Artificial Sequence: Synthetic coding sequence
  source 1..1044: mol_type = other DNA
atgctgggcaagatccacctgctggagggcgacctggacaaggccattgaagtgtacaagaaggccgtggagtttagccccgagaatactgagcttcttacaactctggggctgctgtacctgcagctaggaatttatcagaaggcctttgaacatctcgggaatgcactaacctatgatcccactaattacaaagctattcttgccgcgggcagcatgatgcagacacatggagatttcgatgtcgcgctcaccaaatatagagtggtggcatgcgcagtgcctgagtccccccccctgtggaataacatcggcatgtgcttcttcgggaaaaagaaatatgtggcagccatctcttgcctgaagcgggctaattaccttgctccgtttgactggaagattctctacaacttgggtttagtccacctcacaatgcagcaatacgcctcagcattccactttctgagcgcggccatcaactttcaacctaaaatgggcgaactgtacatgctgctggccgtggccttaaccaatcttgaggatatagagaatgcaaagagagcctatgccgaagcagttcaccttgataagtgtaacccgctggtcaatctaaattatgctgttctactgtacaaccagggagagaaaaagaacgcacttgcccagtaccaggagatggagaagaaggtcagccttctcaaagataactcgagtctggagttcgactccgaaatggttgagatggcgcagaagctcggtgccgcactgcaggtgggcgaggccttagtctggaccaagccggtgaaagacccaaagtcaaagcatcaaaccaccagcacgtccaagccagcctcttttcaacaacccttgggctcaaaccaggctctggggcaggcaatgtcttcagccgctgcctacagaaccctcccgtcgggcgctgggggtacatctcagttcaccaagccaccttctcttccactggaacctgagccagctgtggaatcgtcacctacggagacttcagaacaaattcgcgaaaaatag

SEQ ID NO: 180185 - DNA, 1026 bp, synthetic construct
  misc_feature 1..1026: note = Description of Artificial Sequence: Synthetic coding sequence
  source 1..1026: mol_type = other DNA
atgagcgtgctggacgccctgtgggaggaccgggacgtgcggttcgatctgtcggctcaacagatgaagactcggcctggcgaagttctgatcgattgcttggattctatcgaggatactaaagggaacaatggcgatcgtggtcgactgttggttaccaatctgcgaatactctggcactccctggctttatctcgcgtcaacgtgtctgtggggtataattgtatcctaaacatcactaccaggactgccaacagcaagcttagaggccagacggaagccctgtatatcctcacaaagtgtaactcaacccgcttcgagtttatctttaccaacctagtgcccgggtcgcctcggttattcaccagcgttatggctgtacatcgtgcatacgagacctccaaaatgtacagggattttaaattgcgcagtgcccttattcagaacaaacagctgcggctgctcccccaggaacatgtctatgataagatcaatggtgtgtggaatctatccagcgatcagggtaatctggggacattctttattacaaatgtgcgaatcgtgtggcacgctaatatgaacgacagttttaacgttagcatcccctatcttcagattcgctcaattaaaattcgtgacagtaaattcggtctcgctttagtgatcgaatcgtcccagcagagcgggggatatgtgcttggcttcaaaatcgatcctgtcgaaaaactgcaggaaagcgtcaaggagatcaactcgctccacaaagtgtactctgccagtcctatctttggagtagactatgagatggaagagaaaccacaaccattggaagcactaactgtagaacagattcaagacgacgttgagatcgattctgatggacacactgacgcctttgtagcttatttcgcggatggaaataagcagcaggaccgcgaacctgtattctctgaggaactcggactggctatcgagaagcttaaggacgggttcactttacagggtctctgggaggtcatgtcctag

SEQ ID NO: 180186 - DNA, 963 bp, synthetic construct
  misc_feature 1..963: note = Description of Artificial Sequence: Synthetic coding sequence
  source 1..963: mol_type = other DNA
atgagcgtgctggacgccctgtgggaggaccgggacgtgcggttcgatctgagcgcacagcagatgaagacgcggccgggcgaggttctaatcgactgcctggacagcatcgaagatactaaagggaacaacggtgaccggggccggctgcttgtcaccaacttgcggatcctctggcactccctcgccttgtctcgggtcaacgtgtcagttggatacaattgcatcctgaatatcaccacacggaccgccaacagtaagcttaggggccagacggaagcgttgtatattctgacaaaatgcaattcaactagattcgagttcatcttcactaatttggttcctggctctccccggctatttacgtcagttatggcggtgcatcgcgcatatgaaacaagcaagatgtaccgggactttaaactgcggagcgcgctcatacaaaataagcaactacgattgttgcctcaggaacatgtgtacgataaaattaatggcgtgtggaatctctccagtgatcagggcaatcttggcacattttttatcacaaatgtgcgaatcgtatggcacgccaatatgaacgatagctttaacgtgtctatcccctatctgcaaatctctggaggatacgtgctgggcttcaagatcgaccctgtggaaaagctacaggaaagcgttaaggagattaattcattgcacaaggtctacagcgccagccctatcttcggggtcgattacgagatggaggagaagccacagccactggaggccctgactgtggagcagattcaggacgatgtggagattgattctgacggtcatacggatgcgttcgtagcttatttcgcagacggcaataaacagcaggatagagagccggtcttctctgaggaattaggtttggctatagaaaagctcaaagacggctttacactccagggcctgtgggaggtcatgagctag

SEQ ID NO: 180187 - DNA, 1635 bp, synthetic construct
  misc_feature 1..1635: note = Description of Artificial Sequence: Synthetic coding sequence
  source 1..1635: mol_type = other DNA
atgagcgtgctggacgccctgtgggaggaccgggacgtgcggttcgatctgagtgctcagcagatgaaaaccaggcccggcgaagtactgatagactgtttggacagtattgaggatactaagggcaataacggggaccgagggcgactgttggtgaccaatttgagaatactgtggcattccttggccctatccagggtgaatgtttcagtggggtataattgtatactgaatatcactacaaggactgccaactctaagctgaggggacagacggaagcgctgtacatcctaactaaatgtaacagtacaagatttgagttcatcttcaccaatctggtcccagggtccccacgcctattcacaagtgtgatggccgtccacagggcatacgagacttccaagatgtatcgagatttcaagcttcgctcggctctaatccagaataagcagctcaggctgcttccgcaagaacatgtgtacgataagatcaatggggtatggaacctgtcttctgatcaggggaacttgggtacattctttataacgaacgtgagaatcgtgtggcacgccaacatgaacgattcatttaacgtgagtataccatatctccaaatcagatctatcaaaatccgcgattcaaagttcgggctcgctttggtaatcgaatcaagccagcagtctggcggctacgtcctgggattcaagattgacccagtggaaaagctgcaggagagtgttaaggagatcaactctttgcacaaggtgtactccgccagtcccatcttcggagtcgactatgaaatggaagaaaagcctcagcccctcgaagctcttacagtggagcaaatacaagatgacgtagaaattgacagcgacggccacactgacgccttcgttgcgtactttgctgacgggaacaagctggacagcatcgcttcggaatgggtgggtctgccacctttaccctctgcgaggtgcctctttgggcttggggaggtggatgacaagatctatgttgtggcaggtaaagacctgcagacagaagcgtctctggacagtgtgctctgttatgatcctgtcgccgcaaaatggaacgaggtgaagaagttgccgattaaggtttatggacataacgtgataagccacaagggcatgatatactgcctgggcggtaaaactgatgacaagaagtgcacaaatcgtgtgttcattttcaaccccaagaaaggagattggaaggatttagcgcctatgaagatccccaggtctatgttcggtgtggctgtgcataagggcaagatcgtcatcgcaggtggtgtcacggaggatggactatccgcatcggttgaggcattcgatcttactaccaataagtgggacgtaatgaccgagtttccgcaggagagatcgtcaatctctcttgtgtcactcgccgggagtctctacgctattggagggttcgccatgatccaactggagtcaaaagaatttgctcctactgaggttaacgatatttggaaatacgaagacgataaaaaagaatgggctggaatgctaaaggaaataaggtatgcttccggggccagttgtctggctactagacttaacctgttcaagctcagcaaactttag

SEQ ID NO: 180188 - DNA, 2148 bp, synthetic construct
  misc_feature 1..2148: note = Description of Artificial Sequence: Synthetic coding sequence
  source 1..2148: mol_type = other DNA
atggacctgatcctgaaccggatggactacctgcaggtgggcgtgacttctcagaaaactatgaagcttatccctgcatcaagacaccgcgctacccaaaaggttgtaatcggggatcacgacggtgtcgtcatgtgcttcggaatgaaaaaaggtgaggccgccgccgtgtttaaaaccctccctggacccaagatcgcccgactggagctgggcggagtgattaacactcctcaggagaaaatctttatcgcagccgcttctgaaatccgaggcttcaccaaacgcggcaaacagtttctgagcttcgagaccaatctcactgagtcaattaaagcaatgcacatatctgggtctgacctctttctgagcgcctcgtatatttataatcactactgcgactgcaaggatcaacactattatttgtcaggagacaagatcaacgacgttatttgcctgcctgtggaacggctcagcaggatcactccagtgctggcttgtcaggatcgcgtgctccgtgtcctgcagggaagtgacgtgatgtatgctgttgaggtccccggaccaccaactgtgctggcactgcataatggcaacggcggagactccggcgaagatctgttgtttggcacatctgatgggaaactggccctgatacagatcaccacttctaaaccggtccggaagtgggagatccagaacgagaaaaaacgaggtggtattctgtgcatcgacagcttcgacatcgtgggggacggcgtaaaggaccttctggtggggcgcgacgatggtatggttgaagtgtattccttcgataacgccaacgagcctgtcctccggttcgaccagatgctcagcgagtcagtcacctcaatacaaggcggttgcgtgggcaaggactcatatgacgagatcgttgtatctacatacagcgggtgggtgaccgggctgactacggagccgatacataaagagtcagggcccggagaagaactgaagataaatcaggaaatgcagaacaagatttcctcactgagaaatgaactcgaacatcttcagtacaaggtgctgcaggaacgagagaattatcaacagtccagccagtccagtaaggcaaagagcgcggtccctagcttcggtatcaatgataagtttaccctcaacaaagacgatgcctcatactcgctgatccttgaggttcaaacggctattgacaacgtgctgattcaatctgacgtgccaatcgacctgctagacgtcgacaaaaacagcgcagtggtctcctttagcagttgcgattccgagagtaacgacaacttcctactggctacttatcggtgccaagccgacactacaaggctggagctgaagattaggagtatcgaagggcagtacggtactctccaggcgtatgttacgcctagaatacagccgaaaacttgtcaggtgcgacaataccatatcaagccactctccctccaccaacggacacatttcatagatcatgatcgtccaatgaacactctcaccctgactgggcagttctcctttgcagaggtccattcctgggtggtcttttgcctccctgaagttcctgagaaacctcctgcaggcgaatgtgtgactttctacttccagaacacttttctggacacccagcttgaaagcacttaccggaagggtgaaggcgttttcaagtctgataatatcagtacaattagtattttgaaggatgtgttatctaaggaagctaccaagcgcaagataaaccttaatatctcatacgaaattaacgaggtctccgtcaaacacacgcttaagctgatacatccaaaactggagtaccagctccttcttgcaaaaaaagtgcagttgatagatgctctgaaggagctgcagattcacgaaggcaacactaatttcctcatcccagaatatcactgcatactggaagaggctgatcacctacaggaagagtacaaaaagcaaccggctcatctggagcgcttatatgggatgattactgacctgtttatagataagtttaaatttaaagggacgaacgtaaagactaaagttccactgctgctggagatcctggacagctacgatcagaatgctctgatctctttttttgatgcagcttag

SEQ ID NO: 180189 - DNA, 2019 bp, synthetic construct
  misc_feature 1..2019: note = Description of Artificial Sequence: Synthetic coding sequence
  source 1..2019: mol_type = other DNA
atggacctgatcctgaaccggatggactacctgcaggtgggcgtgacatcacagaaaacgatgaaactaattccagcatcccggcacagggccacccagaaggtcgtcattggagatcacgacggtgtggtcatgtgttttggcatgaagaaaggagaagctgctgctgtatttaagaccctgcccggcccaaagatcgcacggctggagctgggcggagtgatcaacacaccacaggagaaaattttcattgcagccgcctctgaaattcgcggttttacaaaacgcggcaaacagtttctaagttttgagactaacctgacagagagcattaaagcaatgcacatcagcgggtcagatcttttcctatctgcgtcatacatctacaatcactattgcgattgtaaggaccaacattattacctgagcggcgacaaaatcaacgatgttatctgtctgccagtcgagcggttgagccggataactcccgtcctcgcctgtcaagacagggtgcttcgagttcttcagggttccgacgtaatgtatgccgtcgaagtgccaggacccccaactgttttggccctgcacaacgggaacgggggggattcgggggaagacctgctgtttgggactagcgacgggaaattagcactgattcagattaccaccagcaaacccgtgaggaagtgggaaattcagaatgagaagaagaggggcggtatcttatgtatagactcttttgatattgtaggagacggcgttaaagatttgttagtgggcagagacgatggcatggttgaggtgtatagctttgataatgccaacgagcctgtgctgcgatttgatcagatgctcagcgagtcagtgacatccattcagggcggctgtgtggggaaagactcttacgatgagattgtcgtcagcacctactccggctgggtgaccggcctcacaacagaaccaattcacaaggaaagtggacctggtgaagagttaaaaattaaccaggagatgcaaaacaaaatatcctctctgcgcaatgagcttgaacacctgcagtataaggttctccaagaacgagaaaactaccagcagtcatcacaatcttctaaggccaaaagtgcggtgccaagcttcggaatcaacgacaagtttacgttgaacaaggacgacgcatcatactcccttattctggaagttcagaccgcaatagacaatgtcctaatccagagtgatgtccccatcgatctactggatgtggataaaaactctgctgtggtgtcatttagctcctgcgatagcgagagcaatgacaattttttgcttgctacctacagatgtcaagctgataccaccaggcttgagctaaagatacgctcaattgaagggcagtacggaacgcttcaggcttacgtgacaccaagaatccaaccaaaaacctgccaagtaagacagtaccatataaaacccctgtccttgcaccagcgaacacactttattgaccacgaccgaccaatgaataccctgacacttaccggacaattttctttcgctgaagtgcactcttgggtcgttttctgcctgccggaggttccagagaagccgccagcgggggaatgtgtgactttttattttcagaatactttcctcgacacgcaactggagagtacttaccgcaaaggtgagggagtgttcaaatctgataacattagcactatcagcatacttaaagatgttttgtctaaggaagcaacaaagagaaaaatcaacctaaatatttcttacgaaattaacgaggtgtcagttaaacacaccctgaaactcatccatcccaagctggagtaccagctgctactggcaaagaaagtgcagctcatcgatgccctcaaggagctgcagattcatgaaggcaataccaatttcctgattccagaataccactgcatactcgaggaggcggatcacctgcaggaagaatataagaaacaacctgcccatttggaaagactctatggctag

SEQ ID NO: 180190 - DNA, 417 bp, synthetic construct
  misc_feature 1..417: note = Description of Artificial Sequence: Synthetic coding sequence
  source 1..417: mol_type = other DNA
gacgtgctgagcaaggaggccaccaagcggaagatcaacctgaacatcagctatgaaattaacgaagtgtcagttaagcatactctgaagctgattcaccccaaactggaatatcagctgctgcttgctaagaaggtgcagctgattgacgccctcaaagagctgcagatacatgaaggcaacaccaattttctgatccccgagtatcactgcatactcgaagaggctgatcacctgcaagaggagtataaaaaacagcctgcccacttggaaaggctttacggcatgataactgatctgttcatcgacaaatttaagttcaagggcactaatgtgaagacaaaagtgcctctgctactcgaaatcctggacagctacgaccagaacgctctaatctccttcttcgacgctgcatag

SEQ ID NO: 180191 - DNA, 2664 bp, synthetic construct
  misc_feature 1..2664: note = Description of Artificial Sequence: Synthetic coding sequence
  source 1..2664: mol_type = other DNA
atgagcctgttcaaggcccgggactggtggagcaccatcctgggcgacaaagaggagtttgatcaagggtgcctgtgtctggctaatgtggataactccggaaacggtcaagataagatcatagtaggctccttcatggggtaccttcggattttttccccacatcctgccaagactggagacggcgctcaggctgaggatctcctactggaggtggacctgcgagacccagtcttgcaggtagaagtgggaaagttcgtgtccgggactgaaatgctgcatctcgccgtcctccattcacgtaagttatgcgtgtactcagttagcgggacattgggcaatgtggaacacggaaaccagtgccaaatgaagttgatgtatgagcataatttgcaacgtacagcttgcaatatgacatacggctcctttggcggcgtgaaggggcgcgatctcatctgtattcagtccatggacggaatgctaatggtgtttgaacaggagagctacgctttcggcaggttcctccccggcttcctcttaccaggcccactcgcctactcttccaggacggactcattcctaactgtgtcatcatgccagcaggtggagtcctacaagtatcaggtgttggcctttgctacagacgccgataaacgccaagagacagaacagcaaaaactggggtccggaaaaagactcgtcgttgattggaccctgaacattggtgaacaggctctggatatttgtatagtgagcttcaatcagagcgccagctctgtcttcgtgttgggtgagcggaacttcttctgcctgaaggataacgggcaaatccgcttcatgaaaaagctagactggtctccttcgtgcttcctaccctattgtagcgtctctgaaggaaccattaataccctaatcggcaaccacaataacatgttacatatttatcaggacgtcaccttgaagtgggccactcagttacctcacatacctgtggcagtgcgggttggctgtctgcacgatctgaagggagtgattgtgacgctttccgatgatggccacctacaatgcagctaccttggaacagatccatccctgttccaagcgcccaatgtgcaatcacgggaactcaactacgatgaacttgatgtcgagatgaaagaattacagaaaatcataaaagacgtgaacaagtcccagggcgtgtggccaatgacagagcgggaggatgatctgaatgtctcagttgtggtgtcgcccaacttcgactctgtctctcaagccaccgacgtcgaggtgggaactgaccttgtcccatcagtaacagtgaaggttaccctgcagaatcgtgtaatcctacagaaggctaagttatcggtttacgtccagccccccctagagttgacttgcgaccaatttacattcgagttcatgaccccagacctcactcggacggtgtccttctcggtgtacctgaaacgtagctataccccgtcggagctcgaagggaatgctgtggtgagctactcaagaccaactgacaggaacccagatggtattccccgggtaattcaatgcaagtttcgtttacctctgaagctcatttgcctgcctggccagcctagcaaaacagccagccacaaaataactattgacaccaacaagtcccctgttagcctgctgtcactgtttcccggattcgctagtcaatctgacgacgaccaggtcaatgtgatgggatttcactttctgggtggtgccagaatcacggtcttggcgagcaagactagccaaaggtacagaattcaaagcgagcagtttgaggatctctggctgatcaccaatgaattaatactgagactccaggagtacttcgagaagcaaggggtgaaggacttcgcatgctcgtttagcggctcgataccgctgcaagaatacttcgaactgatcgaccatcactttgagctgcgaatcaacggcgagaaactagaagagctgctctccgagagggcagtacagttccgggcaatccagcgccgactactggcacggttcaaagacaagacacctgcaccactgcaacatcttgatacacttctggacggcacttacaagcaggtgatagccctagctgatgcagtggaagagaaccagggcaacctctttcagtcttttacacggctcaagagtgccacccatctggtgattcttttaatagctctttggcagaaattgtcagctgatcaggtagctatactcgaagccgcctttctgccactgcaggaggatacgcaagagctcgggtgggaggagactgtcgacgcagctatctcccacctgctgaaaacttgtctgtcaaagtcgagcaaggaacaggcattgaatcttaatagccagctcaatattccgaaggacacaagtcaactgaaaaaacacatcactctgctctgtgacagactgtcaaagggcggacgtctgtgtctcagcacagatgccgctgctccccaaacaatggtgatgcccggcggctgcacaaccattcctgagagcgacctggaggagcggtcagtggagcaagactctacggagctgttcacaaaccaccgacatctcaccgccgagactccccggcccgaggtctcaccactgcaaggcgtctccgagtag

SEQ ID NO: 180192 - DNA, 2544 bp, synthetic construct
  misc_feature 1..2544: note = Description of Artificial Sequence: Synthetic coding sequence
  source 1..2544: mol_type = other DNA
atgagcctgttcaaggcccgggactggtggagcaccatcctgggcgataaagaggaattcgatcagggatgcctgtgtcttgcaaatgtagacaactcaggtaacgggcaagacaagattatcgtcggatctttcatgggctacctccgaatattttcccctcacccagctaaaaccggagatggtgctcaggctgaggacctcctactggaagtcgaccttagagatcctgtcttgcaggtggaagtaggaaagttcgtctccggaacggaaatgctgcatctcgcggtcctgcactccaggaagctgtgcgtgtactctgtgtcgggaactctcggaaatgtggaacacggcaatcaatgccagatgaagctgatgtatgagcacaatctccaaaggactgcatgcaacatgacctacggttcatttggtggtgtcaagggccgagatctcatttgtatccagtcgatggacggaatgctcatggtgtttgaacaagagagctatgcatttggacgattcttacctggctttttactccccggacctctggcctatagcagccgtacagattcttttctcactgtttcctcctgccagcaggtggaaagttataaataccaagtgctggcattcgccacagatgcggacaaaagacaagaaacagagcagcagaaactcggctccgggaagcgcctggttgtggactggaccttgaacattggcgagcaggccctggacatttgtatcgtttcattcaatcagtccgcctcttccgtcttcgtactgggggaacgcaactttttctgcctgaaagataatggacaaatccggtttatgaagaaactcgattggtctccttcctgtttccttccatattgtagcgtgtctgagggaaccatcaacactctgattgggaatcacaacaatatgttgcacatctatcaagatgtgacactaaaatgggctacacagctgccccatatccctgtggccgttagagtcggctgtctccacgatctgaaaggcgtgattgtgaccttgtccgacgatgggcaccttcaatgttcgtacctcgggacggaccctagcctcttccaagcgccaaacgtgcagagcagggaacttaactatgacgagctcgatgttgagatgaaggagctacagaagattatcaaggacgttaataagagtcaaggtgtgtggcctatgactgaaagagaggatgacctgaacgtcagcgtcgtggtctctccgaactttgattctgtttcccaggcaacggatgttgaggtgggcaccgatcttgtgccatcagtgacagtgaaagtgactctacagaaccgcgttatcctccagaaggctaagctcagcgtttatgtgcagccaccgcttgaattgacatgtgatcagttcacatttgaattcatgtcaattccccgcgtcattcagtgcaagttccggctgcctcttaaacttatttgcctccctggccagcccagcaagactgcatcccataagattacgatcgatactaacaaatctcctgtctccctcctctccctcttccctggcttcgcttcacagtcagatgacgaccaggtcaacgtgatgggcttccattttttaggaggcgcacgaatcaccgttctagcctcgaagacatcccagcgctatcgtattcagtccgagcagtttgaagacttatggctcattactaatgaactgatcctccgattacaggaatatttcgaaaagcagggtgttaaagatttcgcatgctctttttccggctctataccgctccaagagtacttcgaactaatcgaccaccatttcgagctaagaataaacggagaaaagctagaggagctgctgtctgagcgggcagttcagttcagagccattcaaagacggttgctggccaggtttaaagataagacaccggccccgcttcaacacctggataccttactagacggcacttacaagcaagtgatagcgcttgcggatgcagtcgaagaaaatcaaggcaatctctttcagagttttacaaggctgaagtctgcaacacatttagtgatcttgctcatcgctctctggcagaaacttagtgctgatcaggtggctattctggaagcagcattcctgcccctccaagaggacactcaggagcttggatgggaagagacagtggacgccgccatcagtcacttgctgaagacttgtctgagcaagagctctaaggagcaggcgcttaacttgaacagtcagcttaacatccctaaggatacaagtcaactgaagaagcatatcacactgctgtgcgatcgcctctccaaagggggtcgcttgtgcctgagcaccgatgcagctgcgccacaaaccatggtgatgccaggggggtgtacaacaattccagaatcggatttggaggagagaagcgtggaacaggacagcaccgaactgtttaccaaccatagacatctgacggctgagactcccagaccggaagtaagtccgctacaaggggtgagtgagtag

SEQ ID NO: 180193 - DNA, 2559 bp, synthetic construct
  misc_feature 1..2559: note = Description of Artificial Sequence: Synthetic coding sequence
  source 1..2559: mol_type = other DNA
atgagcctgttcaaggcccgggactggtggagcaccatcctgggcgataaagaggagttcgaccaaggatgcctgtgcttggcgaatgtggacaatagtggaaacggacaagataaaattatcgtaggctctttcatgggatacctgcgtattttttccccacacccagctaaaacgggggatggtgcccaagccgaagacctcctgctggaggtcgatcttagggaccccgtgctccaggttgaggttggcaagttcgtctccggcactgaaatgttgcacttagccgtactccacagtcgaaagctgtgtgtgtactcggtttctgggacactgggcaatgtcgaacatggcaaccagtgccagatgaagctaatgtatgagcataatctgcagagaactgcatgtaacatgacgtatgggagtttcggaggagtcaagggcagggatctcatatgcatccaaagcatggatggtatgctcatggtgtttgagcaggagtcctacgcgttcgggagatttctgccgggcttcctgctccctggacctctggcatactcttccagaaccgactcttttttgaccgtcagctcttgccagcaagtggagtcctataagtaccaggtgctggcttttgccactgacgccgataagcgtcaggagactgagcagcaaaaactggggagtggtaagaggctggtggtcgattggacgctgaacatcggggagcaggctctggatatatgtatagtttcatttaatcagtctgcctcatccgtattcgtgttgggcgagcgaaattttttttgtctgaaggataacggacagataaggttcatgaaaaaactcgattggtcacctagctgttttctgccctactgtagtgtcagcgagggtaccattaacacacttatcggtaatcacaataacatgctgcacatttatcaggacgttaccctcaaatgggcaacgcagttaccccatatacctgtggcggtgcgagtaggctgtctccatgacctcaagggggtgatcgttacactgagcgacgacgggcacctgcagtgttcctatctggggacagatccctctctgttccaggcccctaatgtgcagtctagagaacttaactacgacgaactggatgtggaaatgaaggagcttcaaaaaataatcaaagacgtgaataaatcccagggcgtgtggccaatgacggagagggaggacgatctgaacgtgtcggtagttgtcagcccgaattttgacagtgtgagccaggctacggatgttgaagtgggtactgacctcgtgccttccgtcactgtaaaggtaaccctgcagaatagagtgatcctgcaaaaagcaaagctcagcgtttacgtgcagcctcccctagagcttacatgtgaccagttcacatttgagtttatgtccttgaatgttcttggaatccctcgagtgattcaatgtaaattcagactgccacttaagctcatctgcctacccggtcaaccttccaagacggcctctcacaaaatcaccattgacaccaacaaaagcccagtgtcacttttaagccttttccccggatttgcatcacagagcgatgatgaccaggtgaacgtaatgggcttccacttcttagggggcgcacgcattacagttctggcatctaagactagtcagcgataccgcattcaaagcgaacagttcgaagatctttggctcattacaaatgagctgatactacggttgcaagagtatttcgagaagcagggggtcaaggacttcgcttgctcgtttagtgggtcgatacctttgcaggaatatttcgagctgatcgatcatcatttcgaactgaggatcaatggcgagaaactagaggagcttctctctgagagggccgtgcaattccgggctatccagcgtcggctgcttgctcgattcaaggacaagacccctgcacccctccagcacctggacactctgctggacgggacctacaagcaggtgattgccctggccgacgccgtggaggaaaatcaaggaaacctctttcagtctttcacaaggcttaaaagcgccacccacttggtcattctccttatcgccctctggcagaagctcagcgcggatcaagtagccatcctggaagctgccttcttgccactccaggaggacacccaggagttgggatgggaagagactgtcgatgcagcgattagtcacctgttgaagacttgcctctccaagagtagtaaagaacaggcactaaatttgaattcacaactgaatatccccaaagatactagccaactgaagaagcatatcacccttctgtgtgaccggctatctaaaggcgggcggctatgcttgtctacagacgccgcagcacctcagacgatggtaatgcctggggggtgcactacaattcccgaatcagaccttgaagaacggtcggtggagcaggactccaccgaattgttcacaaaccatcggcatctgaccgcggaaacaccgcgcccagaggtctcaccgcttcaaggggtcagcgaatag

SEQ ID NO: 180194 - DNA, 2649 bp, synthetic construct
  misc_feature 1..2649: note = Description of Artificial Sequence: Synthetic coding sequence
  source 1..2649: mol_type = other DNA
atgagcctgttcaaggcccgggactggtggagcaccatcctgggcgacaaggaagagttcgatcagggatgtctctgccttgccaacgtagataactccggcaacggccaagacaagattattgtggggtcctttatgggatatctgagaattttctcacctcatcctgccaagactggcgacggcgctcaggctgaagatctgctcctggaggtcgatctgcgggacccggtgctgcaggtagaagtgggtaagttcgtttccggcactgagatgctgcatctggccgtcctacacagtcgtaagctctgtgtctattccgtttccgggaccttggggaatgtcgaacacggtaaccaatgccagatgaagctgatgtatgaacacaatctccagcgcaccgcttgtaatatgacatatgggagctttgggggggtgaagggaagggacttgatatgcatccagtcaatggatggcatgctgatggttttcgagcaggaaagttacgcctttggccggttcctgcccggtttcctgctgccggggccattagcctattcaagccgaaccgactctttcctgacagtgagctcgtgccagcaggttgaaagctacaagtatcaggttctggccttcgcgactgacgctgataagcgccaggaaaccgagcagcagaaactcggatctgggaaacgcttggtagtggattggacacttaatattggggagcaggccctggacatctgtatcgtaagcttcaaccagagcgcctctagcgtctttgtcctgggcgaaaggaattttttttgcttgaaggacaatggacaaatccggtttatgaagaagctcgattggtcccccagttgctttctgccctattgcagcgtcagcgagggcacaatcaacaccctgattggtaaccacaacaatatgcttcacatttaccaagatgtcacgcttaagtgggcgacccagctgccccacatcccggtggcagtgcgcgttggatgcctgcacgacctgaagggagtgattgtcacactctcggatgatggccatttacagtgttcctatctgggaaccgatcccagcctgtttcaagctcccaatgtccaaagcagggaactaaactatgatgaactggatgtggagatgaaagagttacagaaaataatcaaagatgtgaacaagagtcaaggggtttggccaatgaccgagcgcgaagacgacctgaatgtctcagtcgtggtctcgcccaatttcgacagcgtctctcaggccacagatgtagaagtggggactgacctagtcccgagcgttaccgtcaaagtgacactacagaatagggtgatcctacaaaaggcaaagctaagtgtgtatgtgcaaccccccctggagctgacgtgtgaccaattcaccttcgagtttatgacccccgatttgactagaacggtcagtttctccgtttatctgaagagatcatatacccctagcgagctggaaggaaacgctgtggtgtcgtacagtagacctacggggatacctcgggtaattcagtgcaagttccgcttgccccttaagctaatctgtctccccggccagcctagcaaaaccgcaagccacaagatcaccatcgatactaacaagagtcccgtgtcactcctttcactgttcccagggtttgcgagtcaatccgacgacgatcaagtgaacgtcatgggatttcatttcctcgggggcgcaagaataactgtccttgcttcaaagacatctcagcgatacaggatacagtctgaacagttcgaagacctgtggctgatcaccaatgaattgatactaagactgcaggagtactttgaaaagcagggcgttaaggattttgcctgctccttttcaggatcaattcccctacaggagtattttgagttgatcgaccatcactttgaactgaggataaatggcgagaaattggaggagcttctttccgaaagagccgtgcaattcagagccatccagcgacggttactggctcggtttaaggataaaacaccggctccacttcagcatttagacaccttattagacggcacttacaaacaggtgattgctctcgcagacgcagtcgaagagaatcagggcaatctgttccaaagctttacccgcttgaaaagcgctactcacctagtgatcttacttattgccctgtggcagaaactctcggcggatcaggtggctatactcgaggccgctttcctgcctctgcaggaggatacgcaggagctcggatgggaggagacagtggacgccgccataagtcatctactcaagacatgcctgtccaagtcttccaaggagcaagccctcaatctgaatagccaactgaacatccctaaagatacctctcagttgaaaaagcatataacattgctctgtgatcggctgagcaagggtggtcgactgtgtctctcaaccgatgctgctgccccgcaaaccatggtgatgcctggcggctgcaccacgatccccgagagcgacttggaagagaggtctgttgagcaggactctacagagctattcacaaatcaccggcacctgaccgctgagacaccacgcccagaagtgtctcctcttcagggtgtgtcagagtag

SEQ ID NO: 180195 - DNA, 1446 bp, synthetic construct
  misc_feature 1..1446: note = Description of Artificial Sequence: Synthetic coding sequence
  source 1..1446: mol_type = other DNA
atgagcctgttcaaggcccgggactggtggagcaccatcctgggcgacaaagaggaattcgatcaaggctgcctgtgccttgcaaacgtggacaactctggcaacgggcaagataagatcattgtgggcagctttatggggtacttgcggatctttagcccccatcctgccaaaactggcgatggggcgcaggctgaggacctgcttctggaagttgatcttcgcgatccagttctgcaggtggaagtggggaaattcgtgtccggaactgagatgctccacttggccgttttgcactcccgcaagctctgtgtgtattccgtgtcaggtacactgggcaatgtggagcatggtaaccagtgtcagatgaagctgatgtatgaacacaacctccaaaggactgcctgtaacatgacttacggcagttttggcggggttaagggcagggatttgatttgtattcaatctatggacggtatgctgatggtgttcgagcaagagtcttatgcttttggcaggtttctgccagggtttctcctgccgggccctctcgcatactcaagcaggactgattccttcttgaccgtatcgtcctgtcagcaagtggagtcgtacaaataccaggtcctcgcctttgccacggacgcagataaaaggcaggaaacggaacagcagaaactgggctccggcaaaaggctggttgtcgactggactctgaatattggggagcaggccttggacatctgtatcgtgtcttttaaccagagcgcctcttcagtttttgtcctgggggagaggaacttcttctgtctgaaggacaacggccaaatcaggtttatgaaaaagttagactggtccccaagttgctttctcccttactgctccgtgtccgagggcactataaacactctaattgggaaccataacaatatgcttcacatctaccaggatgtgactctgaaatgggctacccagctgccacacatcccagtcgccgtccgagtgggatgtctgcacgatctgaagggtgtcattgtcaccttgtccgacgacggacacctccagtgcagttacctggggaccgacccatcattgttccaggcgcccaacgttcagtctcgagaactgaactacgacgagctcgatgtcgagatgaaagagcttcagaagattatcaaagacgtcaacaaatcgcaaggcgtatggccaatgacagaaagggaggacgatctgaacgtcagtgtcgtcgtctctccaaatttcgactcagtctctcaagccacagatgttgaggtaggaacggaccttgtacccagtgtgaccgtgaaagtgacacttcagaacagagttatactgcagaaggctaaactcagtgtctacgtgcagcctccccttgagctgacgtgtgaccagttcactttcgagtttatgaactttcctagttag

SEQ ID NO: 180196 - DNA, 2559 bp, synthetic construct
  misc_feature 1..2559: note = Description of Artificial Sequence: Synthetic coding sequence
  source 1..2559: mol_type = other DNA
atgagcctgttcaaggcccgggactggtggagcaccatcctgggcgataaagaagaattcgaccagggctgtctctgtctcgcaaacgttgacaattccgggaatggccaagataaaattatcgtgggctcctttatgggctatctaagaattttttctccacatccagcgaaaaccggagatggcgctcaagctgaagatcttctattggaagttgatctacgtgacccagtcctccaggtcgaggttggcaagttcgtctctggaaccgagatgctccatttggcggtgttgcactcgaggaaattgtgtgtgtatagcgtctcgggcacattggggaatgttgagcacgggaatcagtgtcaaatgaaacttatgtacgaacataaccttcagaggaccgcctgcaatatgacctacggctcctttggcggggtcaaaggtcgggacctgatctgtatccaaagcatggatggaatgctgatggtctttgaacaagagtcctatgccttcggccgattcttgcctggcttccttctgcctggccccctagcatatagcagtaggactgattcatttctcaccgtgtcatcatgtcagcaggtcgagtcctacaagtaccaggtgctagccttcgcaacagatgcagataagcgtcaggagacggagcaacaaaaactgggatccggaaagagactcgtggtggattggacgctgaatatcggagagcaggccttggacatctgtatagtgtcctttaatcagtcggcctctagcgtattcgtcttaggggagaggaactttttttgtctgaaggataacgggcagatccgcttcatgaagaaactcgactggtccccatcgtgctttctgccgtactgctctgttagcgaaggtaccatcaacacccttatcgggaaccataataacatgcttcatatctatcaggacgtgaccctcaaatgggctacacagttaccccatatacctgtagccgttcgggtgggctgcctccacgatctaaagggcgtgatcgtaaccttatcggacgacggtcatctccaatgctcctacctgggcacagacccatccctctttcaggccccaaatgttcaatctcgcgagctgaactacgatgagttagatgtcgagatgaaggagttgcaaaaaatcatcaaagacgtgaacaaatcacagggagtctggccaatgaccgagcgagaggatgatttgaacgtgtctgtcgtggtgtctccaaatttcgacagcgtttcccaggcaactgatgtcgaagtgggtaccgacctcgtgccttcggtcactgttaaggtgacactccagaaccgggtgatcttacagaaggcaaaattgtctgtctacgtccagccacctttagaactgacttgcgatcaatttactttcgaatttatgaacaggaatcctgacggtataccgagagttatacagtgtaagttccgtctgccactcaaactgatctgtcttccaggccagccaagcaaaaccgcttcccataaaatcacaatagacacaaacaagagtcccgtcagcttgttgagcctgttccccgggttcgcctctcaatcagatgacgatcaggtcaatgtgatgggcttccactttctggggggcgcgagaatcaccgtgctggcaagtaagacgagtcagcgctacaggatacagtcggagcagttcgaggatttgtggcttatcaccaatgaattgatcctgagactgcaggagtatttcgagaaacaaggagtcaaagacttcgcttgcagcttctccggatcgatcccactgcaggagtacttcgagctgattgaccaccactttgaattgcgcattaatggggaaaaactcgaggaactgctgtccgagcgagctgtgcagttcagggccatacagagacgccttctagcaagatttaaggacaaaactcccgcgccccttcaacatttggatacactgcttgatggaacgtataaacaggtaattgccctggccgacgccgtcgaagagaaccagggcaatctatttcaatctttcactaggttgaagtcagcgacacatcttgtgatcctgctcatcgctctttggcagaaactgagcgctgaccaggtagctattctcgaggctgcatttctgcccctccaagaggacacccaagaactggggtgggaggaaaccgtggacgctgcaataagtcacctccttaaaacttgcctctccaagtccagtaaggaacaggcgcttaatttgaactctcagctcaacattccaaaggatactagtcagctcaagaaacacatcacattactttgtgataggctgtcaaagggcggaagactgtgcctttccaccgatgctgccgcgccccagacgatggtgatgccgggaggatgcacgacaatccctgaatctgatctggaagagcgatccgtggaacaggactctacggagttgtttaccaaccataggcacctcacagctgagactccccggcctgaggtttctcccctacagggagtttcagagtag

SEQ ID NO: 180197 - DNA, 2664 bp, synthetic construct
  misc_feature 1..2664: note = Description of Artificial Sequence: Synthetic coding sequence
  source 1..2664: mol_type = other DNA
atgagcctgttcaaggcccgggactggtggagcaccatcctgggcgataaagaagagttcgatcagggctgtttgtgcctagcaaatgtggataattcaggcaacggccaggataagataatcgtgggctcctttatggggtatctaaggattttctcccctcaccccgccaagacaggagatggcgcccaagcagaggaccttctgcttgaggtggatctgcgggatccagtcctgcaggtggaagtaggaaagtttgtctccgggacagagatgctgcatctggccgtgcttcactcgcgaaagctgtgtgtatattcggtttccggcacacttggcaatgttgaacatggcaaccagtgccaaatgaaactgatgtatgagcacaatctgcagcgcacggcctgcaacatgacctacggatctttcggcggcgtgaaaggccgggacctgatctgcatacagtctatggatgggatgctcatggtcttcgaacaggaaagttacgccttcggcagatttttgcctggatttctgctgcccggccccttggcttatagcagccggacggattctttcttaaccgtgtccagttgccagcaagtggaaagctataagtaccaggtgctggcctttgcaacagatgcagataagcgtcaggagaccgagcaacagaagcttggcagcggtaaacggctggtcgttgactggacccttaacataggagaacaggccctcgatatctgtatcgtttcctttaatcagtccgcttcatctgtgtttgtccttggagaacgtaatttcttctgccttaaggataacggccagatccggtttatgaagaagctggattggtcaccaagctgcttcctaccatactgtagtgtctccgagggaaccattaacaccctgatcgggaaccataacaacatgctccacatttaccaggatgtgactttaaaatgggcaactcagctcccccacattccggtggcagtacgcgtgggctgtctccacgaccttaagggcgttatagtaacactcagcgatgatggtcatctgcagtgtagttatcttggaaccgatccaagtctattccaagcccctaacgtgcagtcgcgggagctaaattacgatgaactcgatgtcgagatgaaggaactgcaaaagatcatcaaagacgtgaataaatctcaaggtgtatggccaatgacagagcgggaggatgatcttaacgtgagcgtggtggtctcacctaacttcgactctgtcagtcaagcgaccgacgtagaggttggaacagacctggtgccctcagtgaccgtgaaagtaactctccagaaccgcgtgatccttcagaaggctaagctcagcgtctacgttcagcctccattggagttgacctgcgaccagttcacctttgagttcatgaccccagatctgaccagaaccgttagtttttccgtttacctcaagagatcttatactccctccgaactggagggaaatgccgttgtgtcctattcccgaccaactgttcagaacagtctgggtattccgcgggtgattcagtgcaaatttagactgccccttaagttgatctgtctaccaggtcaacctagtaagacagccagccataaaatcaccatagacacgaacaaaagtccagtatctctgctctctctgtttccagggttcgcttctcaaagcgacgacgatcaggttaatgtgatgggtttccactttctgggcggcgcccgaataactgtgctggcatccaagacatcccagcgttataggatccagtctgaacaattcgaagatttatggctgatcacaaacgagttgatacttagattgcaggagtatttcgaaaagcaaggcgtgaaagatttcgcgtgcagcttttccggtagcatccctttgcaagagtattttgagctgattgatcatcattttgaactcaggattaacggggaaaaactggaggaattgctctctgagagggccgtgcagttccgtgctatccagagaaggcttctcgctaggtttaaagataaaaccccagctccccttcagcacctggacactctgctggatggcacctataaacaggtgattgccctggccgacgccgtggaggaaaaccagggcaacctcttccagtcctttacccggctcaagagtgcaacccatcttgtcattctgctcatcgccctgtggcagaaactctccgccgaccaggtagccattctggaagcagcctttctgccattacaggaagatacccaggaattgggctgggaagaaacagtggacgcagccataagccatctgcttaagacttgcctcagtaagtccagcaaagagcaagcgctgaacctgaactcccaattgaatatccctaaggatacctcacaacttaaaaagcacattactttgctctgtgatcggctgtctaagggggggcgattatgcctgagtactgatgccgccgcacctcaaacaatggtgatgccagggggatgcactacaatacccgaaagtgacctggaggagcgaagcgttgagcaggactccaccgagctgtttacaaaccacaggcaccttaccgcagaaaccccgcgcccggaggtgagtcccctccagggcgtttccgagtag

SEQ ID NO: 180198 - DNA, 933 bp, synthetic construct
  misc_feature 1..933: note = Description of Artificial Sequence: Synthetic coding sequence
  source 1..933: mol_type = other DNA
atgggctacctgcggatcttcagcccccaccccgccaagaccggcgacggggcccaggccgaggatttgttgctggaagtggatctccgagatcctgtgctccaagtggaggtagggaagttcgtgtccggcaccgagatgctgcatctggccgtgttacactcccgcaaattgtgcgtgtacagtgtcagcgggaccctcggtaacgtcgaacatggtaatcagtgtcagatgaagctcatgtacgagcacaacctgcagagaaccgcttgtaatatgacctacggaagctttggcggagtaaagggccgcgacctgatctgcattcagagtatggacggtatgcttatggtcttcgaacaggaatcatacgctttcggccgctttctgcccggattcttactcccaggtcccctcgcgtatagttcccggacagacagtttcctgactgtgtcctcttgtcagcaggttgagagctataagtatcaggtgctggcatttgccacagatgcagacaaaagacaggagacagagcaacagaaactgggttcaggcaagcgcctggtcgtcgattggacactcaacataggagagcaagccctcgatatctgcatcgtgtccttcaaccagtccgccagctccgtgtttgtactgggggagcgaaattttttctgcctgaaggataatggacagattcgattcatgaagaagttggactggtcacccagctgtttcctcccttactgcagcgtatcggaaggcaccattaatacccttattggcaatcacaataacatgctgcacatctatcaggatgttaccctgaagtgggcaacccagctaccgcatatccctgtggcagtcagagttggttgcttgcagttctcgctgtggaagcacctgctccccaggagttcaacacttgagaaatag

SEQ ID NO: 180199 - DNA, 294 bp, synthetic construct
  misc_feature 1..294: note = Description of Artificial Sequence: Synthetic coding sequence
  source 1..294: mol_type = other DNA
atgagcctgttcaaggcccgggactggtggagcaccatcctgggcgataaagaagaatttgaccagggatgcctgtgcctcgcaaatgtggataattctggcaatggacaggacaaaatcattgtgggatcttttatgggttacctcagaatctttagcccacaccccgccaaaactggagacggcgcccaggcggaggacctgctgctggaggttgacctccgggatcctgttctgcaggtggaggtagggaagttcgtgagtggcaccgagatgctccacttggctgtttag

SEQ ID NO: 180200 - DNA, 1365 bp, synthetic construct
  misc_feature 1..1365: note = Description of Artificial Sequence: Synthetic coding sequence
  source 1..1365: mol_type = other DNA
tgagacctggtgcccagcgtgaccgtgaaggtgaccctgcagaaccgcgttatcctgcaaaaggccaagctatccgtgtatgtgcagcctcctctggaactaacctgtgatcagttcacttttgagtttatgactcccgatctcacacggacagtcagtttcagcgtgtatctgaagaggtcttacacaccaagtgagctggagggtaacgcggttgtctcctacagccgccctactgaccgcaaccccgatggcatcccaagggttatccaatgtaagtttcggttgccactaaaacttatttgcctgcctggccagcccagtaagactgcatcccacaagattaccattgacacgaacaaatctccagtaagtctgctgagtctttttcccggctttgcgtcgcagtcagacgacgatcaggtgaatgtcatgggctttcattttctaggtggagctcgcattaccgtgcttgccagcaagacgtcccagaggtaccgcattcaatcggagcaatttgaagacctgtggctcataacaaatgagttgatcctcaggttacaggagtacttcgagaagcagggggtgaaagacttcgcctgcagctttagtggaagcatccccctgcaggaatactttgagttgatcgaccatcactttgaactcaggatcaacggcgagaagttagaagagctcctcagcgagagggctgtgcagtttcgagccatacagagacgactactcgcccgatttaaagacaaaacgcctgccccactgcagcatctggatacattgttggacggcacctacaagcaagttatagccctggccgacgctgtagaggagaatcagggtaacttattccagagcttcaccaggttaaagtccgccacccacttagtgatcctgctgatcgcgctctggcaaaagctcagcgccgaccaggttgccattctcgaggccgcgttcctgccactgcaggaggatacacaggaattgggatgggaggagacagtggatgccgccatctcccacctgctcaagacctgcctcagcaaaagcagcaaggaacaggcactgaacctgaacagtcagctgaacatcccaaaagacacatctcagctgaaaaaacacattacccttctgtgcgatcgcctctctaagggcggccgactgtgtctgtctacagatgcggcagccccacaaacaatggttatgcctggaggatgcaccaccatccccgaatccgacctggaagaacggtccgtggaacaagacagtacagaactgttcactaaccacaggcacctgactgccgaaactcctagacccggcaagcggctcgatgggctgcacaaaaggtag

SEQ ID NO: 180201 - DNA, 1227 bp, synthetic construct
  misc_feature 1..1227: note = Description of Artificial Sequence: Synthetic coding sequence
  source 1..1227: mol_type = other DNA
atgaagctgatgtacgagcacaacctgcagcggaccgcctgcaacatgacctatggctcctttggcggggtcaaaggaagagacctgatttgcatccaatccatggatgggatgctgatggtgtttgagcaggagtcctatgcctttggccgctttctgcctggatttctcctgcccgggcctctcgcgtactcctcccgaacagactcattcctcacagtcagctcttgccagcaggtagagagctacaagtaccaagtgctcgcattcgccacggacgctgataaacggcaagaaacagaacagcaaaaactagggtcaggcaagcgcctggtcgtggactggactttgaacataggcgagcaggcactggacatctgcatagtaagcttcaaccagtcagcaagtagtgttttcgttctcggcgaacgcaactttttctgtttaaaagataatggacagataaggttcatgaaaaaactggattggtcaccttcctgcttcctgccctattgtagcgtgagtgagggcaccattaataccctgattgggaaccacaataatatgctccacatttatcaagacgttacactgaaatgggcgactcaacttcctcacatccccgttgctgtgcgcgtaggctgtctgcacgacctgaagggtgtgatagtgactctatccgatgacggccacttacagtgctcttacttagggactgacccatccctgttccaggccccgaatgtccagtccagagagcttaactatgacgagctcgacgttgagatgaaagaattgcagaaaatcattaaagacgtcaacaagtcgcagggggtgtggcccatgaccgagcgtgaggacgatctcaacgtttccgtggtggtgtcgccaaatttcgattccgtgtctcaggccaccgatgttgaggtcggcactgacctagtcccatccgttaccgtcaaggtcactctacagaatagagtgatccttcaaaaagctaaattgtctgtgtacgttcagccaccccttgagctgacatgtgatcaattcacctttgagtttatgacacctgatttaacccgcaccgtgtccttcagcgtgtatctgaagaggtctatccatcatcagaattggaaggagatgcttttgttcctgatcccagaccagcagatagaaatcttgatggctttccgggagctgtcaaacgtcaatctggactttccctag

SEQ ID NO: 180202 - DNA, 984 bp, synthetic construct
  misc_feature 1..984: note = Description of Artificial Sequence: Synthetic coding sequence
  source 1..984: mol_type = other DNA
atggagggcagcaacggcttcggcatcgacagcatcctgagccaccgggcgggatcccctgccctgcctaagggtgaccccttactcggcgactgccgttctccccttgagctctcgcctaggagcgagagcagcagcgactgctctagccccgcctcgcccgggcgagactgtttagagacggggactcctagacctgggggagccagtggtcctggcctggattctcatctccaacctggtcagctttctgcaccggcgcagtcacgaaccgtgacaagctcattcctaatccgagacatcttagccgattgtaaacctctggccgcgtgcgcaccttactctagctcagggcagccagccgctcctgagcctggtgggcgcttggctgccaaggcagcggaggattttcgagacaaattagataagtcaggttccaacgccagctccgatagtgaatataaggtaaaggaggagggtgatagggagatctcgtcttcccgtgacagccccccggtccgccttaaaaagccccggaaggctcgcactgcattcactgatcatcagcttgcccagttagagcgcagtttcgaacgccagaaatacctttctgtccaggacagaatggaactagccgcttcactcaatttgaccgatacgcaggtaaaaacctggtaccagaataggagaacaaaatggaaacgccagactgcggtcgggctggaacttcttgccgaagcgggaaactacagcgccctgcagaggatgttccccagcccttacttctatcctcagtccctcgtctcaaacctcgacccgggagctgcactgtatttatacagaggcccatcagcacctccgcctgccctgcagcgcccactggtgcctagaatcttgatacatgggttgcaaggcgcttctgagcccccacccccactgccccccctcgccggtgtgctgcccagggctgcacaaccaagatag

SEQ ID NO: 180203 - DNA, 984 bp, synthetic construct
  misc_feature 1..984: note = Description of Artificial Sequence: Synthetic coding sequence
  source 1..984: mol_type = other DNA
atggagggcagcaacggcttcggcatcgacagcatcctgagccaccgggcgggttcccctgcgctacctaagggggaccctcttctgggcgactgtagatcccctcttgagcttagtccccggagcgagagctcatccgattgtagcagtccagcttccccagggagggattgcctagagaccggcactccaaggcccgggggtgcatctgggcctggactcgactctcatttgcagcctggacagctcagtgccccagcccagtcacgaactgtgacttcttcctttttgatccgcgacatactggccgattgcaagcctttagcagcctgcgcaccatacagctccagtggtcagcccgcggccccagaaccaggcggccggcttgctgctaaggccgctgaagacttccgagacaaactcgacaaatccgggtccaacgcctcctctgactctgaatacaaggtgaaggaggagggagaccgtgaaatttccagtagtagggatagtccccctgtacgactgaagaagcctagaaaggcgcgaaccgcctttacggaccatcagctcgcacagctcgaaaggtcctttgagagacagaaatatttatccgtgcaagaccgaatggaactcgccgctagcctgaacctgaccgacacacaagtgaaaacttggtaccaaaacagacggacgaagtggaagagacagacagccgtgggtctggagcttctggctgaagccggaaattactcggcattacagcggatgtttccttctccctacttttatccgcagtccctggtcagcaacctcgatcccggcgcagcactttatctttacaggggaccttcagccccaccccccgcactgcaaaggcctttagtgcccaggattttaatccacgggctgcagggcgcttccgaacctccccctccccttcctccacttgccggcgtgcttccacgcgcagcgcagccccgttag

SEQ ID NO: 180204 - DNA, 270 bp, synthetic construct
  misc_feature 1..270: note = Description of Artificial Sequence: Synthetic coding sequence
  source 1..270: mol_type = other DNA
atgaccaccagccagaagcaccgggacttcgtggccgagcccatgggcgagaaacccgtaggcagcctcgctggcattggagaggtgctggggaaaaaactagaagagcgcggttttgataaggcctatgtggtgcttggccagtttctggttctcaaaaaggatgaggacctgttcagagagtggctcaaggatacttgcggagcaaacgcgaaacagtctcgcgactgctttgggtgcctccgggaatggtgcgatgctttcttatag

SEQ ID NO: 180205 - DNA, 270 bp, synthetic construct
  misc_feature 1..270: note = Description of Artificial Sequence: Synthetic coding sequence
  source 1..270: mol_type = other DNA
atgaccaccagccagaagcaccgggacttcgtggccgagcccatgggcgaaaaacccgtgggatccctggctggcattggtgaagtgctagggaagaagttagaggaacgcggcttcgacaaggcatatgtcgtgctggggcagttcctcgtgctgaaaaaagatgaagacctgttccgcgaatggctgaaggacacctgcggagccaacgctaaacagtcaagagattgctttggctgcctccgggagtggtgtgatgcctttttatag

SEQ ID NO: 180206 - DNA, 270 bp, synthetic construct
  misc_feature 1..270: note = Description of Artificial Sequence: Synthetic coding sequence
  source 1..270: mol_type = other DNA
atgaccaccagccagaagcaccgggacttcgtggccgagcccatgggggagaagcccgtgggctctctggctggcattggggaggtcctcggtaagaagctggaggaacgcggcttcgataaagcctacgtggtcttaggccagttcctggtcttaaagaaggacgaagacctctttagagaatggttgaaagacacatgcggcgcaaacgcaaaacagtcaagggactgcttcggctgcctccgagagtggtgcgacgctttcctctag

SEQ ID NO: 180207 - DNA, 87 bp, synthetic construct
  misc_feature 1..87: note = Description of Artificial Sequence: Synthetic coding sequence
  source 1..87: mol_type = other DNA
atgaccaccagccagaagcaccgggacttcgtggccgagcccatgggagaaaaacctgtagggagccttgcgggcattggcgagtag

SEQ ID NO: 180208 - DNA, 270 bp, synthetic construct
  misc_feature 1..270: note = Description of Artificial Sequence: Synthetic coding sequence
  source 1..270: mol_type = other DNA
atgaccaccagccagaagcaccgggacttcgtggccgagcccatgggggagaaacctgtggggagccttgctggaataggggaggtgcttggcaagaaactggaggagaggggcttcgacaaggcatatgtcgtgctgggtcagttcctggtacttaaaaaggatgaggatctttttagggaatggctgaaggatacctgcggcgcgaatgccaagcagtctcgcgactgctttggatgtctgagagaatggtgtgatgcttttctatag

SEQ ID NO: 180209 - DNA, 963 bp, synthetic construct
  misc_feature 1..963: note = Description of Artificial Sequence: Synthetic coding sequence
  source 1..963: mol_type = other DNA
atggccgacgagaagaccttccggatcggcttcatcgtgctgggcctttttctgctagcactgggtaccttccttatgtcgcatgatcggccacaggtgtacgggactttctatgcaatgggttcggtcatggttatcggcggcatcatctggtctatgtgtcagtgttacccgaaaattacgtttgtgcctgctgactccgattttcagggcatcctctctcccaaggcaatgggactccttgagaatgggcttgcggccgaaatgaaatctcctagccctcaacctccatacgtaaggctttgggaggaagctgcctatgatcagagtttaccagacttcagccacatccagatgaaagtgatgagttattcagaggaccatcgcagcctgctcgctccagaaatgggccaacccaaactgggaaccagtgacggaggcgagggcggacctggagacgtacaggcttggatggaagccgccgtggtgatacacaaaggctctgacgagtccgaaggcgaacgccgcctgacccagtcctggcctggtcctctggcttgtccccagggccctgcccctctggcatccttccaagatgacctagacatggatagctccgagggctcgagcccaaatgccagcccccatgatcgcgaggaagcttgttcacctcaacaggagccgcaagggtgtcggtgtcctctggatcgattccaggacttcgccctcatcgatgcacccacactggaagatgagcctcaagaaggccagcagtgggagatcgcgctgccaaataattggcagaggtacccaaggactaaggtcgaggagaaagaagcttctgacactggtggcgaggagcctgagaaggaggaagaggatctgtattacgggctgccggatggagccggggacttattaccagataaggaattgggcttcgagcctgatacccaaggctag

SEQ ID NO: 180210 - DNA, 765 bp, synthetic construct
  misc_feature 1..765: note = Description of Artificial Sequence: Synthetic coding sequence
  source 1..765: mol_type = other DNA
atgcagcggcccggcgagcccggcgccgcccggttcggcccccccgaggggtgtgctgaccaccgccctcataggtaccgatcctttatgatcgaagaaatactgaccgagccacctgggcccaagggggccgctccagctgctgctgccgctgcagcaggagaattgctgaagtttggagtgcaggccctgctcgctgctcggcctttccatagccacctcgcagtactcaaagctgagcaagctgctgtatttaagttccccttagctccactcggctgctccgggctttcgtcggcgctacttgccgccgggccaggactgccaggggcagcgggggctccacacctgccactagaactccaacttcggggaaaactggaggccgccggccctggcgaaccggggaccaaagctaaaaaaggcagaaggtcgcggacagtcttcacagaattgcagctgatgggtcttgagaagagatttgaaaagcagaagtatctgtccaccccagatagaatcgacctggcagagagcttgggtctctcccagctccaggtcaagacgtggtatcagaacagacggatgaagtggaagaagattgtgctgcagggcggaggattagaaagcccaaccaagcccaaaggccgccctaaaaagaacagcatccccaccagcgaacagctgaccgagcaggaacgagcaaaggatgccgagaagcctgccgaagtgcccggagaaccgagtgacagaagccgcgaagattag

SEQ ID NO: 180211 - DNA, 303 bp, synthetic construct
  misc_feature 1..303: note = Description of Artificial Sequence: Synthetic coding sequence
  source 1..303: mol_type = other DNA
atgggcctggagaagcggttcgagaagcagaagtacctgagcacccctgatagaatcgacttggcagaatcgttgggactctcacaactgcaggtgaaaacttggtaccagaaccgccgtatgaagtggaagaagattgtcctgcagggcgggggcttagagtctcctacaaagccgaaaggccgacccaagaaaaatagtataccaactagtgagcagctgacagaacaggagagggctaaggacgctgaaaaacctgcagaggtgcccggagagccgtctgatagatcccgagaggactag

SEQ ID NO: 180212 - DNA, 840 bp, synthetic construct
  misc_feature 1..840: note = Description of Artificial Sequence: Synthetic coding sequence
  source 1..840: mol_type = other DNA
atgcactgccacgccgagctgcggctgagcagccccggccagctgaaagcagcccgtaggcgctataagaccttcatgatcgatgagatcctcagcaaggagacatgcgactactttgaaaagctgagcctttacagtgtgtgtcccagcctggtcgttcgcccaaagcctctccattcttgcacaggatctccttcactgcgagcctatcccctgctctcggtgatcaccagacagccgacggtaatcagtcacttggtgcccgcaacccctgggatcgcgcaggctctgtcatgccaccaggtgaccgaagcagtctctgcagaagctccaggtggggaagcactggcaagtagtgaatctgaaacagaacagcctacacctcgtcagaaaaagcctcggcgcagcagaacgatttttaccgagcttcagctgatgggtctggagaagaagtttcagaaacagaaatacctttccacacccgatagactggacctggctcagagcctgggcctgacccagctacaagtcaaaacctggtaccagaacaggaggatgaaatggaagaagatggtgctcaagggcggtcaggaagcccctaccaagcccaaagggaggccaaaaaaaaacagcatacctaccagcgaagagatcgaagctgaggaaaaaatgaacagccaggcacaaggccaggaacagctggaacctagccaaggccaagaagaactctgcgaagcacaggaacccaaggctagggatgttcccctggaaatggccgaacctcctgaccctcctcaggaactccccatcccatcttctgagcctcccccactctcttag

SEQ ID NO: 180213 - DNA, 1887 bp, synthetic construct
  misc_feature 1..1887: note = Description of Artificial Sequence: Synthetic coding sequence
  source 1..1887: mol_type = other DNA
atggagccccccgacgcccccgcccaggcccggggcgccccccggctcctactcctcgcggttctgctcgccgcacatcccgatgctcaggctgaggtgagactgagcgtaccgccgctagtagaggtgatgaggggcaagagcgtgatcttagattgtacacctaccggcacccacgaccattacatgctcgaatggtttctgaccgatcgatccggggctagacctaggttggcgagtgctgagatgcagggaagcgagctgcaagtgacgatgcacgacacccgcggaagatccccaccgtatcaattagattctcagggacgccttgtactggctgaggcccaggtcggggacgaaagagattacgtctgtgtggtgcgggcaggggcggccggcaccgctgaggcaacagccagactgaacgtcttcgctaaacccgaggccactgaggtgtctcccaataaaggtaccctgtctgtgatggaggactcagcacaggagatagccacctgcaacagccgtaatggtaaccctgcccccaaaatcacgtggtacaggaatgggcagaggctggaagtgcccgtcgaaatgaatcctgaggggtacatgacctcccgcactgtgagagaggcgtctggtctcctctctttgacttccaccttgtacttgagactgaggaaggacgatcgcgacgcctcctttcattgcgccgctcattacagtttgcctgaaggacgccacggcaggttagacagtcccactttccacctcacactacactatccgacggagcacgtgcagttctgggttgggagcccgtcaacaccagctggctgggtacgcgaaggagacactgtgcaattactctgtcggggcgatggtagcccatcaccagagtacacgctgttccggttgcaggacgagcaggaagaagttttaaacgtgaacctcgaggggaatctgaccctggagggagtgactagggggcagagcggcacctatggctgccgagttgaagactacgatgccgcagacgacgtccaattgagcaaaaccctcgaacttcgagtcgcctatctcgaccctttggagctctccgaggggaaggttcttagcctgccgctcaatagcagcgcagtcgtcaactgctccgtgcacggattaccaactcccgccctgcgttggaccaaggattccactccgttgggtgacggacctatgctgagcttgtcctcaattacctttgactccaacgggacatacgtgtgcgaggcgagcttgccaacagtccctgtgctctcccgaacccagaatttcacactgctcgttcagggcagccctgaactcaagacagcagaaatcgaacccaaagccgacggctcttggagggagggggatgaagtgacactgatctgcagtgcaagagggcacccagatccgaagctgtcctggtcccagctcggtggctccccagctgaaccaatccccggacggcagggatgggtgtcatcttccctcaccctgaaggtcacatctgcccttagccgggacggaatatcctgtgaagcatccaatcctcacggaaataaaagacatgtttttcacttcggtactgtgtcgccgcaaacatcacaagcaggcgttgccgtgatggccgttgccgtttcggtaggacttcttttgctggtggtggctgtcttttactgtgtgaggcgtaagggcggtccatgctgtagacagcggagggagaaaggcgcacctcctccaggggaacccggactcagccactctggcagcgagcagcccgagcaaaccgggctgctcatgggcggcgccagtggcggagccaggggcggttccgggggattcggcgatgagtgctag

SEQ ID NO: 180214 - DNA, 1767 bp, synthetic construct
  misc_feature 1..1767: note = Description of Artificial Sequence: Synthetic coding sequence
  source 1..1767: mol_type = other DNA
atggagccccccgacgcccccgcccaggcccggggcgccccccggcttctgttactggctgttctgttggctgcgcatcctgatgcacaggcagaagtacggctgagcgtaccccccctcgtagaggtgatgagagggaaatctgttatcttggactgcacccctactggaacacacgaccactatatgctggagtggttcctgacagacaggagtggagccaggccccgcctggcaagtgcggagatgcaaggtagcgaactgcaggtgacaatgcacgatactcggggacgctcccctccctaccaattggactcccagggacggctggtactcgcagaagctcaggtaggagacgagagagactacgtgtgtgtcgttcgagctggagccgccgggacagcagaggccaccgcgaggttgaacgtcttcgcgaagccagaagcgacagaggtgagtcctaacaagggtaccctgtctgtaatggaggatagcgcacaagagatagccacctgcaattctcgtaatgggaatccagctccaaagatcacatggtaccgcaacgggcagaggctggaagtgccggttgagatgaatcctgaggggtatatgacaagccggacagtgcgcgaggcttctggtctcctgtccctgacatcaactctatacctgcggttaaggaaagatgatcgagacgcctcttttcattgcgccgcccattactcactaccagagggccgacacggccggctcgactcccccacgtttcatctgacactccattatccgaccgaacacgttcagttttgggtaggctccccttctactcctgccggatgggtgagagagggggataccgttcagctgctttgcagaggagacgggagtcccagccctgagtatacattgttcagactgcaggacgagcaagaggaagttctgaacgtcaacctggaagggaatctgacgcttgagggagtcactaggggacagagcggcacatacggctgcagggtggaagattatgacgcagctgatgatgtccagctatccaagactctcgaattacgagtagcctatctcgaccccctcgaactttcagaggggaaagtgctaagcctgcctttgaacagtagcgcggtggtgaactgttccgtgcatggacttcccacccccgctctccgatggactaaggatagtacccctctgggcgatgggcccatgttgtccctctcttctatcacctttgattctaatggcacctacgtctgtgaagcctctctgcccactgttcctgtcctctctaggacccaaaatttcactctcctggtccagggttcgcctgaactaaagactgccgagattgagccaaaagcagacggttcatggcgagagggggacgaggtaacactgatttgttcagcccgcggtcatccagaccccaagttgtcatggtctcagctgggcggaagccctgctgagccaattcctgggcgacaaggatgggtttcgagcagccttacactcaaagtgaccagcgctctttcaagggacgggatttcctgcgaggcttctaacccgcacggcaacaaacggcatgtgttccacttcggcacagtttccccgcaaacgagtcaggctggggtggcagttatggcggtggccgtcagtgtgggattgctgctgctggtggtcgccgtcttctactgcgtcagaaggaaaggcggaccttgttgtcggcagaggcgcgaaaagggagccccatag

SEQ ID NO: 180215 - DNA, 321 bp, synthetic construct
  misc_feature 1..321: note = Description of Artificial Sequence: Synthetic coding sequence
  source 1..321: mol_type = other DNA
atgatgaccctggtgccccgggcccggacccgggccggccaggaccattatagtcacccctgtccccgttttagtcaggtgctcctgaccgaaggaatcatgacatactgcttgacgaagaacctgtcagacgtgaacatcctccaccgtttgctcaagaatggaaacgtacggaacactctgctacaatctaaagtcggcctcttgacctattacgtgaagctatacccgggtgaggttacattgctcacaaggccatctattcagatgaggttatgctgcatcacggggagtgtctcccggccccgaagtcagaagtag

SEQ ID NO: 180216 - DNA, 321 bp, synthetic construct
  misc_feature 1..321: note = Description of Artificial Sequence: Synthetic coding sequence
  source 1..321: mol_type = other DNA
atgatgaccctggtgccccgggcccggacccgggccggccaggaccactattcgcacccctgcccacggttctcacaggtgctccttacagagggaattatgacgtattgcttgacaaagaatctgagtgacgtgaatatcctgcataggctgctgaagaatggcaacgtaaggaataccctcctccagagcaaagtcggtctgcttacctactacgttaagctttaccccggagaggttactctgcttactcgcccatctattcagatgaggctgtgctgcataacagggtctgtaagtcgcccccgaagtcagaaatag

SEQ ID NO: 180217 - DNA, 1146 bp, synthetic construct
  misc_feature 1..1146: note = Description of Artificial Sequence: Synthetic coding sequence
  source 1..1146: mol_type = other DNA
atggagcggggcatgcacctgggcgccgccgccgccggcgaggacgatcttttcctgcacaaatcactctcagcgtcaacatcgaaacggctcgaagcagctttcagatccacaccacctggaatggaccttagcctcgccccgcctccgcgtgagcgccccgccagctccagttcctcccccctggggtgtttcgaacctgctgacccggagggcgctggactcctgctgccgccacctggcggggggggcggcggttccgccgggtctggcgggggcggggggggcggtgtgggtgttcccggattgctcgtcgggtcagcaggtgtgggaggggatccatccctctcttctttaccagcaggcgctgcactctgtttgaaatatggggaaagtgcaagccggggatcagtggcagagtctagtggaggagagcagagccccgatgacgacagcgacggccggtgtgagctcgtattgagggccggtgtggcagacccacgagcatctccaggcgctgggggagggggagctaaggccgccgagggttgtagcaatgctcacctgcatggtggcgctagcgtgcctcccggtggcctcggggggggtggaggcgggggcagttctagtggtagttccggtggaggaggtggttccggatcaggatcgggtgggagctcatccagctcatccagtagctcaaagaaaagcaaggaacaaaaggcgctgcgcctaaacatcaacgcccgcgaaaggcgtcggatgcacgatctgaatgacgctttagatgagttgcgcgctgtgatcccttacgcacatagccctagcgtgaggaagctctccaaaattgcaaccctgttgctggccaaaaactatatcctgatgcaggcgcaggccctcgaggaaatgcgtcgattggtggcctatcttaaccaggggcaggcaatcagcgccgcaagtttaccgtcatctgccgctgctgctgcggcggccgcggcattacatccagccctgggagcctacgagcaggctgccggctatccattctccgccggcctacccccggccgcgtcctgtccagaaaagtgcgcactgttcaacagcgtcagctcatccctatgcaaacagtgcacagaaaagccctag

SEQ ID NO: 180218 - DNA, 678 bp, synthetic construct
  misc_feature 1..678: note = Description of Artificial Sequence: Synthetic coding sequence
  source 1..678: mol_type = other DNA
atggccgagctgaagagcctgagcggcgacgcctacctggccctgagccatggctacgcagcagctgctgcagggctggcttatggtgcagcacgtgaacctgaagccgcacgaggatacggcactcctggccccggcggcgatctcccggcggcccctgcgcccagggcgccggcccaggccgcagaaagtagtggtgagcagtcaggtgacgaagatgacgccttcgagcagaggcgtcggcgccgaggccccggctctgcagccgacggcaggaggaggccacgcgaacagagaagtctgagactgtcaatcaacgctagagagcgcaggcggatgcatgatctgaacgacgcacttgacggcctgagagctgtgattccatacgcccactctccatctgtgcgcaaattgtccaaaatcgccacactgttgctcgcgaaaaactacatattgatgcaggctcaagcattggacgagatgcgtcgattggtagcgtttctgaatcaaggccagggcctggcagccccggtgaatgccgcacctttgacccccttcggacaggccacagtgtgcccgttctctgccggggcagctctgggcccatgtcctgacaaatgcgccgcgttcagcggaacgccctctgccctgtgcaaacattgtcacgaaaagccatag

SEQ ID NO: 180219 - DNA, 1239 bp, synthetic construct
  misc_feature 1..1239: note = Description of Artificial Sequence: Synthetic coding sequence
  source 1..1239: mol_type = other DNA
atggagcggatccccagcgcccagcccccccccgcctgcctgcccaaagctcctgggctggagcatggcgacctgcctggtatgtaccctgcccatatgtaccaagtgtataaaagccggcggggtataaaaagatccgaggactctaaagaaacatataaactcccccacaggttgattgaaaaaaagcgtagggacagaatcaacgaatgcatcgcacagctcaaggatctcctgccagagcaccttaagctcaccactctagggcaccttgagaaagccgtggtgctcgaacttactctgaagcacgtcaaagcgctcactaacctaatcgaccagcagcagcagaagatcatcgcccttcagtctggtctacaggccggggagctgtcgggccgtaacgtggagaccgggcaggagatgttttgttccgggttccaaacctgtgcccgggaagttctgcagtatctggccaaacacgagaacacccgggacctaaaatcaagtcagctcgtgacgcaccttcaccgcgtggttagcgaactgcttcagggaggaactagtagaaaaccatctgatcccgctccaaaagtaatggacttcaaagaaaaaccatcttcccctgcgaaaggctctgagggacctggaaaaaactgtgttccggtaatacagagaaccttcgcccactccagcggcgagcagagtgggagtgacactgatactgattctggctacggtggcgaaagcgagaaaggcgatctgcgctctgagcagccatgctttaagagcgaccatgggcgtcgcttcactatgggagaacgcatcggcgccatcaaacaagaaagcgaagagcccccaacaaagaagaaccgcatgcagttgtctgatgacgagggccatttcacatccagtgacctgatatcctcgcctttcttggggccacatccccaccaaccgccattctgcctgcctttttatttgattcccccaagcgccacagcgtatctcccaatgctggaaaagtgctggtaccccacctccgtgccagtgctttatcccggattgaacgcttccgccgctgctttaagtagcttcatgaatcccgacaagatttccgcacctttactgatgccccagcgtctgcccagcccactccccgcccacccctctgttgactcgtccgtgctcctgcaggcactgaagccaattccgcccttaaatctggaaacaaaagattag

SEQ ID NO: 180220 - DNA, 378 bp, synthetic construct
  misc_feature 1..378: note = Description of Artificial Sequence: Synthetic coding sequence
  source 1..378: mol_type = other DNA
atgccccacagcagcgacagcagcgacagcagcttcagccggagccccccacctggaaagcaggactcaagcgatgacgtcagacgcgtccagagacgggagaaaaacaggattgccgcccagaaatctagacagcggcaaacgcagaaggctgacacgcttcaccttgagtcggaagatttagagaagcagaacgctgcattgagaaaggagataaagcagctgactgaggagctaaagtatttcacatccgtgctgaattctcacgaaccactatgctccgtgttggccgcttctaccccaagccctccagaagttgtatactctgcccatgcttttcaccagccccatgtgagtagcccacgttttcagccatag

SEQ ID NO: 180221 - DNA, 384 bp, synthetic construct
  misc_feature 1..384: note = Description of Artificial Sequence: Synthetic coding sequence
  source 1..384: mol_type = other DNA
atgagccagggcctgcccgccgccggcagcgtgctgcagcggagcgtagccgccccagggaatcaaccgcaaccccaaccgcagcaacagagccctgaagacgacgaccggaaggtgcgccgcagggaaaagaatagagtcgctgcccagagaagtaggaaaaaacaaacacagaaggctgacaaactccacgaggagtacgaatccctggaacaggaaaatactatgctgcgacgggagatcggtaaactcactgaggagctgaaacacctgacagaggctttgaaagaacatgaaaaaatgtgtcctttactactgtgccctatgaatttcgtccctgttccaccgcggccagatcctgtggccggatgtctcccccgatag

SEQ ID NO: 180222 - DNA, 489 bp, synthetic construct
  misc_feature 1..489: note = Description of Artificial Sequence: Synthetic coding sequence
  source 1..489: mol_type = other DNA
atgaaggagaccatcatgaaccaggagaagctggccaagctgcaggcacaggtgcgaatcggtggcaagggcaccgctcggaggaagaaaaaagtcgttcatagaacagctacagccgatgacaagaagctccagttctctctgaagaagctgggagtcaacaatatcagcggtatcgaagaggttaacatgtttactaaccaagggaccgtgattcattttaataaccccaaagtacaggccagtctcgctgccaacaccttcacaatcactgggcatgctgaaaccaaacagctgacggagatgctgcccagcattctcaatcagctcggggctgattccctaacttctctcagaaggctcgctgaagctctgccaaagcaatccgtggatggcaaggctcccctggcaacaggggaagacgatgatgacgaggtcccagatctcgtcgagaattttgatgaggcttcaaagaacgaggctaattag

SEQ ID NO: 180223 - DNA, 621 bp, synthetic construct
  misc_feature 1..621: note = Description of Artificial Sequence: Synthetic coding sequence
  source 1..621: mol_type = other DNA
atgcggcggaccggcgcccccgcccaggccgacagccggggccggggacgcgcccggggcggatgtcccggtggcgaggccaccctgagccaacctccgccaagaggcggtactcgaggccaggagccgcagatgaaggaaacaattatgaatcaggagaaattggcaaagctgcaggcccaggttaggattggcggtaaggggaccgcacggcgcaaaaaaaaagtcgtccatagaacagcgactgctgacgacaaaaagctgcaattttcccttaagaagctcggcgtaaacaacatatccgggattgaggaggtgaacatgtttaccaaccagggcaccgtgatccacttcaacaatcccaaggtgcaggcctctctggcagctaacacgtttaccatcaccggtcatgctgagacaaaacaattgacggagatgctgccaagcatcttgaatcaactcggggcggacagcctgaccagtttgaggcgcttggctgaggcattgccaaaacagagcgtggatgggaaggctccactggccaccggcgaagatgatgacgacgaggtccccgacctggtggagaacttcgatgaagcaagcaagaacgaggcaaattag

SEQ ID NO: 180224 - DNA, 1158 bp, synthetic construct
  misc_feature 1..1158: note = Description of Artificial Sequence: Synthetic coding sequence
  source 1..1158: mol_type = other DNA
atggccgccgccctgttcgtgctgctgggcttcgccctgctgggcacccacggcgctagcggggctgcaggattcgttcaggcgcctctctcccaacaaagatgggtggggggatcagtggagctgcattgtgaagccgtgggcagtcccgtgccagagatccagtggtggtttgaggggcaaggcccaaatgatacatgttcacaactttgggacggagcgagactggaccgtgttcacatccacgcgacctaccatcagcacgctgcgtccactattagcatcgacactttggtggaagaggacacaggcacttacgaatgccgtgcctccaacgaccccgaccgcaaccatctgacgcgtgctccgcgtgttaagtgggtgcgagcccaagctgtggtcctcgttctcgagcccggaactgtgtttactactgtcgaggatctggggtctaagatactgttaacctgcagtttaaacgattccgccaccgaagttaccgggcacaggtggctgaaggggggcgtcgtacttaaggaggacgcattgccagggcagaagactgaattcaaggtggatagcgatgaccaatggggggaatactcttgtgtttttctgccagaacccatgggaacagcaaatattcagcttcacggacctccccgggtgaaggccgtcaaatcatccgaacatattaacgagggcgagaccgccatgctggtatgtaagagcgaatctgtccccccagtgaccgactgggcctggtacaagatcacggatagcgaagacaaagccttaatgaacggttctgagagccgcttcttcgtatcttcatcccagggccgatcggagcttcacatagagaatcttaatatggaggctgaccccggtcagtatcgttgtaacggtacctcttcgaagggaagcgatcaggcaatcataacccttagggtcagatcccacctggccgccttgtggcccttcctgggtatcgtggcagaggtgttagtcctggtgacaatcattttcatctatgaaaagcgacggaagccggaagatgtcctcgacgacgatgacgccgggtcggcaccactgaaaagtagcggtcagcaccagaatgacaaaggcaaaaacgttagacagagaaacagtagttag

SEQ ID NO: 180225 - DNA, 618 bp, synthetic construct
  misc_feature 1..618: note = Description of Artificial Sequence: Synthetic coding sequence
  source 1..618: mol_type = other DNA
atgaagcagagcgacgccagcccccaggagcgggtggacagcgacgatcagtggggagaatactcatgcgtgtttctgcccgaaccaatgggcactgcaaatatccagctgcacggcccacctcgggtcaaagccgtgaaaagcagcgaacatattaacgaaggcgaaactgcaatgcttgtgtgcaagtctgagtccgtgccccctgttactgattgggcctggtacaagatcacggacagcgaggataaggcgcttatgaatgggagcgaatcacggttttttgtgtcctcgtctcagggacgctccgagctgcacatcgagaacctcaatatggaagcagatccgggtcaataccggtgcaacgggaccagctccaaaggctctgatcaggcaatcatcactttgcgcgttaggagccacctggcagctctatggcctttcttaggtattgtggcagaggtactggtgctcgtaacgatcatatttatttatgagaagcgcagaaaacccgaggacgtcctcgacgacgatgacgcaggctcagcacccctcaaatcttctggccagcaccagaatgacaaaggcaaaaacgtgagacagcggaattcatcttag

SEQ ID NO: 180226 - DNA, 810 bp, synthetic construct
  misc_feature 1..810: note = Description of Artificial Sequence: Synthetic coding sequence
  source 1..810: mol_type = other DNA
atggccgccgccctgttcgtgctgctgggcttcgccctgctgggcacacatggggccagcggggcggccgggactgtctttactacagttgaggacctggggtcaaaaatactcctcacatgctcccttaacgatagcgcaactgaggtgacagggcatagatggctcaaaggcggagtcgtcctgaaggaagacgcactgcctggacagaagacggagttcaaagttgattccgatgaccagtggggggaatactcttgcgtgttcctaccagaaccgatgggcactgctaatatccagctccacggtccaccccgcgtcaaggccgtgaagtcttcagaacacatcaatgaaggagagacagctatgctagtgtgcaagtccgagtctgtgccgccagtgactgattgggcctggtataaaattactgattcagaggacaaggcgctaatgaacggctcagaaagccgcttctttgtctcttcatcgcagggtaggagtgagctgcatatagaaaatctgaacatggaggctgatcccggccagtatcgctgtaacgggactagctccaaggggtccgaccaagctataatcacgctccgggtgcgttcccatctggccgcactgtggcccttcctgggtattgtcgccgaagtgctggttttggtgacaattatattcatttatgagaagcgtcggaagcctgaggacgtgcttgacgacgacgacgcggggagcgctcccttgaaatcctctggacagcatcaaaatgataagggaaaaaatgtgcgtcagcgcaacagttcatag

SEQ ID NO: 180227 - DNA, 531 bp, synthetic construct
  misc_feature 1..531: note = Description of Artificial Sequence: Synthetic coding sequence
  source 1..531: mol_type = other DNA
atgggcaccgccaacatccagctgcacggccccccccgggtgaaggcagttaagtcctcagagcacattaacgaaggcgagactgccatgcttgtctgtaaaagcgaatccgtgccaccagtgacagattgggcctggtacaagatcaccgatagcgaagataaagccttaatgaacggttcagagtcccggttctttgtcagttcctctcaggggagatccgaattgcacattgaaaacctcaacatggaggcagaccccgggcaataccgctgtaacgggacctcctcgaaaggtagcgatcaagctatcattacactgcgagtgagatcccacctggctgccttgtggccctttctcgggattgttgccgaggtgttggtcttggtgacgattatctttatttatgaaaagagacgtaagccagaagacgtgctggacgacgacgacgctggctctgctcccctaaaatcaagcggtcagcaccagaacgacaagggaaaaaatgtccgtcagcgcaatagctcgtag

SEQ ID NO: 180228 - DNA, 2985 bp, synthetic construct
  misc_feature 1..2985: note = Description of Artificial Sequence: Synthetic coding sequence
  source 1..2985: mol_type = other DNA
atgcggcggcggccccccagccggggcggccggggcgccgcccgggctagggagactcgaaggcaaccccggcacaggagcggtcggaggatggctgaggcaatttcttgtacccttaactgctcttgtcagagctttaaaccagggaaaatcaatcataggcagtgtgaccagtgcaagcatgggtgggtggcccatgcactgagcaagctcaggatcccgccgatgtacccaacatcccaggtggaaatcgtgcagagcaatgtcgtgttcgacatctcttctctgatgctgtacggcacccaggcaatcccagttcggctgaagatactgctcgacaggttattctcagttcttaagcaagatgaagtgctccagatattgcacgctctcgactggaccctgcaagactacattcggggttatgttctccaagacgccagtggaaaggtcctcgatcattggtctatcatgacctcggaagaggaagttgcaacactgcaacagtttctgaggtttggggaaacaaaaagcatagtggagctgatggctattcaggagaaggaggagcaatcaattatcatccctccgagtactgcaaacgtggacattagggcatttatcgagagttgttcacacaggtcatcctctcttccgaccccagtagacaagggcaatccaagctctattcatccgtttgagaatttgatcagtaacatgacttttatgctcccatttcaatttttcaaccccctgcctccagctcttatcgggagtctgccagaacaatacatgctggagcagggccacgatcagagccaggatcctaagcaggaagtgcacggtccttttcccgacagtagcttcctgacctcttccagcaccccatttcaggtggaaaaagatcaatgcctgaattgcccagacgcgatcacaaagaaagaggattcaacacacctgtccgacagcagcagctataacattgtgacaaagtttgaacgcacacagctgtcccccgaagcgaaggttaaacccgaaagaaactctctaggaaccaaaaagggaagagttttttgcaccgcttgcgaaaaaacattctatgacaagggtacgttgaaaattcactacaacgctgtccacctgaagattaaacataagtgcaccatcgaggggtgcaatatggtattttcaagcctgcgttccagaaacaggcactctgcgaacccgaacccccgattacatatgcccatgaaccgcaacaatcgggacaaggatctacggaattctctgaatctggcctccagtgaaaactacaaatgtcccggatttactgtgaccagtccagactgcagacctcccccatcgtaccctggcagcggagaagacagcaaaggccagcctgcatttcctaatattgggcagaatggggtgctttttcccaacctgaaaacagtccaacctgtcctgccattttaccgttcaccagccacacccgcagaagtggcgaacacccctggtatcttgccctcgttacctttattgtccagcagcatcccggagcagttgatctcgaacgagatgccattcgacgccctgccaaaaaagaagagtcgaaagtcatccatgcccattaagatcgagaaggaggcagtagaaattgccaacgaaaagcgccataacctgtctagtgatgaggatatgccactgcaggtggtgtctgaagatgagcaagaagcctgctctcctcagagccacagggtttcggaagaacaacatgttcagtcaggcggcttgggcaagccctttccagaaggagagagaccttgtcatagggaatcagttattgagtcatctggcgccatcagccagacccctgagcaggcgacccataatagcgagcgagaaacagaacagactccagcccttattatggttcccagggaagtcgaagatggaggtcacgaacactacttcactccaggtatggaaccccaggtcccattcagcgattacatggagctacaacagcgactgttagccggaggattatttagcgccttgagcaaccgcggcatggcattcccttgcctagaagactcaaaagaactggaacatgtggggcagcatgcacttgctcggcagatagaggaaaaccgcttccaatgcgatatttgtaagaagactttcaagaacgcctgctccgtgaagattcaccacaaaaacatgcatgttaaagaaatgcatacatgtaccgtggaagggtgcaacgctacgtttccaagccgcagatccagggatcgacatagtagcaaccttaatctgcaccagaaggctctgtcacaggaggctcttgagagtagcgaggaccattttagggctgcctatctgctaaaggatgtggctaaagaggcataccaagacgtcgcctttacgcagcaggctagccagacatcagtgatcttcaaggggactagccgcatgggtagcctggtctatcccattacccaggtgcattctgcaagtctggaaagttacaacagcggccctctaagcgaggggacgatcctggatttatctacaacaagtagtatgaaatccgaatcgagcagccacagttcttgggattcagacggagtgtcagaagagggaacggttctcatggaggactctgatggtaactgtgaaggctctagtctcgtgcccggggaagacgagtatcctatctgcgtgttgatggaaaaggcagaccaatccctagcatcgttgccctccgggctgcctatcacctgccacctgtgtcagaagacatatagtaacaagggcacttttcgcgcgcactataagaccgtccacttgcggcagcttcataaatgcaaggtccctggctgtaatacgatgttttcaagcgtcagatctcgaaaccgccactctcagaacccaaatcttcacaaatcattggcctcaagcccgagccatttgcagtag

SEQ ID NO: 180229 - DNA, 2964 bp, synthetic construct
  misc_feature 1..2964: note = Description of Artificial Sequence: Synthetic coding sequence
  source 1..2964: mol_type = other DNA
atgcggtgccggaacatgttcttcagcttcaaggccagcctgtgcgggtgcggtgctgctactgcaccaagcctcacagcaatctcttgtacactgaactgttcatgtcaatcgttcaaaccaggtaagatcaatcatcgtcagtgtgaccaatgtaaacatggctgggtggcacatgcgcttagcaagttgcgaatccctcctatgtaccccacaagccaggtcgagatcgtacaatctaatgtggtctttgatatctcgagtctgatgctgtatggcactcaggcgattcctgtgaggctgaagatcctgttggaccggctgttcagcgtgctgaaacaggatgaggtgctgcaaattctgcatgcactggattggactctccaggactacatccgaggctatgttcttcaggatgcttctggcaaggtactggatcactggtccatcatgaccagcgaagaggaagttgccacactccagcagttcttgagattcggcgaaaccaagtccatcgtcgaacttatggccattcaagaaaaagaagagcagtcaattatcataccgccgagtacagctaacgtggatattcgcgcttttatcgagagctgttcacaccgttcctcctccttaccaaccccggtcgataagggtaatccctcttcaatccacccctttgagaacctcatctcaaatatgacctttatgctacctttccagttctttaaccctctcccaccagctctgatcggaagtcttcctgaacagtatatgctcgaacagggacacgaccagtcccaggatcctaagcaagaagtgcatggacccttccctgattcatccttcctgacaagttcttcgaccccattccaggtggaaaaagatcagtgtttaaactgccctgacgcaatcaccaagaaggaagactctacccacctctccgacagctcatcctataatatcgtaaccaaatttgagagaacccaacttagcccagaggctaaagttaagcccgaaagaaattctttgggtactaagaagggcagagtcttctgcacggcttgcgaaaagactttctacgataaaggcacattgaaaattcactataacgccgtacatttgaaaataaagcacaagtgtaccattgaggggtgcaacatggttttctcttcgttgcggagtcggaatcggcattccgccaatcctaaccctaggctgcacatgccgatgaaccgtaacaatcgcgataaagaccttcggaacagtctgaatctggccagctccgagaactacaagtgccctggcttcacggtcacttcaccagactgtcgaccgccaccgtcatatcctggcagcggtgaggattctaaaggacaacctgcttttccaaacatcgggcagaacggcgtgctgtttccaaatcttaagacagtccagcccgtccttccattttaccggtctccagccacccctgcagaagttgccaacactcctggaatactcccctccttgcccctcctttcctcaagtattcctgagcagctcatctccaatgagatgcctttcgatgccttgcctaagaagaagagccgcaagtcaagcatgccgattaagatagagaaagaggcggttgagatcgcaaacgagaaaaggcataacctaagctcggatgaagacatgccactgcaggtggtgtctgaagatgagcaagaagcttgctcaccccaaagccaccgcgtctccgaagagcagcatgtacagtccggtggtctggggaaaccgttccccgagggtgagcggccctgccatagggagtctgttattgagagtagtggggcaatctcccaaactcctgaacaggcaactcacaactctgaacgcgaaaccgaacagaccccagccctgatcatggtaccccgcgaagtagaggatggcggtcacgagcactatttcactcctggcatggagccacaggtcccgttcagcgattacatggagttacaacagcgcctgttagcaggggggctgttcagcgcgctttcaaatcggggaatggcttttccttgcctcgaggattcaaaagaactcgagcacgtgggccagcatgctctcgcccgccagattgaggagaatcggtttcagtgtgatatctgtaagaagaccttcaagaatgcatgttctgttaaaatccaccacaaaaacatgcacgtgaaagagatgcacacatgcaccgtcgagggttgcaatgcaacatttcccagtcgcagatcccgcgatagacactcttctaacctgaacctccaccagaaagccttgagccaagaggccctggaaagctccgaggatcatttcagggccgcctatctcctcaaagatgtggcgaaagaggcataccaggacgtggctttcacacagcaggcctcccagacctccgtgatttttaagggaacatctagaatgggtagtctggtctatccaatcacccaggtccactctgcttcgctcgaatcatataactcagggcctctatccgagggcacaatcctcgacctgagcaccacaagtagcatgaaaagtgagtcctcgtcccattctagttgggacagcgatggcgtctctgaggaaggcacagtcttgatggaggacagcgacggcaattgcgaggggagttcactggtcccaggggaagatgaataccctatctgcgtgctaatggagaaggctgaccaaagcctagcctccttgccctccgggctccctataacttgccacctctgccagaagacatacagcaataaggggacctttagggcccattacaaaacagtgcatctgcgccaactgcacaagtgcaaggtgccagggtgcaacactatgttcagcagtgtccgatcacgcaatcgtcattctcagaatcccaacttgcacaagtctctcgcatcatccccctctcacctccaatag

SEQ ID NO: 180230 - DNA, 2712 bp, synthetic construct
  misc_feature 1..2712: note = Description of Artificial Sequence: Synthetic coding sequence
  source 1..2712: mol_type = other DNA
atggcccacctgggccccaccccccccccccacagcctgaactacaaatccgaagatcggctttcggagcaagactggcccgcctactttaaagtaccatgttgtggtgtggatacatcccagatcgagagtgaggaagctgaagtggatgtgagggagcgggagacccagcgcgacagagaacccaagagagcgcgcgacctaactctgagagatagctgcacagataatagtatgcagtttggtacccgcaccactaccgctgaaccggggtttatgggaacctggcagaacgctgacactaatttactctttagaatgtctcagcaggctatccgttgcaccctcgtaaattgtacatgtgagtgttttcaaccaggaaaaataaacctcaggacgtgtgatcagtgcaagcatggatgggttgcccacgctctcgacaagttatccacccagcatctttaccaccccacacaagtcgaaattgtgcaatcaaacgttgtgttcgacatctccagcttgatgctgtatggtacccaggccgtgcccgtgcgtttaaagattttgctggacagattgttctccgtgctgaagcaggaagaggtcctccatatcctccatggtctgggatggacactgagagactacgttcgaggatatattctgcaggacgctgcgggaaaggtcctggaccgatgggctattatgtcccgcgaagaggaaatcatcacgctacagcagtttctgcgattcggcgagaccaagtccattgtggagctcatggccattcaagagaaggaggggcaagctgtcgctgtcccttcgtctaagactgactctgacataaggacatttattgagagcaacaatcgcactagatccccaagtctgttggcccacctcgaaaatagtaatccatcatctatccatcactttgaaaacataccgaacagtttggcgtttctgttgcccttccagtacattaaccctgtgagcgcgcctctcttagggctgccacccaacggccttctgctcgaacaaccaggcctccgcctgcgggagcccagcctgtctacacagaatgagtataatgagagtagtgagtcagaggtgtcacctactccttataaaaacgatcagacaccaaatcgaaatgccctgacatcgatcactaacgttgagccgaagactgagccagcctgtgtgtccccaatccaaaacagcgcacccgtttccgacctgacgaagacagaacacccaaagtcttccttccgtatacaccggatgcgtcgtatgggctctgcctcacgcaagggcagggtattctgcaatgcttgtgggaagacattttacgacaagggaacattgaagattcactacaacgctgtgcatttgaagatcaagcatcggtgcaccatagaggggtgtaatatggtcttttcatctcttcgctctaggaacagacatagcgcaaaccccaacccgcgcctgcacatgccaatgcttcgcaacaaccgcgataaggatctcataagagccacatcgggcgcggctacccctgttatcgccagcacgaagagtaacctggcgctgacaagtccaggaagaccaccgatggggtttacaactccaccactggacccagtcctgcaaaatcccctaccatctcagctcgtgttttccggacttaaaaccgtgcagcccgtgcctcctttttatagatccctgttgaccccgggagaaatggtcagcccccccacatccctgccgaccagccctatcattcctacaagcgggacgattgaacaacaccctccgccccctagtgagccggttgtgccagccgtgatgatggcaactcatgagcccagtgcagacctggctccaaagaagaagcctcggaagagctctatgccagttaagatcgaaaaggagatcatcgataccgccgacgagttcgatgatgaggacgatgacccgaatgatggaggagcagttgttaacgacatgtcacacgataaccactgtcactctcaggaagaaatgtctccgggtatgagtgttaaggacttcagtaagcataatcggacgcgctgtatctcacgcacagaaatcagaagggcggattcaatgacctcggaagaccaggagcccgaaagggattatgaaaatgagtccgagtcctcggagccaaaacttggtgaagaaagtatggagggagacgaacacatccattctgaggtgtccgagaaggtgttaatgaatagcgaacggcctgacgagaatcattcagaaccctctcaccaagatgtcattaaggtgaaagaagagtttacggatccaacttacgatatgttttacatgagccagtacggcctatacaacgggggcggggcaagcatggctgcactccatgagagtttcacctcttcacttaactacggaagtcctcagaagttctcccccgagggtgatctgtgtagctctccagacccaaagatctgttatgtgtgcaaaaagtcctttaagtccagttattctgttaaactccattaccgcaacgtccatctgaaggagatgcacgtatgtaccgtagccggttgcaacgccgcattcccatccaggagatcccgggaccgctattgggaaaaatcaaacgaacagaacgggttactggtctcatggggcgagaccctgagttcactgaaatag

SEQ ID NO: 180231 - DNA, 3099 bp, synthetic construct
  misc_feature 1..3099: note = Description of Artificial Sequence: Synthetic coding sequence
  source 1..3099: mol_type = other DNA
atggcccacctgggccccaccccccccccccacagcctgaactacaagagcgaggaccggctatcagaacaggactggcctgcatacttcaaggtgccctgttgtggagtggataccagtcagattgaggcaatcaggtgcaccctcgttaactgcacctgtgagtgtttccagcccggcaagattaatctccgcacttgtgaccagtgcaagcacggttgggtggcccacgccttggacaagctgagtacacagcacttgtatcatcctactcaggtagagattgttcaaagtaatgtggtcttcgatatttctagcttgatgctgtacgggacacaagcagttcctgttaggctcaagattctactcgacagacttttttctgtcctgaaacaggaagaagttctccacatactgcacggcctggggtggacactgcgcgattatgtgcgaggatatatcctccaggacgctgccggaaaggtgctggacaggtgggcgataatgtcacgggaggaggaaataattactctccagcagttcctgcggtttggagagaccaagtccatcgtggaactgatggcaattcaggagaaagagggacaggccgtggctgtgccctcaagcaaaaccgactctgacatacggacctttatcgagagcaacaacaggacaagaagcccttctcttctggctcatctggagaactccaatccaagcagtatccaccattttgagaacattcccaacagcctggcctttctgctcccctttcaatatattaaccctgttagcgcacctctactggggctcccaccaaatggcctcctgctggaacagcccggcctgcgacttagggagcctagcctgagcacccagaatgagtataatgagagctcagaatctgaggtcagccctacaccatacaagaacgatcagacacctaatcggaacgcgctgacctctattacaaatgtggagcctaagaccgagcctgcctgcgtgagccccattcaaaatagcgccccagtctcagacctgaccaagacagaacacccaaaaagttcctttagaatacaccgcatgcggcggatggggtccgcgtctaggaaaggaagggtgttctgcaacgcttgtggtaaaacattctacgacaagggcaccctgaagattcattacaacgccgttcaccttaaaatcaagcatcgttgtacgattgaagggtgtaacatggttttttctagcttacgatctcggaaccgacatagcgccaaccccaacccccggctgcacatgcctatgttacgcaataaccgcgacaaagacttgattagggctacgtcaggtgccgctacccccgtaatcgcatcgacaaaatctaatcttgctctcacaagcccgggaaggcctccaatggggttcacgacccctccgctggaccctgtcctgcagaatcctctcccttctcagcttgttttctccggactgaaaaccgtgcagcccgttcctccattttatcgcagcctgcttactcctggagagatggtttcgccaccaacaagtctgccaacgagcccgatcattccaacatctggcaccattgagcaacatccccctcccccgagtgagcccgtggttcccgctgtcatgatggcgactcatgaaccaagtgctgatcttgcgccaaagaaaaagcctcgcaaatcctccatgcccgtaaaaatagaaaaggagattattgacaccgcagacgaatttgacgacgaagatgatgaccctaacgacggaggcgcggtagttaatgacatgtcgcacgacaatcattgccacagccaagaggaaatgtccccaggtatgtctgtaaaagacttcagcaagcataacaggacccggtgcatcagtcgtacagagatacgacgggccgactctatgacttccgaggatcaggagcccgaacgagactacgagaatgagtcagaaagctcagaacccaagttaggcgaagagagcatggagggggatgagcatattcactcggaggtatcagagaaggtgctgatgaactctgaaaggccagacgaaaaccactccgaaccttcacaccaggatgtcatcaaagtgaaagaggagttcacagatcctacttacgacatgttctacatgtctcaatacggtctttataatggaggcggggccagcatggcagccttgcacgagagctttacttcctccttgaattacggtagcccacagaaattttcacccgagggggacctgtgttcttcacccgaccccaagatctgttatgtgtgcaagaagagcttcaagtccagctattccgttaagcttcattatcggaacgtccatttgaaggagatgcacgtttgcaccgtggcaggctgcaatgcagccttcccatccaggcgatctagagatcggcatagtgctaacattaatctacacagaaagctgcttacaaaagagcttgatgatatggggctggactcttctcagccgtccctgtcaaaggacctccgcgacgaatttcttgtgaagatctatggcgcgcagcaccctatgggcctggacgtgcgcgaggacgccagtagccccgccggtacagaggattcacatcttaatgggtacgggagaggaatggccgaagattacatggttctcgatctgagtactactagctcgctgcaatcaagttcctcgattcactccagcagggaaagcgacgcgggcagcgacgagggcatcctgttggacgacatagatggagcatctgacagtggtgaatctgctcacaaggccgaagcgcctgctctcccaggttcactgggcgctgaggtctccggttcactgatgttcagtagcctgagcgggtctaacggcggcatcatgtgtaacatatgccataaaatgtatagcaataagggcacgctacgagtacactacaagaccgtgcatctgagggagatgcacaaatgtaaggtaccgggttgcaacatgatgttcagcagcgtaagatctcggaaccgccactcccagaatccaaacctccataaaaacatcccatttacatcagtcgactag

SEQ ID NO: 180232 - DNA, 3300 bp, synthetic construct
  misc_feature 1..3300: note = Description of Artificial Sequence: Synthetic coding sequence
  source 1..3300: mol_type = other DNA
atggcccacctgggccccaccccccccccccacagcctgaactacaaatctgaagacaggctatcggaacaggattggccggcatactttaaggtgccttgctgtggggttgacactagccagatcgagagtgaagaggcagaggtagatgtgcgcgaaagggaaacccagagggatcgtgaaccaaaaagggcaagggacctcactttaagagatagttgcacagataactccatgcaattcggtactcggacaactaccgccgaacccggattcatgggaacctggcagaatgcggacactaacttgctgttcaggatgtctcagcaggccattcgctgtacacttgttaattgcacctgcgaatgtttccagccgggcaagatcaatctccgtacttgtgatcagtgcaagcatggatgggtagctcacgcactggataagctctcaacacagcacctgtaccacccaactcaggtggaaatcgtgcaaagcaacgtggttttcgatatttcgagcctgatgttatatggaacccaggcggtccctgtccggctcaagatcttactggaccggttatttagcgtcttaaagcaggaggaagtgctccatatcctccatggactcgggtggacgttacgagactacgtgcgagggtacatcctccaagacgccgctgggaaggtcctggaccgttgggcaatcatgagccgcgaagaggagattataaccttacaacaatttctgcgcttcggagagacaaaatcgatagtagagttgatggcaattcaggagaaggagggacaggctgtcgccgtccccagctccaaaactgatagtgatattaggacattcatcgagtcaaataatagaaccaggagcccctcactcttagcccatcttgaaaatagtaatccttcttccatccatcacttcgagaatattcctaattcattagccttcctcttgccctttcagtacatcaatccagtctccgcgcctttactaggactgccgcctaacgggctgcttctggagcagccaggacttagactgcgcgaaccctccctgagcacccagaatgaatacaatgaatcatctgaatccgaggtatcacctaccccgtacaagaatgaccaaacccccaatcggaatgccctgacatcaatcactaatgtcgaacctaaaacagaacctgcgtgcgtttcccccatccagaacagcgctcctgtgtcagatctgactaagacagaacaccccaaaagctctttcaggattcaccgaatgagaaggatgggcagcgcatctaggaagggtagagtattctgcaacgcgtgcggaaaaacattctatgacaaagggaccctgaagattcattacaacgccgtacatcttaaaatcaaacatcggtgcacaatcgagggttgtaatatggttttcagtagcctccggagccggaaccgacacagtgctaatccgaaccctaggcttcatatgccaatgcttcgcaataatcgggacaaggacttaatcagagcaacatcgggggcagctacccccgttattgccagtactaaatcaaatctagcactgacctcaccaggaaggccacctatgggcttcacaacaccacccctggatcctgttcttcagaacccccttccgtctcaacttgtattttcaggactgaagactgtgcaaccagtaccacccttctaccgcagtctgctaacgccaggagagatggtgagtccccccacttccctgcccacatccccgatcatcccaacttctggtacaatcgaacagcacccccctcctccttccgagcctgtcgtgccggccgttatgatggccacacacgaaccaagtgcagatctggctcctaaaaagaagccccgtaaaagctctatgcccgtaaagattgagaaggagataattgacaccgccgacgagttcgatgatgaggatgatgatcctaacgatgggggtgccgtggtaaacgatatgtcgcacgacaaccactgccatagccaggaggagatgtctccaggcatgtcagtaaaggacttctccaagcataacaggaccaggtgtatctcaagaactgagatccgacgcgccgattcgatgactagcgaagatcaggaaccggaaagagactacgagaatgagtcagagtctagcgaacctaagctcggagaggagagcatggagggcgacgagcatatccactccgaggtttccgagaaggtgctcatgaatagtgagcgccccgacgagaaccacagtgagccctcccaccaggatgtgattaaagtgaaagaggaatttacagacccgacttacgatatgttctacatgtcccaatacggcctgtataacggcggcggagcctcaatggcagccctgcatgagagttttacctcctcgctcaattatgggtcacctcagaagtttagcccagaaggggacttgtgttcctctcctgacccaaagatctgttatgtgtgcaaaaaatcgttcaagagctcgtattctgttaagctgcactaccgcaatgtacacttaaaagagatgcatgtgtgcaccgttgcaggatgcaacgctgctttcccttcacgtaggtcccgggacagacactcagccaatatcaatctgcaccgtaaactgctgacaaaggagcttgatgatatgggtcttgactcctcacagcccagtctctccaaggatctgcgggacgagttcctggtcaagatttatggtgcacagcaccccatgggactcgatgtgcgagaggacgcaagttctcccgcaggaaccgaagattcccacctgaatggctatggacggggaatggctgaggactatatggtcctcgatctgtctactacctcttccctgcaatcatcaagcagtatacatagcagtcgcgaatccgacgccgggagtgacgaagggatccttctggatgacatcgatggcgcgtccgacagcggcgaatccgcacataaggcagaggccccagcccttcccgggtcgcttggggccgaggtgagcgggtcgctaatgttctcctcactcagtgggagcaatggtggcatcatgtgcaatatctgtcacaaaatgtattccaataagggcaccttgagggtgcattacaaaaccgtgcacctaagagagatgcacaagtgcaaagtgccagggtgtaacatgatgttttcctccgtgcgctccaggaatcgccactcccaaaaccccaacctccacaagaatattcccttcacttctgttgactag

SEQ ID NO: 180233 - DNA, 984 bp, synthetic construct
  misc_feature 1..984: note = Description of Artificial Sequence: Synthetic coding sequence
  source 1..984: mol_type = other DNA
cccagcgagcccgtggtgcccgccgtgatgatggccacccacgagccaagcgccgacctggccccaaagaagaaaccaaggaagtcttccatgcccgttaagatcgaaaaagaaataatagacaccgccgatgagttcgacgatgaagatgatgatcccaacgacgggggggctgtggtcaacgacatgagccacgataaccactgtcatagtcaggaggagatgtcccctggtatgtctgtgaaggatttttctaagcataaccgcacacgctgtatcagtcggactgaaatccggcgagcagactctatgactagcgaggatcaggagcctgagagggactatgagaatgagtccgaatctagcgaaccaaaactaggggaggagagcatggagggcgatgaacacatccactcggaggtgtctgagaaggtgttgatgaacagcgagcgcccagatgagaatcactcagaaccttctcaccaggatgtaatcaaagtgaaagaggagttcaccgaccccacatatgatatgttttacatgagtcagtacggtctgtacaatgggggcggcgccagcatggctgcgctgcatgaatcctttaccagctcactgaactacgggagcccccagaagttctcccccgagggagatctgtgcagtagtcctgatcctaagatatgctacgtgtgcaaaaaatcgtttaaatcatcatacagcgtgaagctgcattacagaaatgtgcacttaaaagagatgcatgtctgtacagtggctggctgtaacgccgctttcccttccaggcggagccgagatagaaaccggaacctccgtatggagcgtacaataggcccagggcatagagacagtctgcacttgagacgtggaaattcaaacaggccgggtacgtgttgcctgcacactggggattcactggaagagagtgtgatagtacgaatcagttgtaaaaggcttgaatcttag

SEQ ID NO: 180234 - DNA, 2583 bp, synthetic construct
  misc_feature 1..2583: note = Description of Artificial Sequence: Synthetic coding sequence
  source 1..2583: mol_type = other DNA
agcgaggaggccgaggtggacgtgcgggagcgggagacccagcgggacagagagcctaagcgagcccgggatctcacactgagggattcatgcacagacaattccatgcagtttggaacacggactactacagctgagccgggattcatgggaacctggcagaacgcagacaccaatctgctgttccggatgtcacagcaggccataaggtgcactctggtgaactgcacatgcgaatgtttccagcctgggaagatcaatctgcggacctgcgaccaatgtaaacacggctgggttgcccacgccctggataagctgagtacacagcatctataccacccgactcaggtggaaatcgtgcagtccaacgtggtattcgacattagctcactcatgctgtacggcactcaagcagtgccagttagactcaaaattctgctggacagactcttttctgtgctgaagcaagaagaggtccttcacatactacatgggttgggctggacgctgagggattatgtccgcggatatatccttcaggatgctgccggtaaggttcttgatcggtgggcgatcatgtccagagaagaggaaatcattactctccaacagttcctccgttttggcgagaccaagagcatcgttgagctcatggcaatccaggaaaaagaggggcaggctgtcgctgtgcctagctcgaagaccgacagtgatattcgcacattcatcgaatctaacaatagaacgaggtccccctcactgttggcacaccttgaaaactctaatccaagctctattcatcactttgagaatatccccaacagtttagctttcttgctgccgttccaatatatcaatcccgtgagcgcgcctctgttgggcctcccacctaatggactcttgttggaacagccggggcttaggttgagagagccctccctcagtactcagaacgagtataatgaatcttctgaatctgaagtcagcccaacgccctacaaaaatgaccagactcccaacaggaacgctctaacctccatcacaaacgtagagcccaagacagaacctgcatgcgtgagccccattcagaactccgccccggtctcagacctgactaagactgaacaccctaagtcatctttccgcatccatcgcatgcgtcggatgggttcagcgtcacggaaaggcagggtgttctgcaacgcctgtgggaaaactttctatgacaaaggaactctgaagatccattataatgctgtccatctgaagattaaacatagatgtaccatcgaagggtgcaatatggtgttcagtagcctgagatccagaaaccgacactccgccaaccctaacccacgcctgcatatgccaatgctgcgaaataaccgggataaggacctgatacgggccacttccggcgctgcgacccctgtgatcgcttctaccaaatcaaacctggccctgacaagccctggtaggcctcccatggggtttaccacccctccactggaccccgtgctacagaaccccctcccctcccagctggtgttctccgggctgaaaaccgtacagcccgtcccaccattctacaggtctcttctgactccgggtgaaatggtcagtcccccaacttctctccccacctctcccataataccgacaagcggcactatagaacagcacccaccaccaccatcggaacctgttgtccccgcagtgatgatggccacccacgagccaagtgccgatttagcacccaagaaaaagcctcgcaaatcaagtatgcccgtcaaaatcgagaaggaaatcattgacaccgccgatgagttcgatgacgaggatgacgatcccaatgatgggggtgcggtcgtaaacgacatgtcccacgacaaccattgccacagccaggaagaaatgtccccaggtatgagtgtgaaggatttcagtaagcacaaccggactcgttgcatcagtcggaccgagataagaagagcagatagtatgacgtctgaagatcaagaacccgagagggactatgagaacgaaagcgaatccagcgaaccaaaattgggagaggagtctatggagggcgacgagcatatccattccgaagttagtgaaaaggtgctgatgaattcagaacggccagacgaaaaccacagcgaaccgtcacaccaggacgtcatcaaagtaaaggaagagtttacagaccccacgtacgacatgttctatatgagccagtatgggttgtacaacggtggaggagcttctatggccgcattgcacgaatccttcactagcagcctcaactatggtagccctcagaagttcagcccagagggcgacttgtgttcctctcctgaccctaaaatctgctacgtctgcaaaaagagttttaaaagttcatatagtgtcaagctgcattacagaaatgtacacctcaaggagatgcacgtctgcactgtcgccgggtgcaacgcggcatttccaagcaggagatcaagagacagaaatagaaatctgcgtatggagaggaccatcggcccaggacaccgtgactcgctccacctgctcccaacctag

SEQ ID NO: 180235 - DNA, 1206 bp, synthetic construct
  misc_feature 1..1206: note = Description of Artificial Sequence: Synthetic coding sequence
  source 1..1206: mol_type = other DNA
atggcccacctgggccccaccccccccccccacagcctgaactacaagtcagaagaccgactgagtgaacaggactggccagcctatttcaaagtgccctgctgcggtgtagatacatcacagatagagagcgaagaggcagaggtcgacgtccgggagcgagaaactcagcgcgacagggagcccaaaagggctcgggacctgactttgagagactcgtgcaccgacaacagcatgcagtttggaacacgcaccaccaccgcagagcctggattcatgggcacctggcagaatgcagacaccaatctgctcttcagaatgagccagcaggtgcccctggcgtgcacgggaagggtgcttggcgctgacttttgtcccaacctggaagagccttaccatcgcctggaagtccaggcaatacggtgcactcttgtcaattgcacatgcgaatgtttccagccgggtaaaatcaacctccgtacctgcgaccagtgcaagcacgggtgggtggcacatgcattggacaagctgtctactcaacatctgtaccacccgacccaggtcgaaatagtccaaagcaacgtcgtgttcgacatatcatcactgatgctgtacgggactcaggccgttcccgtacgcctgaagatccttctagacaggctgtttagtgttctgaagcaggaggaggtcctgcatatcctacacgggctggggtggacactgagagattatgtgcgtgggtatatccttcaggatgccgcaggtaaagtgcttgaccggtgggccatcatgtcacgggaggaggaaattataactctgcagcaattcttaagattcggggagaccaagtcaatcgttgagctcatggccatacaggagaaagagggccaggccgttgccgtacctagcagcaaaaccgactccgacattagaacgttcattgagagtaacaacagaacaaggagtccctcgctcttagcacatttagagaacagtaacccttccagcattcaccacttcgaaaatatccccaattccctggcctttctcctgcccttccagtatatcaatccagtatcagctccactgttaggcctcccccctaatggactgttgctggaacaaccaggacttcgactccgggagcctagtctctccacccaaaacgaatataatgaaagctcagaatccgaagtttccccatag

SEQ ID NO: 180236 - DNA, 306 bp, synthetic construct
  misc_feature 1..306: note = Description of Artificial Sequence: Synthetic coding sequence
  source 1..306: mol_type = other DNA
atgtgccggctgctggtgcccctggcctgcaccggccgggtgctgggtgctgatttttgcccgaacctggaggaaccctatcatcgactcgaggtgcaggcaatcaggtgtaccttggtgaactgtacttgcgagtgctttcagcccggcaagattaatctgcggacatgtgatcagtgcaaacacggatgggtagcccacgcgctcgacaaattgtccactcaacatctctatcatcccacgcaggtcgagatcgtccagtctaatgtcgtgttcgatattagctccctcatgctgtatgggtag

SEQ ID NO: 180237 - DNA, 1233 bp, synthetic construct
  misc_feature 1..1233: note = Description of Artificial Sequence: Synthetic coding sequence
  source 1..1233: mol_type = other DNA
atggcccacctgggccccaccccccccccccacagcctgaactacaagagtgaggatagactgtcagaacaagattggccggcttactttaaggttccttgctgtggcgtggacactagccagattgaatccgaagaggcagaagtagacgtcagagaaagggaaactcagcgggatcgagagccaaagcgagcgagagatctcacccttagggactcttgcactgacaattcgatgcagttcggcacgagaactactacggccgagccaggcttcatggggacctggcagaacgcggacaccaacctgctatttagaatgtcacagcaagccggcttgaagctgctgaccagcggggatcctcccgtgttagactttcagagcgcggggatcaccggtgtgagccactgtacgaggctgaaggtggccatgattagcaaagccattagatgtaccctggttaattgcacatgcgagtgttttcaacctggtaaaattaatctccgtacttgtgaccagtgcaaacatggctgggttgctcacgccttggacaagctttccactcagcatttataccaccctacccaggtcgaaatcgtccagtctaacgtggtatttgacatttctagtctcatgctgtacggaacccaggctgttccagtaagactcaagatattacttgatcggctgttctccgtgctgaagcaggaagaggttctccacattctacatggcctcggatggaccttgagagactatgtgcgcgggtatatcctgcaggacgcggctggcaaagtgctcgacagatgggccatcatgtccagggaagaagagattatcaccctgcaacagtttctgagattcggcgaaacaaagtcgatcgtggagcttatggcaatccaagagaaagaaggacaggccgtagccgttccatccagcaaaacggactcagacatcaggacttttattgaatctaataaccggactcgctctccctcgctcctcgctcatctggagaacagcaatccctcctcaatacaccattttgagaacatccctaacagccttgcctttctccttccattccagtatatcaaccccgtctccgcgcctctcttggggctcccacccaatgggctacttcttgaacagcctgggttgcggctccgcgagcccagcctttccacgcaaaacgagtataacgagagtagcgaatctgaagtcagtccttag

SEQ ID NO: 180238 - DNA, 2712 bp, synthetic construct
  misc_feature 1..2712: note = Description of Artificial Sequence: Synthetic coding sequence
  source 1..2712: mol_type = other DNA
atggcccacctgggccccaccccccccccccacagcctgaactacaaatcagaggatcggctaagcgaacaggactggcctgcatactttaaagtgccatgctgtggagttgatacgtcacagatagaaagcgaagaggctgaagtggacgttagagagagggaaacccaacgggaccgtgagcccaagcgggctcgggacctgaccctgcgtgactcttgcactgacaacagcatgcaattcgggacacggacaaccactgctgagcccggattcatggggacttggcagaatgccgacactaacctgttgttcagaatgagtcagcaggccattaggtgcaccctggtgaattgcacttgcgagtgcttccaaccagggaaaatcaacctcaggacatgcgaccagtgtaaacacggttgggtagcgcacgcgcttgacaagctgtctacacagcacctataccacccaacgcaagttgaaatagttcagagtaatgtggtgttcgacatctcttcccttatgttatacggaactcaggccgtgcctgtcaggctgaagatcctactggatagattattttccgttctgaaacaggaggaggtgctacacatacttcacggactcggttggactctgcgggactacgtccgggggtatatccttcaggacgcggcaggaaaagtgttggaccggtgggctatcatgtcacgagaggaagaaatcataactctgcagcaatttctgaggtttggagaaacaaaatcaatcgttgaattgatggctatacaggagaaagagggccaggccgttgctgtcccatcgtcaaaaacggactctgatatcaggacattcattgagtcaaataataggacccggtcaccttcccttctggctcatctggagaactcaaatccatcttcaatccatcattttgaaaatattccaaactccctggcctttttgctaccctttcaatacatcaatcctgtgtccgcgcctctgctgggattaccacctaacggacttctcttagaacagcctggattacggctgcgggagccctctctgtctactcagaatgagtataacgagtccagcgaaagcgaggtttctcctaccccctacaaaaatgatcagactcctaacaggaatgcgctgacgtcaatcaccaatgtggagcccaaaaccgaacctgcgtgcgtgagccccatacagaactctgctccggttagtgatttaaccaaaaccgaacacccaaaatcctcttttagaattcaccggatgcgtaggatgggcagcgcttccagaaaaggtcgagttttttgcaacgcctgtggcaaaaccttttacgacaagggcaccttaaagatccattataacgctgttcacctcaaaatcaaacacagatgtaccatcgaaggctgtaatatggtcttctcgtcactgcgatcaaggaaccggcatagcgcgaatcctaatccccggttgcatatgcccatgcttaggaataaccgggataaggaccttataagagccacctcaggcgccgccacccccgttatcgcgagcaccaagtctaacctggctctcacgagcccgggaagaccccccatggggttcacaactccccctctcgatcctgtccttcagaatccacttccttctcagctggtgtttagcgggctgaagactgtgcagccagtacctcccttttaccgttccctgctgaccccgggcgaaatggtcagtccccctactagcctgcccaccagtcctatcattcccacaagtggtaccattgagcagcatccacccccacctagtgaacctgtcgttcctgccgtaatgatggctacccatgagccttccgcggatctggcacctaaaaaaaaacctcgcaaatcttccatgcccgtcaaaatcgaaaaggagatcatcgatacagcagacgagttcgacgacgaggacgacgatccgaatgacggcggggccgtcgtgaatgacatgtcacacgacaatcactgtcattctcaggaggagatgtctccgggcatgtccgttaaggacttctccaagcataatagaacgcgatgcatttcacgtaccgagattcggagagctgattctatgacctcggaggaccaggaacctgaacgcgattacgagaatgagtcggagtcatccgaaccaaaactgggagaagaaagcatggagggtgacgagcacatacactcagaggtgtctgagaaggtgttaatgaatagcgaacgacccgatgagaatcattcagaaccttcccaccaggacgtaattaaggtgaaggaggagttcacagatcccacgtatgacatgttctacatgagccaatacggtctgtacaatggaggaggcgcaagcatggcagcactccatgaaagtttcacaagcagtcttaactacggaagtcctcaaaaattctcccccgaaggcgatctctgctctagtcccgacccaaaaatttgttacgtttgtaaaaagagttttaagagcagctatagcgtgaagctgcattatcgaaatgtccacctgaaggagatgcacgtgtgcactgtggccggctgcaacgcggcgttccccagcaggaggtctcgggatcggtactgggagaagtccaacgaacagaacggcctgctggtgtcgtggggtgaaactctgagctctcttaaatag

SEQ ID NO: 180239 - DNA, 2712 bp, synthetic construct
  misc_feature 1..2712: note = Description of Artificial Sequence: Synthetic coding sequence
  source 1..2712: mol_type = other DNA
atggcccacctgggccccaccccccccccccacagcctgaactacaagtccgaagatcgcctgtccgaacaagattggccagcttattttaaggtaccatgttgtggcgttgataccagtcagatcgagtctgaggaagccgaagttgacgttagagaacgagagacccaacgcgatcgcgagccaaagcgtgccagggacctgaccctgagggattcatgtaccgacaactctatgcaatttggcacaaggaccaccacagccgaacccggattcatggggacctggcagaacgccgataccaacttgctattccggatgtctcagcaggccatacgttgtaccctcgtgaattgcacttgtgaatgcttccagccaggcaaaataaatctccgcacatgtgatcaatgcaaacacggctgggtggcacacgctttggataaactgtcaacccagcacctgtatcacccaacacaagtagaaattgtacagtctaacgttgtcttcgatataagctccctcatgctctatggaacccaggcagtgcctgtgcgtcttaaaatcttgctggatcgcctgttttcagtgctgaagcaggaagaagtgttacatatactgcacggcctgggctggaccttgcgtgactatgtccgtggttatattctgcaggacgcagcgggtaaagtgctggaccggtgggccatcatgagcagggaagaggaaatcattactctgcagcagtttctgaggtttggcgaaaccaagtctatagtggagctgatggctatccaggaaaaggaagggcaggctgtggcagtccctagctctaagactgattcagatatcaggaccttcattgaaagcaacaaccgtacgcggtctcctagcctgttggcgcatctggaaaattctaatccatcctccatccaccactttgagaatatcccaaactcactggcctttctgctccccttccagtacattaacccggtatccgccccactgctgggtctcccgcctaacggtctgttacttgagcagcccggtctcaggctgcgagaacctagtctgtcaactcagaatgaatacaacgaatcttctgaaagtgaagtcagcccgaccccttataaaaacgatcagacccccaataggaatgcacttaccagtatcaccaatgtggaacccaaaactgaacccgcctgtgtctctcccattcagaactctgcaccagtcagtgatcttacaaaaactgagcatcccaaatcctcttttagaattcatcggatgaggagaatgggttctgcctcaaggaagggacgcgtattctgtaatgcttgtgggaagacgttttatgataaagggacacttaagatccactacaacgccgtgcacctgaaaatcaagcacagatgcacaattgaaggatgcaatatggttttctctagcctcaggagcagaaaccgccactccgcgaatccaaaccccagattgcatatgccaatgctgaggaataatcgggataaggacctgattcgggcaacatccggcgcagcaactcccgtgatagcctcaaccaagtccaatctggccttaacaagtcctgggcgcccgcccatgggcttcactacccctcctcttgaccccgtactccagaaccctctgccctcccagctggttttctcagggctgaaaaccgtgcagccggtaccgcccttttaccgttctctgctgactcctggcgagatggtgagtccgccaacaagcctcccgacatctccgataatacctacctcgggcacaatagagcagcaccctccccccccaagcgaacccgtcgtgcccgccgtgatgatggcaacacacgagccttccgccgatcttgctcccaagaagaaacctcgaaagtcttcaatgcctgtgaagatcgagaaggagattattgacacagctgacgaattcgatgatgaggacgacgatccaaatgacggaggggcggtggttaacgacatgagtcacgacaaccactgccatagccaagaggagatgtctcccggaatgtctgtgaaagatttttctaaacacaatcggacaagatgtatctccaggacggagattagacgcgctgacagcatgacaagcgaggatcaagaacctgagcgggattacgagaatgagagcgagtcatccgagcccaagcttggagaagagagcatggagggggacgagcacattcactctgaagtgtccgagaaagtcttaatgaactcagaacgccccgacgaaaatcacagtgagccgtcacatcaagatgtcatcaaggtgaaggaagagttcacagaccctacttacgacatgttctacatgtcccagtacggcctgtacaacggcggcggggcaagtatggccgcactgcatgaaagcttcaccagctccctgaattatggatccccacagaaatttagccctgaaggtgacctctgcagcagccctgacccaaagatttgttacgtttgcaagaaatccttcaaatcttcttatagtgtaaaattacactaccgcaacgtgcacttaaaggaaatgcatgtttgcactgtggctggatgcaacgctgcgtttccatcgcgccggagtcgggaccgaaataggaacctacgaatggagaggaccattgggcccggtcaccgtgactcattacaccttaggtctacatag

SEQ ID NO: 180240 - DNA, 1950 bp, synthetic construct
  misc_feature 1..1950: note = Description of Artificial Sequence: Synthetic coding sequence
  source 1..1950: mol_type = other DNA
atgctgtacggcacccaggccgtgcccgtgcggctgaagatcctgctggatcgtctgttctctgtgctgaaacaggaggaggttctgcacatcctgcatggattgggttggacattaagggattatgtgcgcggttacattttacaagatgcggctggaaaggtgctagacaggtgggccattatgtcgagggaagaggaaattattacactgcaacagttcttgcgatttggcgaaacaaaaagtattgttgagctcatggcaatacaggagaaagaaggccaggcagtggccgttccgagttctaagacagactcggatatccgcacgttcattgaatcaaataaccggacacggagtccctcgctcctcgcccacttagagaattctaacccctcatctatccaccacttcgagaacattcccaactcgctggctttcctcttgccatttcagtatatcaatcccgtcagtgcacctctccttgggctgccacccaacgggctcttgcttgagcagccgggactgcgattaagagagcccagtctgagcacacagaatgaatacaatgagagctccgagtccgaagtgagccccactccctacaagaatgatcagaccccaaacagaaacgccttgacaagcatcaccaacgtagagcccaaaacagagcccgcctgtgtgtcaccgatccagaacagtgcgcccgtcagtgacctgacaaagaccgaacatcctaaaagttcctttcgcatccataggatgagacgtatgggatccgcaagtaggaaggggagagtattctgtaatgcttgcggaaagactttctatgacaagggtacccttaaaatacactacaatgctgttcatctcaagattaagcatcgctgcaccatcgagggctgtaatatggttttttcatctctgcgaagtagaaaccgccatagtgccaaccctaacccccgcctccacatgcctatgttgcgtaataaccgcgacaaagacctgatcagagccacatctggagcagctaccccagtcatcgcctctaccaaatcaaacctggccctgacatcgccgggtcgtcctcccatggggttcaccactcctcccttggatccggtgctacagaaccccctgccatcacagctcgtgttttccggccttaagactgtgcagccagtgccaccgttctaccggtcactgctcactcctggagagatggtaagccctcccacgtctctccctacatccccaatcatccctactagtggcaccattgagcagcacccccccccgccttccgaacctgtggtgcccgcggtcatgatggccacgcatgagccctcagcagacctggcgccgaagaaaaaacccagaaagagcagtatgccagtaaagatcgaaaaggagattatcgatactgccgatgagttcgacgatgaagacgatgatcctaatgacggaggagccgttgttaacgatatgagtcacgacaatcattgccattctcaggaggaaatgtccccgggaatgtctgtcaaagatttttccaagcataacagaacccgttgcatctcccggacggagatccgccgcgctgacagcatgacaagtgaagatcaagagcctgagcgtgactacgaaaatgagtcggagtcttctgagcctaaactgggggaggagtccatggaaggtgacgaacatattcattcagaggtgtcagagaaggtgcttatgaactctgagagacctgacgaaaaccactctgagccttctcatcaggatgtgatcaaggttaaggaggaatttaccgaccctacttatgatatgttttacatgtcacagtacggtctctacaatggcggcggcgcgtctatggctgccctccacgaaagtttcacctcctctttgaactacgggtccccacaggtactgcctcggcggtag

SEQ ID NO: 180241 - DNA, 3015 bp, synthetic construct
  misc_feature 1..3015: note = Description of Artificial Sequence: Synthetic coding sequence
  source 1..3015: mol_type = other DNA
atgaccgacgacgtgaaggagcccagccggttcagcctgctgctggccatacgttgcactctggtgaactgcacatgtgagtgtttccaaccaggcaagattaatctgaggacatgcgaccaatgtaagcacggctgggttgctcacgctttggataagctcagcacccaacacctgtaccatcctacacaagttgagatcgtgcagtctaacgtggtctttgacatcagctctctgatgctttacggcacccaggccgttccggtgcgactcaaaatacttcttgatcgactgttcagcgttttgaaacaggaagaagtactccatatcctgcatggcctggggtggacccttagagactatgtccgcggctatattcttcaggatgccgctggaaaagtgctggaccggtgggcaattatgtcaagggaagaggagataatcactctgcagcagttcctccgattcggagagacaaagtctattgtggaactgatggcaatacaggagaaggagggtcaggccgtggctgttccttctagcaagaccgacagtgatatccgcaccttcatcgagtcaaacaacagaactaggtctccatcactgttggctcatctcgagaactccaatccaagctccattcatcactttgagaatattcccaacagtctggctttcctgctccctttccagtatattaatcccgtaagcgctcccctccttggtctgccgcccaacggcctgctgctagagcagcccggcttacgactcagggagccttccctgtccactcagaacgagtacaacgagtcttctgagagtgaagtgagccctactccctataaaaatgaccagacaccaaatcggaatgcgttgaccagcatcaccaacgtggagccaaaaactgagcccgcttgcgtgtcacctatccaaaactctgcacccgtatcagacttgacgaagacagagcatcccaaaagttcgtttaggattcatcgcatgcgaagaatgggatccgcgtcgcggaaaggccgggtcttttgcaacgcatgtggtaagactttttacgataagggcacattgaagatacactacaacgcagttcacttgaaaattaaacatcgttgcaccattgagggttgcaatatggtgttctcgtcactgcgatctcgcaaccggcactcagccaaccctaaccccaggctgcatatgcccatgctccggaataatcgggacaaagatctgatcagggccactagtggcgccgcaacgccagtgattgcttctacaaagagtaatctagccttgacttcaccaggaaggccgcctatgggtttcactactcctcccctggatccagtccttcagaacccactcccctcacaactggtcttcagcggattgaaaacggtccagccagtaccacccttttaccgctcactgcttaccccgggcgagatggtgtcacctcccaccagcctcccaacgtcacccattataccgacaagcggcactatagaacagcatccaccgccaccaagcgagcctgtcgtccccgccgtcatgatggctactcatgagccctccgccgacctggcccctaagaagaagccacgaaaatctagtatgccggtgaaaatcgagaaagaaatcatcgatactgcagacgaattcgacgatgaagacgatgaccccaacgacggcggggccgtggtaaacgacatgagtcacgataaccactgccactctcaggaagaaatgagccctggtatgagtgtgaaggatttttccaagcacaataggacacggtgcatctctaggacagaaataaggcgggcagacagtatgacttcagaagatcaagagcccgaacgcgactatgaaaacgagtcagaaagctccgagcccaagctaggcgaggaatccatggaaggggatgagcatattcattcagaagtgagtgagaaggtacttatgaacagcgagagacctgatgaaaaccactcagagccctctcatcaggacgtgatcaaggtcaaggaggagtttacagatcccacgtatgacatgttttacatgagtcagtatggcctatacaacgggggaggggccagtatggcagctctgcacgaaagcttcacctctagccttaattacggctcccctcagaaattttcccccgagggggatctctgtagttcccctgatcctaaaatctgctacgtgtgcaaaaaatcattcaagtcatcatatagcgtgaaattgcattacagaaacgtgcacctcaaggaaatgcacgtttgcacagtcgccggttgcaatgccgcttttccatcccgtcgatctagggatcgtcactccgctaacattaacctgcataggaaacttctgactaaggaactggatgatatgggcctggattcgagccagccttccctcagtaaggaccttcgcgacgaattcctagttaagatctatggagctcagcaccccatgggtctggatgtcagagaagacgcttcttcccccgccgggacggaggacagtcacttgaatgggtatggaaggggaatggccgaggactacatggtccttgatctaagcacgacgtcatctttgcagagtagctcttcaattcattcctctcgagagtcagacgctggcagtgacgagggaattcttctcgacgacatcgatggagcatcagatagcggcgagagcgcacacaaggcagaggcgcccgcccttcccggaagcctgggcgccgaggtcagtggctccctgatgttttcaagcctgagcggcagcaacggcggcattatgtgtaatatatgtcacaagatgtatagtaataagggaacccttagggtacattataaaacagtacacctgcgagaaatgcataagtgtaaagttcctggctgcaatatgatgtttagctcagtgagaagccgcaaccgacattcgcaaaatcctaaccttcataaaaatatcccattcacctccgtcgactag

SEQ ID NO: 180242 - DNA, 11781 bp, synthetic construct
  misc_feature 1..11781: note = Description of Artificial Sequence: Synthetic coding sequence
  source 1..11781: mol_type = other DNA
atgggcaacgaggtgagcctggagggcggcgccggcgacggccccctacccccaggtggagccggcccagggcccgggcccggaccaggacccggagcgggtaagcccccctcagctcccgccggaggcggacagctaccagccgccggggccgctcggtcgacagctgtgcctccagtgcccggccccggcccagggccaggaccaggacccggtcctggatcaacgagccgccggctggatcccaaagagccattggggaatcagagagccgcttctcccacacctaagcaggcttccgccaccactccgggacacgagagccctagagaaacccgggcccagggacctgctggccaggaggctgacgggccccgaaggacactgcaagttgactctcgtacacagcgatctgggcggtctcccagcgttagccctgatcgcggttccacccctacttctccttactccgtgcctcagatagctcccttgccctcttccaccctctgtccgatttgtaagacctcagatctcacatcgaccccaagtcagcctaatttcaacacctgtacgcagtgtcataacaaagtctgtaaccaatgcggtttcaaccccaatccgcacctgacacaggtcaaggagtggctgtgcttaaattgtcagatgcagcgcgcgctgggcatggatatgaccacagcaccccggtccaagtctcagcaacaactgcattcccctgcccttagtcccgcgcactcaccggctaagcaacctctgggaaaacccgatcaggagcgaagtagaggcccaggggggccccaacctggcagtcgtcaggccgaaacagctcgtgcgacctcagttcccggtccggctcaagcggcagccccacctgaggtcgggcgggtttctccacagcccccacagcccacaaaaccatctacagcagagcccaggcctcctgcgggagaagccccagccaaatccgccacagctgtgcccgccggtctgggagctactgagcaaacgcaggagggcctgacaggcaaactgtttggacttggcgcgtcattactcacgcaggcttctactctcatgtccgtccagcctgaggccgacactcagggtcaaccggctccctcgaagggaaccccgaaaatcgtgtttaacgatgcatcgaaggaagccggccccaaacctctgggctcaggtcctggtccaggtcccgctcctggcgcaaaaactgagccaggagcgcgcatgggtcccgggagcggccctggtgctctcccaaagacgggtggcaccactagtcctaagcatggccgggcagagcatcaggccgccagcaaggccgccgccaagcccaagaccatgcctaaggaacgcgcaatttgccctctgtgccaggctgagttgaatgttggctccaaaagtcccgcgaattacaatacctgtactacatgtcgcctgcaagtatgtaatctgtgtggtttcaatcccaccccgcatctggtcgaaaagactgagtggctgtgcctaaactgtcagactaagcggttgctcgaaggtagcctcggcgagcccacacctttgccgccacccacctcacagcaaccccctgtcggcgcaccacatcgcgcttccggtacatcaccacttaaacagaagggtccacaagggttggggcagccaagtgggcccctacccgcaaaagctagtccactgtctaccaaagcctctcctttacccagtaaagcttcaccacaggctaagccccttcgggccagcgagcctagcaaaaccccttcctctgtgcaggaaaagaagacacgggtaccgaccaaagctgagccaatgcctaaaccccctccggaaactactcccacgcctgctacacccaaggtaaagagtggggttagaagggccgagcctgcgactccagtagtcaaagctgtccctgaggctcctaaggggggagaagctgaagaccttgtcgggaaaccctactcccaagatgcaagcagaagccctcagagcctgtcagacactgggtactcttctgatggaatttcatcatcccagtcggagataacgggagtggtgcagcaagaggtcgagcagctggatagcgcaggggtgactggacctcaccctccatccccatctgagattcataaggtcggcagttcaatgagaccacttctgcaagcccagggcctcgcaccctctgaacggtcgaaacctctatcttctggaacgggagaagagcagaaacagagacctcattcactgagcatcactccagaggcttttgattctgatgaagagctagaggatatcctggaagaagacgaagactctgccgagtggcgccgccggagggaacaacaggataccgctgaatcaagcgatgactttggcagccagcttagacacgactatgtggaagacagttcggaaggaggcctctcacctcttcccccgcagccacctgcccgagctgccgaattaacagacgaggactttatgcgccgccaaatcttagaaatgtctgcagaggaggacaatctagaagaagatgatactgccacctccggaagagggctcgccaagcatggcacacagaaaggaggccctagacctagaccggaacctagccaagaacccgcagctctgcccaagcgtaggctgcctcataacgcaactacgggctatgaggaactgctcccagaggggggaagtgcagaggctacagacggcagtggcacattacagggcggcctgcgaagattcaagactattgagctcaacagtaccggcagttacggacatgagttggatcttggccaagggcctgatccctccctggaccgggagccggaactggaaatggaatccctgacgggctcccccgaagatcggtccagaggtgagcactcttctacactccctgccagtaccccttcttacacaagtggaacgtctccaacctccttgtcctccctggaagaggacagcgattcgtcccctagccgaaggcagcgcttggaggaggccaagcagcagcgcaaggcacgccataggtcacatggacctctgttgcctaccatcgaggattcttcggaggaagaagaactgagagaggaagaagagctgctgcgtgaacaggagaagatgagggaagtcgagcagcagaggatccgatctacagctaggaaaactaggcgtgacaaggaggagttacgtgcgcagcggaggagggagcgatctaagactccccctagcaacctcagtccgatagaggatgcctcgcccactgaggaacttcgtcaggcagcagagatggaggaactccacagatcgagctgtagtgagtacagtccatctccctctctcgacagtgaggcggaggcattagacggaggtccatcccgactgtacaagtcagggtcagagtacaaccttccaacatttatgagcctgtacagtcctacagaaacaccatccgggagttccaccaccccatcctccggcagacctttgaaatctgctgaagaagcttacgaggaaatgatgcgtaaggccgaactgctgcagcgtcaacaggggcaggccgccggagccagaggacctcacggaggacctagtcagccgacaggacctcgggggctgggtagttttgagtaccaggacacaacagatcgggagtacggacaggcggcccagcctgccgcggagggcacccctgccagcctgggggcagctgtgtatgaggaaatcttacagacctcacagagtatcgtccgcatgcggcaggcctcctcacgggaccttgctttcgcagaagacaaaaaaaaagagaaacaattcctgaacgctgaaagcgcctatatggacccaatgaaacaaaacggaggccccctgacccccgggacaagtcctacacagctggccgcacctgtctctttttctacaccaaccagttctgattccagtggtgggcgcgtcatccccgacgttcgtgtcacccaacacttcgcaaaagagacccaagatcctcttaaactgcatagttctccggccagtccatcctccgccagcaaagaaataggaatgccattttctcagggaccaggcacacctgctacaacagcagtggcaccatgccccgccggcctgccccgagggtatatgactccagccagccctgcagggagtgagcggtcaccatccccatcttccactgctcacagctacggacattccccgacaactgcgaactacgggtctcaaactgaagacctgcctcaggcacccagcggcctggcagccgccggtcgcgctgctcgtgaaaaacctcttagcgcctccgacggcgagggaggcacccctcagccaagtagggcctattcttactttgcctctagcagtccacccctgagcccctcctcaccctccgaaagtcctacgttttcgcccggcaaaatgggacctagagcaacagctgagttttccacacagaccccgtcgccagcccccgcttccgacatgcctcgctcccccggagctcccacaccaagccccatggttgctcagggtacgcagactccccatagacccagcaccccaagactggtatggcaggaatctagccaggaggcaccctttatggttatcactctggcctccgatgcctcctcacagaccagaatggtgcatgctagcgccagtacctcccccttatgcagtccgaccgagacgcagcctaccacacacggttactcccagacgacaccaccctccgtgtcccaactcccacctgaacccccgggcccccctggattcccaagagtcccttctgcgggcgccgacggccccctggcgttgtacggttggggtgccctcccggccgaaaatatctctctctgcaggataagctccgtacctgggaccagtcgggtcgagcctggaccccggacccctggaacagctgtggttgacctcagaacagccgtcaaaccgaccccaatcatcctgaccgaccagggcatggacttaacgtcgcttgccgttgaggccaggaagtacggactggcactcgatcctatccccggccggcaaagtacggccgtgcagccgctggtcattaacctaaatgcccaggaacacacctttctcgcgacagctaccacagtctccatcacaatggcttctagtgtgttcatggcccagcagaaacagccagtggtgtacggcgacccctaccaatccagactggactttggccagggcggcggaagccccgtgtgtctcgcccaggttaaacaggtggaacaggccgtacagacagcaccttataggagtgggccccgtggccgacccagagaggccaaatttgcgcggtacaacttgcccaaccaggtggctcccttagctagacgagatgttttgattactcagatggggaccgcacagagtatcggcttgaaacctgggcctgtgccagagccgggcgcggaacctcatcgggcgacgcctgcagagcttcgaagccatgcgctgcctggagcccgtaaaccgcatacagttgtcgtccagatgggggagggaactgccggtacagttacaaccctgttgccggaggaacccgccggggccttagatctgaccggtatgcggccggagagtcaactagcctgctgcgacatggtgtataaattaccctttggctcaagctgtacgggtacgttccatcctgccccttcagtgcctgagaagtcaatggcagatgctgcgcctcctggccagagcagcagccccttttatggcccacgcgacccagaacccccagagccacctacttatagagcccagggggtcgtgggcccggggccccacgaggagcagcgaccgtatccccagggcctgcccggacgcctgtacagcagcatgtcggataccaatctggccgaggcagggttgaattatcatgctcaacgtatcggacagctctttcaaggccctggccgggattctgcgatggatctcagtagcctaaagcatagctactccctgggctttgcagacggtaggtacctgggccagggcttacagtacggctctgtgactgatctgcgtcacccaactgatctcctggctcaccccctgccaatgcggaggtattcaagtgtctccaacatatattccgatcaccgttacgggccacggggcgacgcagttgggttccaggaggcaagcttagcacagtacagcgctacaacggcccgagaaatctcgcgcatgtgcgccgccctgaattcaatggaccagtatgggggacgacatgggtcaggcggcggaggcccagatcttgttcagtaccagccccaacacggacctggcctctctgcaccacagagcctggttccgctcagacctggcctccttggcaaccctacgttcccagaggggcatcccagccctggcaacttggctcaatacggaccagcagccgggcagggtaccgccgtccgccagctgctgccttctactgctaccgtgagggcagcggatggtatgatatatagtaccattaatacaccgatagctgccaccttgccaataactacacagcctgcctcagtcctgcgccctatggtccggggtgggatgtatcgaccctacgcctccggcggaataaccgccgtgcctctcacctccctcacccgcgtacctatgattgcccctagggttccattgggtcccactgggctgtaccgttatcctgctccatctagattccctattgcgtccagcgtccctcctgctgagggaccggtgtacctcggaaagcccgcagctgcgaaggcaccaggagcgggcggcccctcaagacccgaaatgcccgtgggcgcagcccgtgaggagcccctgcccacaaccacccccgccgccatcaaggaggctgccggcgctcctgcccccgctcctttggctggtcagaaaccgcctgccgacgctgctcccggtggggggtcaggcgccctaagccggccgggtttcgaaaaggaagaagcttctcaggaagaacgacaacggaaacagcaggagcagctgcttcagttagagcgggaacgggtcgagctggaaaaacttcggcagctgagactgcaggaggaactggagcgagaacgggtggagctgcagaggcatcgggaggaagaacaactgctggtccaaagagagctgcaggagctgcagactattaagcaccatgtgctgcagcagcaacaggaggagcggcaggcacagtttgcactccaaagagagcagctggctcagcaacggctccagctggagcagatccaacaacttcagcagcagcttcagcagcagctggaagagcagaagcagagacagaaagcgcctttcccagcagcttgtgaagcacctggccggggcccccctctggctgccgctgaattggctcagaacggccaatactggccccccctgacgcacgccgcatttatcgcgatggcaggcccagaggggttggggcagcctagagagccagtgctgcacaggggcctgccaagctccgcgtcagatatgagcctgcagaccgaggaacagtgggaagcaagtcgatcagggattaagaagcggcactcaatgccccgactgagggatgcttgcgagttggagtctggcaccgagccatgcgtcgtgcgccggattgccgatagctcagtgcagacagatgatgaggacggcgaatccaggtatctgctttcgagaaggcgacgagccagaagatccgctgattgcagcgtgcagactgacgatgaggattctgcagagtgggaacagcccgttcgccgacggaggagtagactaccccggcatagcgacagtggtagcgatagtaaacacgatgccactgccagctcaagcagcgccgccgccactgtgagggcaatgtccagcgtggggattcagactataagcgattgcagcgtgcaaactgagccagatcagcttccacgcgttagtccagccatacatattactgcagccaccgacccgaaagtagaaatcgtacgctatatcagcgcacccgaaaagacaggccgaggagagtccctcgcttgccagacagaacccgatggtcaggcgcaaggagtggcagggccccagttggtgggtcccacagccatcagcccatatctccctggaatccaaatagtgactcccggcccactgggacgcttcgaaaagaaaaaaccagaccctctagagataggataccaggctcatctgccacccgaatctctgtcccagctcgtttcccggcagcccccaaaatcacctcaggtattgtatagccctgtcagtcccttaagtccgcacagactgctcgataccagcttcgcctcgagcgagaggttaaataaagctcacgtttccccacagaaacacttcacggccgattccgctctgagacagcaaacactacctagacccatgaagacactccagaggtcactgtctgatcccaagcctttgagtccaaccgcagaggagtccgccaaggaaagatttagcttgtaccagcaccaaggcggactggggtcccaggtgagtgctctccctcctaactctttggtccgcaaagtgaaacggacattgccatctcctccccctgaggaggcccacctgcctctggcaggccaggcttctccacagctttacgcagcctccctactccaaaggggcctgacaggtcccaccaccgtgccagctacgaaggcttctctcctgcgtgagttggacagagatctaagactggtagagcatgaatctaccaaacttagaaaaaaacaggccgaacttgatgaagaagagaaagaaatcgacgcaaaactgaagtacctggagcttggtataacccagaggaaggagtccctggctaaagaccgcggaggaagggattacccaccactgagaggccttggggagcaccgagactatctgagcgattcagagttaaaccaattaagactgcaagggtgcacaacaccagctggtcagtttgtggatttccctgcaacggccgcggcgccagcgacaccgtcagggccaacagcctttcaacagcctcgcttccaacccccagccccacagtacagtgctggtagcggcgggccaacccagaatggtttccctgctcaccaagcaccaacttaccctgggcccagcacataccccgcacccgctttccctcctggtgctagttacccggcagaaccaggcctgcccaatcagcaagcctttcgcccaacgggccactatgccggtcagacgcctatgcccacgacacaaagcacgttgttccccgtgcctgctgattctagggcaccactacagaaaccacggcagacttctctcgccgatctagagcagaaagtgccaactaactacgaggttattgcctcacccgttgtgcccatgtcctctgccccctctgagactagctattcagggcctgcagtgtcttctggttacgagcaggggaaggtgccagaagtgcctcgagctggtgatcgcggatctgtcagtcaaagtcccgcaccgacctaccccagcgactctcactatacttcattagaacaaaatgtcccccgcaattatgttatgatcgacgacattagcgaactcacgaaagatagcacctctaccgccccggacagtcaacggctggaacctcttgggcctgggagctccgggagacctggaaaggaaccgggggagccgggagtcctcgacggccctacactgccatgttgttatgcccgcggtgaggaggagagtgaagaggacagctatgatcctaggggcaagggaggccatcttagatcgatggagtcaaatggtcgaccagcctccacccactactatggcgattctgattacagacatggcgctagagtagaaaaatatggtcctgggccgatggggccaaaacatccctctaagagcttggcccctgccgccatatcatccaaacgctccaaacaccggaaacagggcatggagcagaaaatcagcaagttctcccccattgaggaggccaaagatgtggaatcagatctagcatcataccccccccccgcagtgtcttcctctctagtcagccgcggccgcaagttccaggatgagatcacgtatgggcttaaaaaaaacgtttacgaacagcagaagtattacgggatgagttctagagacgcagtcgaagacgacagaatttacggagggagctctaggtcccgggcacctagtgcctactcaggagaaaagctgtcgagtcatgacttctcaggctgggggaagggctacgagcgcgagcgagaggctgtggagaggttgcagaaagctggccccaagccaagctcactcagcatggctcacagcagagtaagacctcccatgcggtcacaggcttcagaggaagaaagtccagtctctcccctggggcgcccacgcccagcgggcggtcctcttcctcctggtggcgacacctgtccacagttttgcagttctcatagtatgcctgacgtgcaggagcacgtgaaggacggcccgagggctcacgcatacaaacgggaagaagggtatattctggacgacagccactgcgttgtctccgattctgaggcttaccacttaggtcaggaagaaaccgattggtttgacaaaccccgagatgctagatctgacagatttcgacatcacgggggacacgccgtaagttctagttcccagaagagaggtcccgcccgccattcttatcacgactacgacgaaccacccgaagagggcctatggccccatgacgagggcgggccaggccgacatgccagtgcaaaagaacacagacacggcgaccacggtcgtcactctggacgtcacactggagaggaaccaggccgcagagctgccaagccacacgcacgcgatctcgggcgtcacgaggctagacctcattcccagccctccagtgctccagctatgcccaagaaaggccaacccggctatccctcctcggctgaatatagtcagccctcacgtgcctctagcgcttaccaccatgcatctgactctaagaaaggctcccgccaagcacacagcggaccggcagctttgcaatccaaagcggaacctcaggcccaacctcagctgcaagggagacaggcagccccaggaccacagcaaagccagagcccctctagcaggcaaatcccttcgggcgctgcttcacgtcagccgcagactcagcagcagcagcaagggttaggtcttcagccgccccagcaggctctgacgcaggctcgcctgcagcagcagtcccaacctactactaggggatcagctcccgctgcgtcacagccagccggtaagccccaacccggaccttcgaccgcgaccggaccccagcccgccgggccacctagggccgagcagaccaacggctcaaagggaaccgccaaggcccctcagcagggccgcgcacctcaggcccagccagcgccggggccaggtcctgccggagtgaaggcgggggcacggccaggcgggacacccggtgccccagccgggcaacccggtgccgacggcgaaagtgtgtttagtaagattctgcctggcggcgctgccgagcaggccggaaagctgacagaagccgtttccgccttcgggaagaaattttcaagtttttggtag

SEQ ID NO: 180243 - DNA, 702 bp, synthetic construct
  misc_feature 1..702: note = Description of Artificial Sequence: Synthetic coding sequence
  source 1..702: mol_type = other DNA
atggagcccaccgcccccagcctgaccgaggaggacctgaccgaggtgaaaaaagacgcgctcgaaaacctgagagtgtacttgtgcgagaagattatcgcagaacgacatttcgaccacttgcgggcgaagaagattctgagtcgagaggatacagaggagattagctgccgcacttcttccagaaagcgtgcggggaaactcctcgactacctccaggagaatcctaagggtctcgacactttagtcgagagtatccgccgtgagaagactcaaaacttcctcattcagaaaattactgatgaagtgctcaagcttcggaatatcaagctggaacatttgaaaggcctgaagtgctcctcatgtgagccattccccgatggcgctaccaataacctatcccgaagcaactcagatgagtctaacttttctgagaagctgcgcgccagcactgttatgtatcatcccgagggagaatcctccacaactccattttttagtacgaactcgagcctgaacctccctgtcctggaagttggccgtacagaaaataccatttttagttctacaaccctgcccaggcccggagacccaggggcaccccccctgcctcctgatctgcaactcgaggaagagggcacctgtgcaaattcatccgagatgttccttcccttgaggagccggaccgtatccaggcagtag

SEQ ID NO: 180244 - DNA, 702 bp, synthetic construct
  misc_feature 1..702: note = Description of Artificial Sequence: Synthetic coding sequence
  source 1..702: mol_type = other DNA
atggagcccaccgcccccagcctgaccgaggaggacctgaccgaggtgaaaaaggatgctttggaaaacctacgggtttacctctgcgagaaaattatcgctgaacgtcattttgatcatttacgagcaaaaaagattctgagcagggaggacacggaagagatctcttgtcgaacctcctctcgaaaaagagccggcaagctgctggattatctccaggagaatcctaaaggtcttgataccctggtcgaaagtattcgtagagaaaagacccagaacttcctaatacaaaaaattacagacgaggtgctgaaactgcggaatatcaagctggaacatctgaagggtctgaagtgcagcagctgcgagccctttccggatggagctactaacaacctgtcaagaagtaactccgacgagagcaatttcagcgagaagttgagagcctcaaccgtgatgtaccatcccgagggtgaatcaagtaccactccttttttctctaccaatagcagtctaaacctacctgtgctcgaggtaggtcggaccgaaaatacaatcttttcttctaccactctgccgcggccaggggaccccggggccccccccctcccccccgacctgcagcttgaggaagagggaacctgtgctaatagctcggaaatgtttctgcccttacgtagtagaactgtgagccgccagtag

SEQ ID NO: 180245 - DNA, 471 bp, synthetic construct
  misc_feature 1..471: note = Description of Artificial Sequence: Synthetic coding sequence
  source 1..471: mol_type = other DNA
atggagcccaccgcccccagcctgaccgaggaggacctgaccgaggtgaaaaaggatgccctcgagaatttgcgtgtgtacctttgcgagaaaatcatagcagaaaggcattttgaccatctgcgagcgaaaaagattctctccagagaggatacggaggaaattagttgtcgtacctcttcaagaaagagggcaggcaagttgctggactatctgcaagagaaccctaagggtctggatactctcgtagaaagcattcgacgggagaagactcaaaacttcctaatccagaaaataaccgatgaagttctcaaactccgtaacatcaagcttgagcacttaaaagatggtgcgaccaacaacctgtcccgttcaaactccgatgagtccaacttctccgaaaaactccgcgcgtctaccgtcatgtaccacccggagggagagtcatcaacgacaccgtttttttactag

SEQ ID NO: 180246 - DNA, 2508 bp, synthetic construct
  misc_feature 1..2508: note = Description of Artificial Sequence: Synthetic coding sequence
  source 1..2508: mol_type = other DNA
atgagccggcggaagcagggcaagccccagcacctgagcaagcgggaattctcacccgaaccccttgaggccatcctaacagatgacgagccagatcacgggccactgggagctcctgagggcgatcacgaccttctcacatgtggccagtgccaaatgaattttccattaggagacatactgatttttatagagcacaagcgtaagcagtgcaatgggtctttatgcctcgaaaaagccgtggataagccaccttcgcccagtcctatcgagatgaagaaggctagtaatcccgttgaggtcggaattcaggtgactcccgaggacgacgattgcctgagcacgagcagccgcggtatttgcccgaagcaggagcacatagccgacaaactcttgcactggagaggcctctcatctcctcggtcagcccacggagctctaattcctacccccggaatgtccgccgagtatgccccacagggcatttgtaaggatgaaccaagttcctacacttgcacaacctgtaagcaaccgttcacatctgcttggttcctccttcagcatgcccagaatacacatggcctgaggatttatcttgagagtgaacacggatctcccctgaccccccgggtcggtatcccttcagggctgggggctgagtgcccttctcagcccccactgcacggtatccacatcgccgataataaccctttcaatctgctgaggattcctggctctgtctccagagaggctagcggtctagcagaaggacgattccctcccaccccccctcttttctctcctccaccgcgtcaccatttggacccgcacaggattgagcggctcggggccgaggaaatggccctggcgacccaccacccatctgccttcgatcgagtgctgcggctcaatcctatggccatggagccacccgccatggatttctctcgaagactgagggaactggctggtaacaccagttcccctccactcagtcctggccgcccttctcccatgcaacggctgcttcaaccattccaacctggttcaaagccacctttcctggcaacccctcccctgccccccctgcagtctgcgcctccccctagccagcccccagtaaaatctaagtcgtgcgagttttgcggtaagacattcaagttccagtccaatcttgtggtgcacagaagaagtcacacaggagaaaagccatataagtgtaatctatgcgatcacgcgtgtactcaggcatctaagctcaagaggcacatgaaaacccatatgcacaaatccagccccatgactgtaaagtccgatgacggcctaagcactgcttctagcccagagccaggaactagcgatctggtgggatcggcatccagcgccctgaaaagtgtagtggctaaatttaaatccgagaacgatcctaacctgatcccggaaaatggcgatgaggaggaggaagaggacgacgaggaggaggaggaggaagaggaagaggaagaagaggagctgactgaaagcgaacgtgttgattacggctttggattgtccctggaggcagcaagacaccatgagaattcatctcgcggagcagtggtgggagtgggtgatgagtcaagagcccttcctgatgtgatgcaaggaatggtgctgagcagcatgcagcacttttcggaagctttccaccaggttctcggggagaaacataaacgcggtcacttggccgaggccgagggacaccgcgatacctgcgacgaggatagcgtggctggtgaatccgaccgcatcgatgacggcaccgtaaacggcagagggtgcagccctggtgaaagcgccagcggcggtttgtcaaagaagctattgctggggagcccaagtagcttgagcccattcagcaagcgtattaaactcgaaaaagagttcgaccttccacctgccgccatgcctaataccgagaacgtctactcacaatggctcgccggatatgccgcttctcggcagctgaaagaccctttcttaagttttggcgatagtaggcaaagcccttttgcctcatccagcgagcatagtagcgaaaatggcagcctacgatttagcacccccccaggagaattagatggcggcattagcggtagaagcgggacaggctcggggggatcgaccccgcatattagcggccccggacctggaaggccaagctccaaagaaggcagacgtagcgacacatgcgagtattgcggcaaggtgttcaagaattgtagtaatctcacggtgcacagaagaagtcatactggtgagcgaccctataaatgtgagctctgcaattatgcttgcgcacagtcatctaagctaaccaggcacatgaaaactcacggtcaagtgggcaaggacgtgtacaaatgtgagatttgcaaaatgcccttctccgtctatagcaccttagaaaaacacatgaagaagtggcattccgatagggtgttgaacaacgatataaaaaccgaatag

SEQ ID NO: 180247 - DNA, 2322 bp, synthetic construct
  misc_feature 1..2322: note = Description of Artificial Sequence: Synthetic coding sequence
  source 1..2322: mol_type = other DNA
atgagccggcggaagcagggcaagccccagcacctgagcaagcgggagtttagcccggagccactggaggctatcctgaccgacgacgagcccgaccatggtcccctcggagcccccgagggtgaccacgatctgctcacctgcggccaatgtcaaatgaattttcccttgggcgatatcctcatttttattgaacacaaacgaaaacagtgtaacggatccctctgtctagaaaaagcagtggacaaacctccatctccaagccccatcgagatgaagaaagcctccaaccctgtcgaagtaggtatccaggtcactcctgaggatgacgattgtttgtcgacttcttcaaggggaatctgtccaaaacaggaacatatcgccgataaattgttgcattggcgcggcctctcgagtcctcggagtgcccacggggcactcatacccacccccggaatgagtgccgaatacgcaccccagggcatctgcaaggatgagccgtcatcttatacctgtacgacctgcaaacagcccttcacatccgcctggtttttgttgcagcacgctcaaaatactcacggtctgaggatctacttggaatccgagcatgggtcaccacttacccctagagtcgggatcccatctggcttgggggccgagtgtccgagccagccgcctttgcacggtattcacattgcggataacaaccccttcaatttgctaagaataccagggagcgtgtctagggaggccagcggactggccgaaggacgtttcccccctacccctccactattctcccccccacccaggcatcacctcgatcctcaccgaatcgagcgactcggcgccgaggaaatggcacttgctacacatcatccatctgccttcgatagagtgttaaggttgaatcctatggccatggaaccccctgctatggatttctcccgtagattgagggaactggccgggaacacgagctcccctcccctgagtcctggcagaccttcccctatgcagcggttgcttcagccctttcagcccggaagcaagcccccttttctggctactcctcccctcccccctttgcaatcggcgcccccaccctcgcagccccctgtaaagtccaagagctgtgagttttgtggcaagacattcaagtttcagtccaacctggttgtgcaccggagatctcatacaggcgagaaaccttacaaatgtaacctttgcgaccacgcgtgcacgcaggcaagcaaattgaaacgtcacatgaagacccatatgcacaagagcagcccaatgacagtgaagagcgacgatggactgagcactgcgagcagccctgagcccggcacaagtgacctggtgggcagcgctagctccgcccttaagtctgttgtcgccaaattcaagagcgagaatgacccgaacttgatcccagaaaatggggatgaggaggaggaagaggacgacgaggaggaggaggaggaagaggaggaggaggaggaagagctgaccgaaagcgagagagtcgattacggcttcggactatccttggaggcagcacgccaccatgaaaactctagcagaggagccgtggtaggtgtgggagacgagtccagagcactgcccgacgtaatgcagggcatggtcctgtcaagtatgcagcacttctctgaagctttccaccaggtccttggcgagaagcacaagagagggcacctggctgaagccgaagggcatcgcgacacttgcgacgaagacagtgtcgctggggagtcagatagaatcgatgacggtactgtgaacggaagaggatgctcaccgggcgagtcagcatccggaggattgagcaaaaaactcctgctgggcagtccttcttctctctcgccttttagcaagcggatcaaactggaaaaggagttcgacctccctcccgctgccatgcccaataccgagaatgtctactctcagtggctggccggctacgcggcctctagacagcttaaagacccttttctttcattcggagattctagacagtcgccatttgcctccagttcagaacattccagcgaaaatggaagtctgcggttttctactcctccaggggagctggatggcggcattagtggacggagcggaacagggagtggtggatctactcctcacatatccggtcctggtccaggtagaccttcgagcaaggaagggagacgctcagatacgtgctcctcccatactcctatccggaggtccacccagagagctcaagatgtgtggcagttctccgacggttcgtcccgggcgctgaaattctag

SEQ ID NO: 180248 - DNA, 2406 bp, synthetic construct
  misc_feature 1..2406: note = Description of Artificial Sequence: Synthetic coding sequence
  source 1..2406: mol_type = other DNA
atgagccggcggaagcagggcaagccccagcacctgagcaagcgggaatttagcccagaaccactcgaggctattctgactgacgatgaacccgatcacggaccccttggcgctcctgagggcgaccatgatctgctaacatgcggccagtgccaaatgaactttcctctgggcgacattctcatctttatcgagcacaaaagaaagcaatgtaacggttctctgtgcttggagaaagctgtcgacaagccaccatcccccagcccgatcgagatgaaaaaggcatctaaccccgtagaagtgggaatccaggtgacaccagaggatgatgattgtctcagcacaagttcccggggaatatgtcccaagcaggagcatatcgcaggaaaggacgagccttcatcgtacacatgtacaacctgtaagcagccttttacctccgcctggttccttcttcagcacgcacagaatacacatggcctacgtatttatttggaaagcgagcacggctccccactgactccaagggtaggcataccctccggcctgggagccgaatgccccagtcagccgcctcttcatggcatacacattgccgacaataatccctttaacctcctaagaatcccaggctccgtcagtcgggaggccagcggactggcagagggtcgcttcccacccaccccccccctattttctccaccgcctagacatcacctggatccccacagaatcgagagattgggggcagaggagatggccctagctactcatcatccttctgcgttcgacagagttctgaggctgaaccctatggccatggagcctcctgcgatggacttttcgcgcagactgagagagctagccggaaatacctcttcacctccgttatcccctggacggccctccccaatgcagagactgctccagccctttcagcctggaagtaaacctccattcctggctacacccccactgccaccactgcagtctgctcctcccccaagccagccccccgtaaagtccaagagttgtgagttttgcggcaagacttttaaatttcagtcaaatctcgttgttcaccggagatcccacaccggcgagaaaccttacaagtgtaacttatgtgaccatgcttgtacacaagctagcaagcttaaacgccacatgaagacccacatgcacaaatctagccctatgactgtgaaatccgatgacggactgagcacggcgagttctcccgaaccaggtacttcagatctagtgggctctgcgtcaagcgccctgaagtctgttgttgccaagttcaaatcggagaatgaccctaatctgattccggagaacggagatgaggaggaggaggaagatgatgaagaggaggaagaagaggaagaagaggaagaagaggaattaaccgagtccgaaagagtggactatgggttcggtctaagtctcgaggcagcacggcatcatgaaaacagcagtcgaggcgccgtggtgggtgttggcgacgagagtcgcgctctgcccgacgtgatgcagggcatggtactcagctccatgcagcatttctcggaagcctttcatcaagtactgggagagaaacataaacgcgggcatcttgccgaggcagagggccaccgggacacttgtgacgaggattccgtcgccggagaaagtgaccggatcgatgacggaactgtcaatggacgtggatgcagtccaggggagagcgcctccggggggctgtctaaaaagctgctgcttgggagcccttcaagtctaagccctttttctaagagaatcaaactggaaaaagaattcgaccttccccccgctgcaatgccaaacactgagaatgtctattctcagtggctggctggttacgcggctagccgccagctcaaagacccttttctatcattcggggattctcgtcagtctcccttcgcctctagctccgaacacagctccgagaatggaagcctaagattctcaactcctccaggggagttagacggaggcattagtggacgctctggaaccgggagcggagggtctacaccccacatctcagggcctggaccaggcagacccagtagcaaggaaggtcgacgcagtgacacctgtgagtactgcggaaaggtgttcaaaaattgttctaacctcacagtgcaccggcgtagccatacgggagagagaccatacaagtgtgagctgtgcaactacgcttgcgcccagtcctccaagcttacacgacacatgaagacacatggacaggtgggaaaggacgtttataagtgtgaaatatgtaagatgccattttcagtgtattcgactctcgaaaaacacatgaaaaaatggcattccgatcgagtgttgaacaacgatattaaaaccgaatag

SEQ ID NO: 180249 - DNA, 732 bp, synthetic construct
  misc_feature 1..732: note = Description of Artificial Sequence: Synthetic coding sequence
  source 1..732: mol_type = other DNA
atgagccggcggaagcagggcaagccccagcacctgagcaagcgggagtttagtccggagccattggaggctatactgactgatgacgaaccagatcacgggcctttgggcgcccccgagggtgaccatgatctgctgacctgcggccaatgccaaatgaattttcctcttggagatatcttgatcttcattgagcacaagcgaaaacagtgcaatggctctctttgcctggaaaaagccgttgacaaaccaccatctcctagccctattgaaatgaagaaggcctccaacccagtggaagtggggatacaggtcacccctgaggatgacgattgcctgagcacttctagtaggggcatatgtcccaagcaggaacatatcgctgataagttgcttcactggcgcggcctttcttccccgcgaagtgcacatggggccctgatcccgacccccggaatgagtgctgaatatgccccccagggcatttgtaaggatgaaccttcatcttacacgtgtacgacttgcaagcagcctttcaccagcgcgtggttcctgttgcagcacgcccagaacacacatgggctgcgcatataccttgaatcagagcacggttcaccacttacacctagggtgctgcataccccgccttttggggtcgtcccacgcgagttaaagatgtgtggctcctttaggatggaggctcgagaaccgctctcttcagagaagatatag

SEQ ID NO: 180250 - DNA, 2397 bp, synthetic construct
  misc_feature 1..2397: note = Description of Artificial Sequence: Synthetic coding sequence
  source 1..2397: mol_type = other DNA
atgagcaagggcaccgacgaggacatcttcagcggcgtgagcttctttcttacacggttgtcacgctgtgagcctagcaggcgcccgcccccagcaccccagccaaccatgagtagaaggaagcagggaaagccacaacacctgtccaagagagagttctcgcccgaaccgttagaggccattttgactgacgacgaacctgaccacggccctctgggcgcccccgaaggggaccatgacctgctaacctgtggccagtgtcaaatgaatttccccttgggcgacatcctgattttcatcgagcacaaacggaaacagtgcaatgggtccctctgtctggagaaggcagtggacaaaccgccgtctccatccccaattgaaatgaaaaaagccagcaaccccgtggaggttggcatccaagtcacccctgaggacgatgactgcctttctacgagttcacgtggaatctgccccaaacaggagcatatcgctgataagctgctgcattggagaggcttgtctagccccaggagcgcccacggagcccttattcctaccccaggcatgagcgccgagtatgccccacagggcatctgtaaagacgaaccaagcagctacacatgcaccacctgtaagcagccattcacatcagcatggtttctcctgcaacatgctcagaacacgcacggattgaggatatatctggagtcagagcacggcagtcctcttactcctagagtgggaatccccagcgggttgggcgcagagtgcccttcacaacctccgctgcacgggatacacatcgctgacaataatccttttaatctgctccgaatccctgggtccgtgagtcgcgaagcgtccggcctcgcagaggggaggttcccccccactcctcctctgttcagccccccaccccggcaccaccttgacccacaccgtattgagagactgggtgcagaagaaatggccctggctacgcatcatcctagcgcctttgatagggtccttaggcttaaccccatggctatggaacccccagctatggatttcagtcgacgcctacgggagctggccggtaatactagctctccccccctgagtcccggaaggccgagcccgatgcaacgcctgctccagccatttcagccggggagcaagcctccatttctcgccacacccccacttccccccctccaatctgccccccccccgtcacagccacccgtgaaatcaaagagttgcgaattctgtgggaaaaccttcaaatttcagtcaaatctcgtggttcatagaaggagtcatacaggggaaaaaccctacaagtgtaatctttgcgaccatgcgtgcactcaggcttctaagcttaaacgccacatgaagacacacatgcacaaaagttccccaatgacggtcaaatcagatgacggcctcagcaccgcctcctcacctgagcccggtaccagtgaccttgtgggtagtgcgtcctctgcattgaaaagtgtggttgcgaaatttaaaagcgaaaatgaccctaatctcatccctgagaatggcgatgaggaagaagaggaggatgatgaggaagaggaagaagaggaagaggaagaggaggaagagctgactgaaagtgagcgagttgattacggttttggcttgtctctggaggcggtagtgggagtgggcgacgagtcaagagctctgcccgacgtgatgcagggaatggtactgagtagcatgcagcacttttctgaggcttttcaccaagtgctcggtgagaagcacaagcgcggccatctggcagaagctgagggtcacagagacacttgtgatgaagactcggtagccggcgagagcgacagaatcgacgatgggaccgtcaacgggcgaggctgctctcccggcgagtccgcctccggcggcctgtctaagaaattgcttttgggctccccttccagcctgagccccttttccaagagaatcaagctggaaaaagagtttgatctcccccctgcagcaatgccaaataccgagaacgtatattctcagtggcttgcaggctacgcggcaagtcgccagctcaaggatcccttcctatcgtttggcgactctcggcagtccccctttgccagctcctcagagcatagcagcgagaacgggtcactgaggttcagcacacctcctggtgagttggacggaggcatatccggcagatcaggaactggcagtggaggatccactcctcacatatctggacctgggccaggcaggcccagttcaaaagagggcagacgcagtgacacttgctcaagtcacacccccatcaggcgcagtacccagcgcgcccaagacgtgtggcagttttctgacggcagtagcagggccctgaagttctag

SEQ ID NO: 180251 - DNA, 1329 bp, synthetic construct
  misc_feature 1..1329: note = Description of Artificial Sequence: Synthetic coding sequence
  source 1..1329: mol_type = other DNA
atgagcgccgagtacgccccccagggcatctgcaaggacgagccctcgtcctatacatgtaccacatgtaagcagccgttcacctctgcgtggtttttgctccaacacgctcagaatactcatggactgcggatctatctggagtctgaacacggatcccccctcacccctaggtcaaaccttgtggtccatcgtagatctcatacgggagagaagccttacaagtgcaatctctgcgatcatgcatgcacacaggcttcgaagctgaaaaggcacatgaaaactcacatgcataagagctcccccatgacagtgaagagtgatgacggactcagcacggcctcctccccggaacctggaacgagtgatctggtcgggagtgcctctagtgcgcttaagagtgtggtggccaaattcaaaagcgagaacgatcccaacctgatcccggagaacggagacgaggaagaggaagaggatgatgaagaggaggaagaggaggaagaggaagaggaggaagagttgaccgaaagtgaaagggtggattatggttttggcctgtctctagaggccgccaggcaccacgaaaatagcagtagaggcgctgtcgtgggggtgggagacgaaagtagggctctgcccgacgtgatgcagggcatggtactgagctccatgcagcacttctccgaagccttccaccaggtgcttggggaaaagcataagcggggccatctggctgaggccgagggtcaccgtgatacgtgcgatgaggacagtgtcgcaggtgaaagcgatcgcattgacgacggaacggtgaacggacgcgggtgttctcccggtgagtcggcgtctggggggctgtccaagaagcttctcctgggtagtcctagctctctgtctccatttagtaagaggatcaagcttgagaaagaattcgatttacctcctgcagccatgccaaacacagaaaatgtttactctcagtggttagccggttacgctgcctcgcgccagttgaaggaccccttcctctcatttggtgactctcggcaatctccttttgcctcgtcatccgagcacagctccgagaacgggtcattgcgcttttctaccccccccggcgagctggatgggggcatcagtggccggtccggcactgggtctgggggcagtactcctcatataagcggaccaggacctggccgtccgagtagcaaggagggccggcgttccgatacttgctcttcccatacaccgattaggaggtctacacagagagcacaggacgtgtggcagttctccgacggctccagtagggcgttgaagttttag

SEQ ID NO: 180252 - DNA, 2382 bp, synthetic construct
  misc_feature 1..2382: note = Description of Artificial Sequence: Synthetic coding sequence
  source 1..2382: mol_type = other DNA
atgagccggcggaagcagggcaagccccagcacctgagcaagcgggaattcagtcccgagcctcttgaggcgatcctgacggatgacgagcccgaccatggtcccctcggagcccccgaaggggatcatgatctcttgacttgtgggcagtgccagatgaattttccacttggggatattctgatttttattgaacacaagcgcaagcaatgcaatggtagcttgtgcttagagaaagctgtcgataagcctccctctccctctccaatcgagatgaaaaaagccagtaacccggtggaagtggggattcaggtcaccccagaggacgatgactgcttaagcacaagttcacggggcatttgccctaagcaggagcacattgctggtaaggatgagcctagctcatacacttgcaccacatgcaagcagccctttacaagtgcctggttcctgctgcagcacgcccagaacacgcatggcctcagaatttatttggaaagtgagcacggctcaccccttacccccagggtaggcattccctccgggctcggggccgagtgtcccagccaaccgcctctacatggcatccatattgccgataataatccatttaaccttctgcgtataccggggtcagtgagtcgtgaggcaagcggactggctgagggccggtttccgccaacccctcctctcttcagcccacccccgcggcaccatctggacccccacaggatagagcgacttggggccgaggaaatggctctagctacgcaccatccgtctgcattcgacagggtgctgcgcctgaaccccatggcgatggagcctcctgccatggattttagccgtcggctgcgcgaacttgcgggcaatacaagcagtcctccactcagtcccgggaggccctccccaatgcaacggctgttgcagcccttccagccagggagcaagcctcccttcctggcgactccgccactccctcctttacagtccgccccacccccctcccaaccgcccgttaaaagcaagagctgtgagttctgtgggaagacatttaagttccagtccaacctggtggtccaccgccgctcccacaccggcgagaaaccatacaaatgtaacctgtgcgatcatgcctgtactcaggctagcaagctcaaacgccacatgaaaacccacatgcataagagttcccccatgaccgttaagtctgacgatgggctgtcaaccgcctcctctcctgaaccaggaacatccgatctggttggctcagcgtcatctgccctgaagtctgtggtggccaagtttaagtccgaaaatgatcccaaccttatacccgagaatggagatgaagaagaggaagaggacgatgaggaggaggaagaggaggaggaagaagaggaggaagagctgactgagtccgaaagggtggattatggcttcgggctgtcactcgaagcggcccgacaccatgaaaactctagtaggggcgcagtggtcggggtgggcgatgagagccgtgccctgccagatgttatgcaggggatggtgcttagctctatgcagcacttcagcgaagcctttcatcaggtgctgggtgaaaagcacaagcgcggacacctggcagaagcggagggccacagagatacctgcgacgaggactccgttgcaggagaaagcgataggatcgacgacggtaccgtaaacgggcgggggtgctccccaggagaaagtgcttctggggggctttccaagaaattactgcttggaagtccctcgtcactgtctcccttctctaagagaatcaaactcgagaaggaattcgacctcccccctgctgcaatgccgaataccgagaacgtttactcacagtggctggccggatacgctgctagtagacagcttaaggacccctttctgtctttcggggattctaggcagtctccatttgcgtcctcttcggagcatagttccgaaaacgggtccttgcgtttctcaactccacctggggagctggatgggggaatcagcggccggtctgggactggctcgggcggctccactccacacataagtggcccgggccccggccggcccagttccaaagagggcagacgttctgatacctgcgagtattgtggaaaggttttcaagaattgctcaaaccttacggtccaccgtagatcgcatacaggtgagaggccttataagtgtgagctctgtaactatgcctgcgcccagagcagcaaacttactcgtcacatgaagactcatggtcaggtgctgcacaccccgcccttcggggtggtgcctcgcgagctgaaaatgtgtggatctttccggatggaggctcgcgaacccctgagctcggagaaaatctag

SEQ ID NO: 180253 - DNA, 2472 bp, synthetic construct
  misc_feature 1..2472: note = Description of Artificial Sequence: Synthetic coding sequence
  source 1..2472: mol_type = other DNA
atgagccggcggaagcagggcaacccccagcacctgagccagcgggagctgatcacgcccgaagcagatcacgtagaagccgccattcttgaagaggatgaggggctcgagattgaagagccttctggactgggcctgatggtgggagggccagatccggacctccttacctgtggacaatgtcagatgaattttccacttggggatatattagtctttattgagcacaagaggaagcagtgtggcggatccctgggagcttgttatgataaagccctggacaaagattcgccacccccctcctctcggtccgagctccgcaaagtgtctgagccggtcgagatcggcattcaggtgaccccagatgaggacgatcacttattgtctccaacaaagggcatttgccctaagcaagagaatatcgccggtaaagacgagcccagctcttatatctgtacaacctgcaagcagcctttcaatagtgcatggttcctgctgcagcatgctcagaacacgcatggtttccgcatctatctggagcccgggcccgccagttcttcactcactccgcgtctgacaattccgccccctctggggccagaagcagtcgcgcagagtcctctgatgaatttcctcggggattcgaatccattcaacctgctgaggatgaccggtccaatcctgagagaccaccccggcttcggtgagggacgactgcccggcacaccacctcttttttccccaccccctagacatcacctggacccgcatagactgtctgccgaggaaatgggtttggtcgctcagcatccaagcgcatttgatagagtgatgcggttgaaccctatggccatcgactcccctgctatggatttctctcgcaggctcagggagctcgccggtaatagctccacgcccccgcctgttagcccgggtcgaggaaatcccatgcatcggctgttgaacccctttcagccttcacccaagagtcccttcctgtccacaccaccattgcccccgatgccacccggtggcactccgcccccccagccaccagcgaagagcaaatcctgcgagttctgcggtaagactttcaagtttcagagcaatctgatcgttcataggagatctcacactggcgagaagccctacaaatgtcagctctgcgaccacgcctgcagtcaggcgtctaagctgaaacgacatatgaaaactcacatgcacaaggccgggtctttggctggccggtctgacgacgggttgtccgccgccagtagcccggaacccggcacctctgagctggctggggaaggcttgaaagcagccgacggcgactttagacaccatgagagtgacccctcgctggggcatgagcctgaggaggaggatgaagaggaagaagaagaagaagaggagctcctgctggagaatgagagcaggccagagagctccttctcaatggacagcgagttaagccgcaacagggaaaacgggggtgggggggtgcccggggttcccggagccggtggtggggctgccaaagcactcgccgatgaaaaagccctggtactgggtaaagtcatggagaacgtcggactgggggctctgccccagtacggggagctgctggccgataaacagaagagaggggcctttcttaagagggccgctgggggcggggatgccggcgacgacgacgacgccggtggatgcggggacgccggcgctgggggagctgtgaatggcagaggtggtggtttcgccccagggacagaaccttttccaggcttgttccccaggaagcccgctccgttgccaagccctgggttgaatagtgccgcgaagagaataaaggtggagaaggacctagaactcccccctgctgccctcatcccgtctgaaaacgtgtactctcagtggcttgttgggtatgccgcatctaggcacttcatgaaggacccttttcttggcttcaccgatgctcggcaatccccctttgcgactagttctgaacacagctctgaaaatggaagcttaagattcagtaccccaccaggagatctcctggacgggggattgtccggccggtcaggtactgcctctggtggctcaacaccccacctgggcggacctggaccaggtcggccatcttccaaagagggacgcagatctgacacatgtgaatactgcggaaaggttttcaaaaactgctccaacctgacagttcaccggcgaagtcacaccggagagagaccctataaatgtgaattgtgtaattatgcgtgtgctcaaagtagcaagctgaccagacatatgaagacccacggacagatcgggaaagaagtctaccggtgcgacatttgccagatgcccttctcggtatacagtacacttgagaagcatatgaagaaatggcacggggagcacttattaacgaacgacgtaaagattgagcaggcggagaggtcatag

SEQ ID NO: 180254 - DNA, 2685 bp, synthetic construct
  misc_feature 1..2685: note = Description of Artificial Sequence: Synthetic coding sequence
  source 1..2685: mol_type = other DNA
atgagccggcggaagcagggcaacccccagcacctgagccagcgggaactcattaccccagaagctgatcacgtcgaggcagcaatactggaggaggatgaggggctcgagatcgaggagcccagcggcttgggcctgatggtcgggggccctgaccccgacttgttaacctgcgggcagtgccagatgaatttccctctgggggatatactcgtctttatagagcacaagaggaagcagtgcgggggaagtcttggtgcatgctatgataaagctttggataaggactcgcccccaccttcatcgcgaagcgaacttaggaaggtcagtgagccagtggagatcggtatccaggtgacacccgacgaggacgaccatctgctctcccctactaaggggatttgccccaagcaggagaacattgcaggtccgtgtaggcccgctcagctacccgcggtagcacccatagccgcctcatcccaccctcattcatcagtgattacctccccgcttcgcgctcttggcgccctgcccccctgcctgcccctaccatgctgctcagctcgccccgtgtcgggcgatggtacccagggagagggacaaactgaggcaccattcggatgtcagtgccaactcagcggaaaagacgagccttcttcgtacatctgtacgacgtgcaaacagccttttaactccgcttggtttctgcttcagcacgcccagaacacacatggattccggatttacctggagcctggacccgccagttctagccttacccctcggcttacaatacctcccccactgggacctgaagccgtggctcagtcacccctcatgaatttccttggcgattcaaatccctttaatctgctgcgcatgacaggacctatcctacgggaccatcccggatttggggaaggccgcttgcctgggaccccgccactattttctcccccacccagacaccacctcgatcctcaccggctgtccgcagaggagatgggcttagtggcccagcatcctagtgccttcgatagagttatgcgccttaatcctatggctatcgattcacccgccatggacttcagtcgccgcttgcgcgagcttgccggtaacagctcaacacccccacccgtgagcccaggcagaggcaaccctatgcacagactattaaatccattccagccttcccctaagtcccctttcctgtctacacccccacttcccccgatgccaccagggggaaccccccctccacagcctcctgccaagtcaaagtcctgtgaattctgtggaaagacatttaagtttcaatccaatctgatcgtccacagacgctcacacacaggagagaaaccctacaaatgccagttgtgtgaccacgcttgcagtcaggcttctaaactcaaacgacacatgaagacccatatgcataaggccggatccttggcaggaagaagcgatgacggcctgtcggccgcctccagccctgagcctggcacctcagagcttgccggcgaggggttgaaggccgctgacggagactttagacaccatgagtcagatccttcacttggacacgaacccgaagaagaagatgaagaagaagaagaggaggaggaggagctgctcctggagaacgagtctcggcccgagagtagcttcagcatggattctgagctctcacgcaacagggaaaacggcgggggcggagtcccaggggtgcctggggctgggggcggagcagccaaagccctcgccgatgagaaagcattagtactgggcaaggtcatggaaaacgtgggactcggggctttaccacagtacggtgaactcctagcagataaacagaagcgcggagccttcctgaaacgtgctgccgggggaggcgacgcaggagacgacgacgatgccggaggttgcggtgacgctggagccggcggagcagtgaacgggcggggtggcggatttgctcctggcacggaaccctttcccggcctgttcccccggaagccggctccgttaccatcacccggcctcaattccgccgccaagagaatcaaagtggaaaaagatttggagctccctccagccgctctaataccgagcgagaacgtgtacagtcagtggctcgtgggatatgccgcttcgcgccactttatgaaagatcccttcctgggctttaccgatgcaagacaaagcccctttgctacctcttccgaacatagcagtgaaaacggatctctgcgtttcagtacacctccgggcgatctactggatggcgggttgagtggcaggagcggtactgcctccggcggatctactccccacctcggcgggccaggtcccggccggccttcctctaaggaaggcagacgatcggacacgtgtgagtactgtgggaaggtgttcaagaactgtagcaacttgacggtccatagacggtcccatacaggcgaacgcccttataagtgcgagctgtgcaactatgcctgtgctcaatcgtctaagcttacgcggcatatgaaaacccatgggcagatcggcaaagaggtgtaccggtgtgacatttgccagatgccgttttctgtttactctacattggagaaacacatgaagaaatggcatggtgagcacctcctgaccaatgatgttaaaatcgagcaggctgagaggtcatag

SEQ ID NO: 180255 - DNA, 1365 bp, synthetic construct
  misc_feature 1..1365: note = Description of Artificial Sequence: Synthetic coding sequence
  source 1..1365: mol_type = other DNA
atgccccggtgccccgccggcgccatggacgagggccccgtggacttgcgcacacggcctaaggcagccggactgcccggtgccgctctgccactcagaaagaggcccctaagggcccctagccccgagcctgctgccccgcgaggtgcagcaggcctggtcgtaccactcgatcctctgcgcggaggctgtgacctgccagctgtgcctggacctccccatggactagctagacctgaggctttgtactaccctggcgccttgcttcccttgtaccctacacgtgcgatgggcagcccctttccacttgtcaatctgcctaccccactttaccccatgatgtgccccatggaacaccccttgtctgccgacatcgcaatggcaacccgagcagacgaagacggagacacgcctcttcatatcgccgtggttcagggcaatctgccagccgtgcacaggctggtgaatcttttccaacaggggggccgagaactggatatctacaataacctgagacagactcccctgcaccttgccgtgattaccacgctgccttccgtggtccgattactggtgaccgctggagcctcaccaatggcgctagacagacacggccagaccgccgcacacctggcctgtgagcacaggtcccccacctgcctgcgtgccctgctggacagcgccgctccagggaccctggatctcgaggctcgcaattatgatggcctgacggccctgcacgttgccgtgaatacagagtgccaagagacagttcagcttctgcttgaacgcggcgcggacatagacgccgtagacattaagagcggccggtcccccctcatccatgctgtcgagaacaattcgctttctatggtccagctcctgctgcagcatggcgcaaatgttaatgctcagatgtattcagggtcaagcgcgctccactctgcaagcggccggggtctgctacctctggtccgaactctggtgcgcagcggcgccgactcatccctgaagaactgtcataatgacacccccttgatggtggcccggtctcgacgcgtcatcgacatcctccgcgggaaggcaactagacccgcgtctaccagccagcctgatccatctcccgacagaagcgcgaacactagcccagaatcctccagcagactgtcatccaacgggttgctctctgcatcaccctccagctccccctctcagtctcctccgcgcgacccaccaggttttcctatggcaccccctaacttcttcctcccttctccctctcctccggcttttctaccctttgccggagtgctgagaggaccaggccgcccggtacctccatctccagcacctggcgggagttag

SEQ ID NO: 180256 - DNA, 1071 bp, synthetic construct
  misc_feature 1..1071: note = Description of Artificial Sequence: Synthetic coding sequence
  source 1..1071: mol_type = other DNA
atggaggagggccgggagcggaaccggagctggccccccgccgagtgccaaagtctcccgcgggtgcggctgttcaccccgacaaaggaggaaactgcgcaaaggggcgaggtgtttggacaagggcaccccgccagggctctccttccactatacccaaccagagcaatgggcagcccctttcccttggtaaacctgccaactcccctttaccctatgatgtgtcccatggagcacccacttagtgctgacatcgcaatggcaactcgcgctgatgaggacggtgataccccacttcatattgccgtggtccagggtaatcttcctgcagtacacagattggtgaacctcttccagcaggggggccgggaattggacatttataacaacctacgccagactccgctgcatctagctgtcatcacgaccctgccaagcgttgtgcgtctgcttgtgacagcaggggccagtcctatggcccttgacagacacgggcagactgctgcacacctagcttgtgagcataggtccccgacatgcctcagggccctgctcgactccgccgcgcccggcactctcgaccttgaagcgcggaactacgatggcttgacagccttacatgttgctgttaacacggaatgccaggagactgtccaactgctacttgagaggggggctgatattgacgccgtggatatcaagagcggccgatctccgctgatccatgccgtggagaacaactctcttagtatggtgcagctgctgctccagcatggcgcaaacgtgaacgcccagatgtacagtggcagctcagcgttgcattccgcaagcggtagagggctgctcccactcgtgagaaccttggtgcgatctggcgcggactccagcttaaagaactgccacaatgacacccctctaatggtggcacggtcccggcgcgtctcacgcgggagttgtggtcatgctccctgtacccgcgtctccgcaggttggctccaggcctccgtgcctgagcggaggggcgtgcgagttagtgtaccgttacgcggcggcgagtgggtatcattatag

SEQ ID NO: 180257 - DNA, 1440 bp, synthetic construct
  misc_feature 1..1440: note = Description of Artificial Sequence: Synthetic coding sequence
  source 1..1440: mol_type = other DNA
atgggcagccccgccgcccccgagggcgccctgggctacgtgcgggagtttactcgccacagttcagatgtgctgggaaatttgaatgagctgcggttgcgcggaattcttacagatgtgaccctcctcgtcggggggcagccgctgcgggcgcacaaggcggtgttgatagcttgcagcggttttttctacagtatctttaggggaagggctggagtgggggttgacgtcctcagcctccctgggggccccgaagctagggggttcgccccattgttagactttatgtacacatcccgccttcgcctttctcctgctactgcacctgctgttcttgctgccgcaacatatctgcagatggagcacgtggtgcaagcctgtcatcggttcattcaggccagctatgaaccactcgggatctccctgaggccattggaggccgaacccccaactccccctacggctccccctccaggcagcccgcgacggtctgaaggccaccccgacccccctacagaatcaaggagttgttcacagggtccaccatctcctgcctctccagacccgaaggcatgtaattggaaaaaatacaagtacattgtgctaaacagtcaggcctcccaggctggtagtcttgttggggaacgttcctctggacagccctgccctcaggccagattgccttctggggacgaggcctcgtcgtcctcttctagctcttcctccagctcagaagagggccccatccccggaccccagagccgtctgagtccaaccgccgctaccgtgcagtttaaatgtggcgccccagcatctaccccatacctcctcacaagccaggctcaggacaccagtggttctccatccgagcgggcaaggccactccctggttccgagtttttctcttgccagaactgcgaggctgtagcaggttgctccagcggactggactccttagtacctggagacgaggacaagccttacaagtgccagctgtgtcgatccagtttccgttataaaggaaacttagcttcccaccgaacggttcatactggtgagaagccctatcactgtagtatttgtggggcccgcttcaatcgtccggctaatctgaagacccattcaaggatccactctggagagaagccatataaatgtgaaacctgtggctctcgctttgtgcaggtagcccatctgagggcacatgttctgatacacactggggaaaagccttatccatgtcccacatgtggcaccagatttaggcacttgcagacgctgaaaagccatgtccgcattcacacaggcgaaaagccatatcactgcgacccctgcgggcttcatttcaggcacaagtcccaactgcggttgcatttgcgccagaagcacggggccgccacaaacactaaggtgcactaccatattctgggtgggccctag

SEQ ID NO: 180258 - DNA, 129 bp, synthetic construct
  misc_feature 1..129: note = Description of Artificial Sequence: Synthetic coding sequence
  source 1..129: mol_type = other DNA
atccacaccggcgagaagccctacccctgccccacctgcggcaccagattccgccacctgcagacattaaagagtcatgtgcgtatccacacgggcgagaagccctatcacgagcctgttacctcatag

SEQ ID NO: 180259 - DNA, 633 bp, synthetic construct
  misc_feature 1..633: note = Description of Artificial Sequence: Synthetic coding sequence
  source 1..633: mol_type = other DNA
atgagcggccggagcgtgcgggccgagacccggagccgggccaaggacgatattaagagagttatggctgcaatagaaaaggtgagaaaatgggaaaaaaagtgggttactgtgggtgatacctcactgagaatttataaatgggtgcctgtcacagagcctaaggtggacgacaagaacaagaacaagaagaaggggaaggacgagaagtgcggaagtgaagtgacaactccagagaactcctcaagccctggaatgatggacatgcacgatgataactccaatcagagcagcattgctgatgctagccccattaagcaggagaactcgtctaattccagccctgcccccgaacctaattctgctgtaccatcagacggaactgaagctaaggtggatgaagcccaggctgacgggaaagagcatccaggggccgaggatgcttccgacgaacaaaactcacagagcagcatggaacattctatgaacagctctgagaaagttgatagacagccgtctggggactctgggctcgcggctgagacctctgcaataagccaggatctcgagggggtcccacccagtaaaaaaatgaaactggaagcttctcagcaaaatagcgaggaaatgtag

SEQ ID NO: 180260 - DNA, 696 bp, synthetic construct
  misc_feature 1..696: note = Description of Artificial Sequence: Synthetic coding sequence
  source 1..696: mol_type = other DNA
atgagcggccggagcgtgcgggccgagacccggagccgggccaaggatgacattaagagagtgatggccgctatcgagaaggtgcggaaatgggaaaagaaatgggtgactgtcggagatacatctttacgtatctacaagtgggtgcccgtaaccgagcccaaagtcgacgacaaaaacaagaataagaaaaaaggtaaagacgagaagtgtggatccgaggttaccactccagaaaactcaagcagcccagggatgatggacatgcatgacgataacagcaatcagtcatcaatcgcagacgcctcgcccataaagcaggagaacagctcaaactcttcacccgcaccagaacccaatagcgctgttccctctgatggaacagaggcaaaagtcgacgaggcgcaggcagatgggaaagagcatcctggcgctgaggacgcctcagacgagcagaacagtcagagttcaatggagcattccatgaatagctcagaaaaggtcgatcgtcagccttccggggattcaggcctggctgccgaaacaagcgccatatcccaagtgcctcgcagccgatcgcagcggggatcccagattggcagagagccaattggtctctctggggacctggagggcgttcctcccagtaaaaagatgaaactggaggcctcccagcagaattccgaagaaatgtag

SEQ ID NO: 180261 - DNA, 528 bp, synthetic construct
  misc_feature 1..528: note = Description of Artificial Sequence: Synthetic coding sequence
  source 1..528: mol_type = other DNA
atggccagccggaaggccggcacccggggcaaggtggccgccaccaaacaagcccagcgcggaagtagtaacgtgttttccatgtttgaacaggctcagatccaggagttcaaagaggctttttcatgtatcgaccagaaccgggatggcatcatctgcaaggcagatttgcgggaaacttacagccagttaggcaaagtatcagttcccgaagaggagctggacgctatgctccaggaggggaagggccccattaacttcacggtttttctcacattattcggggagaagctgaacggaacagaccctgaggaagcaattctgtcagcattccgcatgttcgacccgagcggcaaaggagtggtcaacaaggatgagttcaagcagctgctgcttacgcaagccgataaattctcccctgcggaggttgagcagatgttcgcactgacccctatggatctcgcaggtaatatagactacaaaagcctatgttatatcatcacgcacggagatgaaaaggaagagtag

SEQ ID NO: 180262 - DNA, 438 bp, synthetic construct
  misc_feature 1..438: note = Description of Artificial Sequence: Synthetic coding sequence
  source 1..438: mol_type = other DNA
atgagcggccggagcgtgcgggccgagacccggagccgggccaaggacgatattaagaaggtcatggccgccatcgagaaggtgagaaaatgggagaaaaaatgggtcaccgtcggcgatacatcattgcgcatctttaagtgggtccccgtgaccgacagcaaggagaaagagaagtcaaaaagcaattcttcagccgctcgagagccgaacggcttcccatctgatgcatccgccaattctagcctcttattagaatttcaggaaccttcccttcctagctcagaggttgccgatgaacctcctaccctcaccaaagaagaaccagtcccactcgaaactcaagtagtggaggaggaagaggacagtggtgccccgccactcaagagattctgtgtggatcagcccactgttcctcagacagcttcagagtcttag

SEQ ID NO: 180263 - DNA, 867 bp, synthetic construct
  misc_feature 1..867: note = Description of Artificial Sequence: Synthetic coding sequence
  source 1..867: mol_type = other DNA
atgaaggaccggacccaggagctgcggagcgccaaggacagcgacgatgaagaggaagtcgtgcatgttgatagggaccactttatggatgagtttttcgagcaggtggaggaaatccggggctgcatcgaaaagctatccgaggatgtcgaacaggttaagaaacagcactccgctattcttgccgcccccaatccagatgagaagacaaagcaggaactcgaggacctgaccgcggacattaagaagaccgccaataaggtgaggtctaagctgaaagccatcgagcaatccatcgagcaggaggaaggactgaaccggtcctctgctgaccttcgcattcgaaaaactcagcacagcacgctctctcgaaaatttgtcgaggtgatgaccgagtacaacgccacccagtcaaaatatcgggatagatgcaaggataggattcagcgacagctggagatcactggtaggaccacaacgaacgaggaactcgaggatatgcttgaatcaggcaaactggcaatttttaccgacgatatcaagatggacagccagatgaccaaacaggcactaaatgaaatcgaaacaagacacaatgagatcataaaactcgagacatctatccgggagttgcacgacatgttcgtggatatggccatgttagttgagtctcagggcgagatgatcgatagaattgaatacaatgtggagcactctgtcgattatgtcgagcgagcggtttctgacactaaaaaggccgtcaaatatcaatcaaaagccagacggaagaagataatgatcataatttgctgcgtggttctgggagtggtgttagcctcaagtatcggtggcactctcgggttatag

SEQ ID NO: 180264 - DNA, 729 bp, synthetic construct
  misc_feature 1..729: note = Description of Artificial Sequence: Synthetic coding sequence
  source 1..729: mol_type = other DNA
atggccggccggaccgtgcgggccgagacccggagccgggccaaggatgatattaaaaaagttatggcaacaatcgagaaggttaggcgctgggaaaagcgctgggtgacagtgggcgatactagcctgagaatctttaaatgggttcccgttgtggatccccaggaggaagagcgccggcgggctgggggcggtgcggagagaagccgtggccgggaaaggaggggacggggcgcttcacccagggggggcgggcccttaatactcctagacctgaatgatgagaactccaaccaaagctttcattctgaaggatcacttcagaaggggaccgaacccagccctggggggacgcctcaaccctcccggccagtgagtcctgctggaccaccagaaggtgtgcctgaggaagcccagcctcccaggctcggtcaggagagagatccagggggcatcactgctggttctaccgacgagcctcccatgctaacgaaagaggagccagttcccgagcttctggaggccgaggacagcggggtgcgcatgacacggagagctctccacgaaaaaggcctgaagaccgaacctctgaggagattactccctagaagaggtctacgtaccaatgtccgccccagctccatggcggtgcccgacactagggcacctgggggagggtctaaagccccgcgggctccaaggactattcctcagggcaaggggagatag

SEQ ID NO: 180265 - DNA, 1680 bp, synthetic construct
  misc_feature 1..1680: note = Description of Artificial Sequence: Synthetic coding sequence
  source 1..1680: mol_type = other DNA
atgcacagcttcatccacgccgccatgggcatggtgatggcctggtgtgccgccgtgataacacaggggcaatacagcttcctggtggtaccatgcaccgggacaaacagttttgggtcccctgcggcccagacttgcctcaacgagtatcacctgttttttctactgaccggtgcattcatgggatatagctacagtctcctctactttgtgaacaacatgaattacttgccttttccgattatccagcagtacaagtttttacgctttcggagatcactgcttttactggtgaagcactcctgcgtggagtctctcttcctcgtgcgaaatttttgtattctttactatttcctaggatacattcctaaggcatggatttccacagcaatgaatttacacattgacgagcaggtgcacaggcctctcgacacagtgtccggactcctcaatttgagcctcctttaccacgtgtggctttgtggcgtttttctgctgacaacatggtacgtctcctggattctgtttaagatctatgccacagaggcacatgtcttccctgtccagcctcccttcgccgaaggctctgatgagtgccttcccaaagtgcttaattcgaacccacccccaatcattaaatatctcgcactccaggacctaatgctgttgtctcaatattccccaagcaggcgtcaagaggtgttttccttatcccaacctgggggccaccctcataactggactgccatttcacgtgagtgccttaatttactaaacggcatgacccagaaattaattctctatcaggaagccgcagccactaatggacgggttagtagttcttaccccgtggagccaaagaaactcaattcccccgaggaaaccgcattccagacaccaaagtcgtcacagatgcctagaccatcagtgccgcccttggtgaagacttccctcttctcctcaaaactttcaactccagacgttgtctcacctttcggcactccctttggctcgagcgtcatgaatcggatggcaggcatttttgatgtgaatacttgttacggatcacctcagagcccccagttaatccggcgaggcccacgcctgtggacttctgcgagtgatcaacagatgacagagttcagtaatccgtctccgtctacaagtatttcagccgaaggcaagaccatgagacaaccttccgttatttatagctggatacagaacaaacgagaacagatcaaaaacttcctaagcaagcgggtgctgatcatgtactttttttccaagcatcccgaggccagcatccaggccgtgttctcagacgcccaaatgcatatatgggctctggagggactaagtcaccttgttgcggcatcatttacggaagatcgtttcggcgtcgtccaaaccaccctgcccgcaattttgaatacgttattgacgctgcaagaggccgtcgacaagtacttcaaattgccacacgctagcagcaagccacccagaattagcgggtccctcgtagatacctcatataagacacttagattcgctttccgggcctcccttaagaccgccatctaccgtataaccacaacatttggagaacatctcaatgcggtacaagctagtgcagagcaccaaaaaagactgcagcagttcctcgagttcaaggagtag

SEQ ID NO: 180266 - DNA, 4500 bp, synthetic construct
  misc_feature 1..4500: note = Description of Artificial Sequence: Synthetic coding sequence
  source 1..4500: mol_type = other DNA
atgcggatcctggccaacaagacccggctgccccacccccggcggcgtgaagccccaggcagcccaccgttgtctccacgggggcattgccctccagcccccgccaaacccatgcatcccgaaaataagcttaccaaccacggaaagactggaaatggcggagcccaaagccagcatcagaacgtcaatcaaggtcccacctgcaacgtgggcagtaaaggggttggggccggcaatcatggggctaaggctaatcagatctcccccagtaacagcagtcttaagaacccccaagcgggggtgcctccttttagcagtctcaaaggcaaagtgaagagagataggtctgtgagcgttgactctggagagcagagagaggcagggactccttccctggacagcgaagccaaggaggtagcccctaggagtaagcggcggtgcgtgctcgaaagaaagcagccctacagcggtgacgagtggtgctctggccctgattccgaagaagacgacaagcctatcggcgctacccacaactgcaacgtggcggaccctgcaatggcggcccctcagctggggcctgggcagacgactcagctgccactaagtgaaagttcggtcccaggagcgcctcacggcccccccccgggcttgaggccagacgcgccggggggtgggggtgggggcgggggcgtccctgggaaaccccccagccaatttgtgtacgtgtttactactcatctggctaataccgccgccgaggcggtgctccagggtcgggcggactcaattcttgcctatcaccagcagaacgtgccgcgggctaagttagatcaggcacctaaagtgccccctacgccagagcccctacccttaagcacgccatcggccggtacacctcaatctcaacccccaccgttgccaccaccccctccacctgcccccggatcagcacccccagctctaccccctgaggggccaccagaggacagcagccaggacctggccccaaattccgttggggcggctagcactggcggaggaaccgggggcacacaccctaacaccccaacagctacaacggccaacaatcctcttccgcccggaggcgatcctagctccgcccctggtccagcactgctaggggaggcagctgccccaggtaatggacaaagatccttagtagggtcagagggactgtccaaagagcagctggaacatcgcgagagatctctccagaccttgcgggatattgagaggttattactgagatctggggagactgaaccctttctcaaaggccctcccggaggcgccggagagggcgggcctcctgctcaggcgcccccgcctcctcagcagcccccaacagcgcctccctccggacttaagaagtatgaagagcctctgcagtcgatgatcagtcagactcagtccctcggggggcccccacttgagcacgaggtaccgggccatccccccggaggcgatatgggccagcaaatgaacatgatgatccagcggcttgggcaggactcactgactcccgaacaggtcgcctggaggaagttgcaggaggagtactatgaggaaaagcgcagaaaggaagaacaaataggcctccacggaagccgtcctttgcaggacatgatgggcatgggcgggatgatggttcgaggtccccccccaccttatcacagcaaaccaggagaccagtggcctcccggcatgggagcccagttgaggggtccaatggatgtgcaggaccccatgcagctgagaggcggccccccctttcccggcccgcggttccccggaaatcaaattcaacgcgtgccagggtttggaggcatgcaaagtatgccgatggaggtgcctatgaacgccatgcaaagacctgtgagacccgggatgggatggacggaggatttgccgcccatgggcggaccgagtaatttcgcccagaacacaatgccctaccccggcgggcagggagaagccgagcgcttcatgacacctcgcgtcagagaggagctgttgcgccaccagctgcttgaaaaaagaagtatgggcatgcagagaccactagggatggccggatcaggaatgggacagagtatggaaatggagcgaatgatgcaagcccatagacagatggacccagccatgttcccagggcaaatggccggcggggagggactcgcagggactcctatggggatggaattcggggggggacgtgggctcctgagcccgccaatgggccagagcggtctgagggaagtagaccccccgatgggcccaggtaaccttaatatgaatatgaacgtgaacatgaacatgaatatgaatctgaatgtgcaaatgactccccagcagcaaatgctgatgtcccagaagatgcgcgggcccggcgacttaatgggaccccaaggactgtcacctgaggagatggcacgagtacgagcccagaactcatctggcgtcatggggggtcctcagaagatgctaatgccaagtcagttcccaaatcagggacaacaggggttttccggaggccagggaccctatcaggcgatgtctcaggacatgggtaatacccaggatatgttctctcccgaccagagctccatgcccatgagcaatgtagggacaacacgcctgagccatatgccactgccccctgccagcaatccacctggaactgtccactccgccccgaatagaggtctcggtaggcgtccctcagatttgacaatttccattaatcagatggggtcaccgggcatggggcacctcaagtccccgacattatcacaggttcactcgccgctcgtgacctctcctagcgctaacttaaagtctccacagacgccttcgcagatggtgcccctgccgagcgcgaacccgccaggacctctgaaaagccctcaagtgcttggtagttcattgagcgtccggtctccgacaggcagtccttcccgcctcaagtcgccatcaatggcagtgccatcccccggttgggtggccagcccaaagacagccatgccatctccaggggtgtcacaaaataaacagccacctctgaacatgaatagctcgaccaccctctctaacatggagcaggggactcttccaccaagtggacccaggagctcatctagtgccccccccgcaaatcccccctctggcttgatgaacccaagcctcccattcaccagcagccctgaccccactccttcccagaatccactgagtttgatgatgacacagatgtccaagtacgctatgccatcatctaccccgctgtatcacaacgcaatcaagacgattgccacatcggatgacgagctcctacctgaccgtccactcctgcccccccccccacccccacagggctctggtcccggcattagtaactcccagccaagccaaatgcacctgaactccgcggctgctcagtctcccatggggatgaatctaccaggccaacagcctctgagccacgagccgccaccggccatgctgcccagcccaacaccactgggaagcaacattccactgcatcctaacgcccaaggaaccgggggaccaccccagaactctatgatgatggcccctggaggacctgattcgctgaacgcaccttgcgggcctgtcccatcctcatcacagatgatgcctttccccccacgcctacagcaaccccatggagctatggcacccactggcggtggtggagggggacctgggctacagcaacattatccctcagggatggcacttcccccagaagacctacctaaccagcccccgggtcctatgccaccacagcaacacctcatgggaaaggcaatggccgggcgcatgggtgacgcctatcctccaggggtgttgccaggcgtcgctagtgtgctgaacgaccccgagctgtctgaggtgatccgacccaccccaacagggattccggaattcgatttgtctcgtattataccatccgagaaaccgagctcaaccctgcagtactttcctaagagtgagaaccagccccccaaagcacagccacccaacctacatctgatgaacctacaaaacatgatggccgaacaaacacctagcagacctcccaatctgcccggccagcagggagtgcagagaggactaaatatgagcatgtgccatcctggccagatgagcctcctaggtcggacaggcgtgcctccccaacaggggatggtcccccatggcctacaccagggggtcatgtctccacctcagggcctgatgacccagcagaattttatgttgatgaagcaacggggagttgggggtgaagtgtattctcaacctccgcatatgctcagtcctcagggctcattaatgggcccgcccccccaacaaaatctcatggtaagccatccattgcgccagaggagcgtgtcgctggacagtcagatgggatacttgcctgcccccgggggcatggcaaacctccctttttag

SEQ ID NO: 180267 - DNA, 4188 bp, synthetic construct
  misc_feature 1..4188: note = Description of Artificial Sequence: Synthetic coding sequence
  source 1..4188: mol_type = other DNA
atgcggatcctggccaacaagacccggctgccccacccccggcggcgcgaggcccccgggtcccctccattgtctccccgaggacactgtcctccagcccccgctaaaccaatgcaccctgaaaataagctgaccaaccacggcaaaaccgggaacggaggcgctcaatcccagcatcagaacgtcaaccaggggcccacctgtaacgtgggaagcaaaggcgtgggcgcgggcaatcacggtgccaaggcaaatcagatctcacccagcaactcttctctgaagaatccccaggcaggggttccccccttctcttcactcaaaggcaaggtaaaaagagatcggagtgtatccgtagacagcggggagcaaagagaagctggaacaccatctctggattcagaagctaaggaagtcgccccgcgctctaagcgcaggtgtgttctggaacgaaagcaaccctactccggagatgagtggtgtagcggaccagatagcgaggaggatgataaaccaatcggagctactcataactgcaacgttgctgatcccgctatggcagcccctcagttaggacccgggcaaactacccaattgccactgagtgagagcagtgttcctggcgcgcctcacggtccacctccaggtctgcgtcctgacgctcccgggggcggcggcggtggagggggcgttcctggcaaaccccccagccagttcgtttacgtgttcacaacacacctcgccaacaccgctgctgaagccgttctacagggacgcgccgactccatcctggcttaccatcagcaaaatgtgccgcgcgcaaagcttgaccaggcccccaaggttccccccacccccgagcctctgcccttgtccactccctcagccgggaccccccagagtcagcccccacctctgccccctcccccaccaccagcccccgggtcggcccctccagcgttaccacccgaagggcctccagaagattcttcccaggacttggcacccaactctgtaggcgcagcatctactggcggggggaccggcggaacccaccccaataccccaactgccacgacagctaacaatcctctgccaccagggggcgatccatcaagcgctccggggccagccctgctgggggaagccgccgctccaggaaacggccagagatcattagtggggtctgagggcctgtctaaggagcaactcgaacatcgtgagcgcagtctacagaccttacgggatatcgagagacttctcctccggagtggagagaccgagccttttctgaaagggcctcctggcggcgctggggaaggggggccccctgctcaggcacccccccctcctcagcagccccctacagccccgccttccggcctgaagaaatatgaggaaccacttcagagtatgatatctcagactcaatcccttggcggtccacccttggagcacgaggtgcccggacaccccccgggcggggacatgggacaacagatgaacatgatgattcagaggctcggccaggacagtctgacccccgaacaggtcgcatggcggaaactgcaggaagagtattacgaagagaagaggcggaaggaggagcagatcggcctccacggcagccggccgctccaagacatgatgggaatgggtggcatgatggtcagggggcccccacctccataccatagcaaaccaggcgaccagtggccgcctggtatgggagcgcaacttcggggaccaatggatgtccaagacccgatgcagctacggggaggcccgccattccctggccctaggttccctggcaatcaaatacagcgggtgcctggtttcggcggtatgcaatcaatgcccatggaagtgccgatgaatgctatgcaacggcctgtgaggcccggaatgggctggaccgaagatctccctcccatgggaggaccaagcaattttgcacagaacaccatgccatatcctggaggacagggtgaggcagaaagattcatgactcccagggtcagggaggaactgttgcgtcatcagctgcttgagaaacgcagtatggggatgcagcgcccattgggaatggcagggtctggcatgggccagtccatggagatggaacgaatgatgcaggcacaccggcagatggaccccgcaatgtttccaggccagatggccggtggcgagggcctcgccggcactcctatgggcatggaattcggaggggggcggggcctgctgagccctcctatggggcagtccggcttgcgggaggtggaccccccgatgggaccaggaaacctgaatatgaacatgaatgtgaatatgaatatgaatatgaacctgaacgtgcagatgacaccccaacagcagatgctgatgagccaaaaaatgcggggccctggcgatcttatgggtccccaggggctgagtccggaggaaatggcaagggttcgcgctcagaattcgtctggggtgatgggagggccgcaaaagatgcttatgccctcgcaatttcccaaccaaggccagcagggattctctggcgggcagggcccttaccaggcgatgagtcaggatatggggaatacccaggacatgttttctcctgaccaaagttcaatgcctatgtctaatgtggggacaactcgactgtcccatatgccactgccgcccgcctccaacccgcccggaactgtccactcagcacctaaccggggtctaggccgtaggccctccgacctgaccattagtataaatcagatggggagtcctggtatgggacacctgaaatctcccaccctgagccaagttcattcacctttggtcacatccccgtcagcaaacctgaaatcaccacagactccctcccagatggttcccctgcctagcgcaaacccacccggcccattgaagagcccgcaagtgctagggagctctctctcagtgcgcagccccaccggctcccctagtcggctaaagagcccaagtatggccgtgccctcaccaggctgggtagcctctcccaaaactgccatgccatcccccggcgtatctcagaacaaacagcctcctctgaacatgaattccagtactaccctgagcaacatggaacaaggtactttacctccgtctggccctagaagctcctcctcggctccccccgctaaccctccttccgggctcatgaatccatctctcccatttacatccagtccagatcctaccccatctcagaatcctctcagtctgatgatgacacagatgagcaaatatgctatgccgtccagcaccccactctatcataatgcaatcaagaccatcgctacctctgatgatgaactcttgcccgatcggcccctcttgccccccccccctccacctcagggatccgggccaggtatttcaaatagccagccctctcagatgcacctcaactcggcagctgcccaatccccgatggggatgaacttaccgggccagcagccactttcccatgagccccccccggcgatgctgccctcccccactcctctggggagcaacatccctctgcaccctaatgcacagggaaccggggggcctccccagaactcaatgatgatggctccgggaggacctgacagtctgaatgctccatgcgggcctgtcccttcctcttcccaaatgatgcccttcccacctcggctgcagcagccgcacggagccatggcgcctacaggagggggcggagggggcccaggactacagcagcactatccatccggcatggcgctgcctcctgaagacctgcccaatcagccgcctggacccatgccgcctcagcaacacctgatgggaaaagcaatggcaggcaggatgggcgacgcctatcccccgggcgttctgcccggggtggcttctgtgcttaatgatccggagctgagcgaagtcattcgacccacgcccaccgggatccctgagttcgacctctctcgaattattccatcagaattcttacgcacacggccattctcattctgtctgtatctgttaagaatcctgtccctgctaatgtggcttactcccttgcccccactacccgctggaggctggccaggaggccaagtccctgccggtgccgtcaaccgagcccttcgattctgtgccggtctgtgtgtatgctgcatttccgtgttctag

SEQ ID NO: 180268 - DNA, 4365 bp, synthetic construct
  misc_feature 1..4365: note = Description of Artificial Sequence: Synthetic coding sequence
  source 1..4365: mol_type = other DNA
atgcggatcctggccaacaagacccggctgccccacccccggcggcgcgaagcgcctgggtcacctccactaagtccaagagggcactgcccaccagctccggcaaaacccatgcatcctgaaaataagctcaccaaccatggtaaaacagggaacggaggggctcaaagccagcatcagaacgtcaaccagggcccaacttgtaacgtggggtccaaaggcgtgggcgccgggaaccacggggctaaggccaatcagatttccccctctaatagtagcctcaagaacccacaggccggagtacccccgtttagttctctgaagggtaaggtgaaacgagataggtcagtcagcgtggactctggggagcaacgtgaagctgggactccttcgcttgactccgaagcaaaggaagtcgctcccagatccaaacggagatgtgttctcgaacgaaagcagccctactcgggcgacgagtggtgcagtgggccggactcggaagaggacgacaaaccgattggcgccactcacaattgcaacgtagccgatccagccatggctgcgccacaactgggccccggccagaccacacaactccccctgtccgagtcctcagtgccaggagcgccacacggacccccaccaggcctaagacctgatgctccaggagggggcggaggcggggggggggtgcctggcaaaccaccgtctcaattcgtttacgtgttcaccacccacctagctaacacagcggcagaagcagtgctgcagggccgcgcagactccattctcgcatatcatcagcagaacgtcccccgcgctaagctggatcaggcacccaaggtgcctcctactccagagcccttgcctctttcaactccatccgccgggactcctcagtcccagccccctccacttccccctcccccacctccagccccaggatctgctcctcctgcccttcctcctgagggccccccagaggacagcagccaagatttggccccaaactctgtaggcgccgcaagcacgggggggggaacgggcggcacgcatcccaacaccccgacagcaaccaccgcgaacaatcccctccccccagggggggatccctccagcgcgccaggccctgcactcctcggcgaggccgccgcacccgggaatggccaaagaagtctggtggggtctgagggactgagcaaggagcaattggagcaccgcgagaggtcactgcagacacttagagacatcgagaggctactcctccggagcggtgaaacggaaccattcttgaaaggcccaccaggaggcgctggggagggagggccccccgctcaggctcctcctccccctcagcagcctccaacggcacctccttccgggttaaagaagtatgaggagccgctgcagtctatgatttctcaaacgcagtcccttggtggcccgcccctagagcacgaggtccctggccacccacctgggggcgacatggggcaacaaatgaacatgatgatacagaggttaggacaggatagtcttaccccggagcaagttgcttggagaaaactgcaagaggagtattacgaggagaagagaaggaaggaggagcaaattggcttacacggctcacgtccccttcaggacatgatggggatgggtggtatgatggtcagaggtcccccaccgccttaccacagcaaaccgggtgaccagtggccaccaggcatgggtgcacagcttcgcggccctatggacgtgcaggacccgatgcagcttaggggtggacccccattccccggaccacgcttccccggcaaccaaatccaacgcgtccccggcttcggcggtatgcagagcatgccaatggaggttcctatgaatgctatgcagagaccagtccgtcctgggatgggttggacagaggacctacctcccatgggggggccttctaatttcgcccaaaacactatgccctaccccgggggccagggcgaagcagaaaggttcatgaccccccgagtccgggaggagctgcttcgtcaccagttactggaaaagaggtccatgggtatgcagcgcccacttggaatggccggtagcggcatgggacagtctatggagatggagaggatgatgcaagcgcacaggcagatggatccagcgatgtttcctggacaaatggctggcggggagggactagctggtacccctatggggatggaatttggcggcggccgaggactgctgtcgcccccaatggggcagtcaggcctgcgggaggtcgatccacccatggggccaggaaacctgaacatgaacatgaacgttaatatgaacatgaacatgaatttaaacgtccagatgacaccgcaacaacagatgctcatgagccaaaagatgagggggccaggggatcttatgggaccccaggggctgagcccagaggagatggcacgagtgcgcgcacagaactccagtggtgtcatgggtggcccacaaaagatgctgatgccttcccaatttcctaatcagggccaacagggcttttctggggggcagggcccttatcaagccatgagccaagacatgggaaacacacaggacatgttttcccccgatcagtcaagcatgccaatgagcaatgtgggtacaacccgcctctctcacatgcctctccccccagctagtaacccccccggaaccgtgcattccgcccccaaccgaggtcttggtaggcgcccatcagatctaaccatttccattaatcagatgggatcaccgggcatgggacacctgaagtcccctactctttcacaggtccacagtcctctggtgactagcccgagcgccaatctgaagtctccacagaccccaagtcagatggtacctctgccatctgccaaccctcctggacctttgaaaagtcctcaggttcttggatcttcactcagcgtgaggtcacctacaggctccccgtccagacttaaaagcccttccatggcagttccctcccctgggtgggtagccagccccaaaactgccatgccttcaccaggggtaagccagaacaaacaacccccacttaacatgaactccagcacaaccctgtcaaatatggagcagggtactctgccaccttctggccctcggtctagcagctcggcacccccagccaatccacccagcggactgatgaatccaagcctgccattcaccagctctccagacccgaccccaagccagaacccactatccctcatgatgacccagatgagtaagtatgccatgccttcatcaactcctctgtatcacaacgcgatcaagacgatagctaccagcgatgacgagctcctgcccgatcgcccattactgccccctccgcctcctcctcagggttctggccccggaatcagcaatagtcagcctagtcagatgcatctgaactcggctgcggcccagagccccatgggtatgaatctgcccggacaacagccactatcacatgagcccccccccgccatgcttccgtcaccaacgcccctgggcagcaatatcccattacacccgaatgctcaaggcactgggggaccaccccagaattctatgatgatggctcccggcgggccagattcgctcaatgcaccatgtggccctgtgccttcaagttcacagatgatgcctttcccgccccgcctgcagcagcctcacggagctatgatggcggggagaatgggggacgcctacccaccaggagtgttgcctggagtggcctccgtccttaatgaccctgagctgtcggaggtgatcaggcctaccccaacgggcattcccgagttcgatctgtccagaataattcctagcgaaaaaccttcttccacgctccagtatttcccgaagtcagagaaccagcctcccaaggcccagccacctaatctccacctcatgaatctgcaaaacatgatggctgagcaaacgccgtcacgacctccgaatctccctggacagcagggtgttcaacggggactgaatatgtccatgtgccatccaggacagatgagcttgctgggaagaaccggagtccccccacagcaaggaatggttcctcatgggttgcaccagggagtcatgagccctccgcagggtctcatgacccagcagaactttatgctgatgaaacagaggggtgtggggggggaggtttactcccagcctccccatatgctgtctcctcagggctctctgatgggaccaccccctcaacaaaatttgatggtttctcatccccttcgtcagcgttcagtcagcctggattctcaaatggggtatctgccggccccaggaggtatggccaacctgccgttctag

SEQ ID NO: 180269 - DNA, 1401 bp, synthetic construct
  misc_feature 1..1401: note = Description of Artificial Sequence: Synthetic coding sequence
  source 1..1401: mol_type = other DNA
atgagcacccggagcgtgagcagcagcagctaccggcggatgttcggcgggcctggtacggcaagtagaccctccagttcccgaagctacgtgacaaccagtacccggacgtattccctgggaagtgcacttagaccctcgacgtctcggtccctgtatgccagttcacctggtggggtgtacgccaccagaagctcagccgtgcgtttgagatcatccgtccccggggtgaggttattacaggactctgttgatttcagtctcgcagatgccataaatactgagtttaagaacactcgtacgaatgagaaggtggagctccaagaactgaacgatcgcttcgccaattacatagataaggtgagatttctcgaacagcagaataaaatacttttggctgaactggagcaactgaagggacagggcaagagtcgtctgggcgatctttatgaagaggagatgagggaactgaggaggcaggtggatcagctcactaacgataaagcaagagtggaagtcgaaagagataatttggcggaagacataatgaggctgagggagaaactgcaggaagaaatgctgcagcgagaggaggcagagaacacgctgcagagcttcaggcaggatgtggacaatgcctccctggcaaggctcgatctcgagcgcaaggtggagagtctgcaggaggagatcgctttcctgaagaagctacacgaggaagagatccaggaactccaggctcagatccaagaacaacacgtacaaatcgatgtggacgtgagcaagcctgatttaaccgccgccctccgagacgtcaggcagcagtatgagtccgtagccgccaaaaacttacaggaggccgaagaatggtacaagtctaagtttgctgacctgagcgaggcggccaatcgcaacaatgatgcgctgaggcaagcaaaacaagaatcgactgagtatcgtcgacaggtgcaaagcctgacctgcgaagttgacgccctgaagggcacaaacgaatccttggagagacaaatgagagagatggaagagaactttgctgtggaggccgccaactatcaagatacgatcggccggctgcaggatgaaattcagaacatgaaagaggagatggccagacacctgagagaatatcaggacctcctgaatgtgaagatggcactggacatcgagatcgctacttaccgaaaattgctggaaggggaagagtccagaatttccctcccactgcctaacttttcgtctttgaatctgagagagacaaacctggattctctgcctcttgtggatacccattctaaacgcacattgctgattaagacagtggaaactcgagacggacaggtgatcaacgagacctctcaacaccatgatgatcttgagtag

SEQ ID NO: 180270 - DNA, 1302 bp, synthetic construct
  misc_feature 1..1302: note = Description of Artificial Sequence: Synthetic coding sequence
  source 1..1302: mol_type = other DNA
atggacaagctgaacaagatcaccgtgcccgccagccagaagctgcgtcagctgcagaagatggtccacgatataaagaacaatgagggaggcataatgaataagattaaaaaactcaaggtgaaggcgccacccagtgtacccagacgggattacgccagcgaaagtccagcagacgaggaggagcagtggtcagacgatttcgacagcgattacgagaatccagacgagcactcggatagtgaaatgtatgtgatgcccgccgaggagaacgctgacgattcatatgagccccctcctgttgagcaggagacgaggcccgtgcacccagctcttcccttcgcaaggggagaatatattgataaccggtcttcccagcggcactcccccccattttcaaagacccttccttcaaagcccagttggcctagtgaaaaggctaggctgacatctacactgcccgcgttgaccgccttacaaaaaccacaggtgcctccaaaacctaagggcttgcttgaggatgaggctgactacgtagtgcccgtcgaggacaacgacgagaattatatccacccaaccgaaagctcttccccacctcctgaaaagggacgaaactctggtgcatgggagaccaaaagcccacccccagctgcgccttcccctctgcctcgtgcaggcaaaaaaccgaccaccccattgaaaaccacaccagtggcttctcagcaaaatgcctcaagcgtttgtgaggaaaagcccattcccgcagaaaggcacagaggctccagccaccggcaggaagcagttcagagccctgtgttcccgcctgcacaaaagcaaattcatcagaaacccatccctctgccccgttttaccgaagggggcaatccaaccgtagacggcccacttccatctttctcgtctaacagtacgatatccgaacaggaagccggcgttttgtgtaagccatggtacgctggagcctgtgacaggaagagtgcagaagaagctctgcaccggagtaataaagacggcagctttttaatccggaagagctctgggcacgactccaaacaaccctataccctcgtggtgttttttaacaagcgggtctataacatacctgtgcgattcattgaagccactaaacagtatgccctgggtaggaagaagaacggcgaggagtacttcggctctgtggctgagatcattcgaaaccatcaacacagtccactcgtgctcatcgactcacagaataataccaaggattcaaccagattgaaatatgccgtgaaggtttcctag

SEQ ID NO: 180271 - DNA, 525 bp, synthetic construct
  misc_feature 1..525: note = Description of Artificial Sequence: Synthetic coding sequence
  source 1..525: mol_type = other DNA
atggacaagctgaacaagatcaccgtgcccgccagccagaagctgcgacaattacagaagatggttcacgatattaaaaataacgaaggcggtataatgaacaaaattaagaaactgaaggtaaaggcaccaccaagcgtaccaaggagagactacgcatccgagagcccagcagacgaggaagagcagtggtcagacgactttgattcagattacgagaatcctgacgagcacagtgactctgaaatgtatgttatgcctgcagaggaaaatgctgatgactcatatgagccccctcctgtggagcaagagacccgtccagtccatcccgcactcccgttcgcccgtggtgaatatatcatcttcctgtgcgatttactgaagcagcagaataacatgccctgggctgagcgaaaaatggtgaagtccactctcgaggtgctcctgaaatctagcggtattataaacattgtgctctggtttctgcttacagttcgtatcacccagaagattccccccgactag

SEQ ID NO: 180272 - DNA, 558 bp, synthetic construct
  misc_feature 1..558: note = Description of Artificial Sequence: Synthetic coding sequence
  source 1..558: mol_type = other DNA
atggacaagctgaacaagatcaccgtgcccgccagccagaagctgaggcaactacagaaaatggtgcatgatatcaaaaacaacgaggggggcatcatgaacaagatcaaaaagctgaaggtgaaggcacctccatctgtgcctcgaagagactacgcctctgaatcccctgcggacgaggaagagcagtggagcgacgatttcgacagcgattatgagaatccagacgaacactccgacagtgagatgtacgttatgcccgctgaagagaacgctgatgattcttatgagccccccccggtcgagcaggaaacgagaccagtgcaccccgctctgccttttgccaggggggaatacattgacaaccgcagcagccagcggcatagccctcctttttcaaagacactgccctctaagcccagttggccttcagaaaagtattttggatcagtcgccgaaattatacggaaccatcagcatagcccccttgtactcattgactcgcaaaataacacaaaggattcaacccggctgaagtacgccgttaaggtgtcctag

SEQ ID NO: 180273 - DNA, 204 bp, synthetic construct
  misc_feature 1..204: note = Description of Artificial Sequence: Synthetic coding sequence
  source 1..204: mol_type = other DNA
ctggacagctacagctgcctgctgcagctgcccaaccggatggacaaattgaacaaaattacagtgcctgctagccagaagctaaggcaactccagaagatggttcatgacattaagaataatgagggagggatcatgaataagataaagaaaactgctaccatgaaaatacaaatgtcgactcgcacccagcgctgtacatag

SEQ ID NO: 180274 - DNA, 1215 bp, synthetic construct
  misc_feature 1..1215: note = Description of Artificial Sequence: Synthetic coding sequence
  source 1..1215: mol_type = other DNA
atggacaagctgaacaagatcaccgtgcccgccagccagaagctgagacagttgcagaagatggttcatgacattaagaacaacgaaggaggaattatgaacaagattaaaaagctcaaggtgaaagctccaccttcagtgcctagacgtgactacgcatcagaatctccagccgatgaggaggagcagtggtcagacgacttcgactctgattacgaaaatcccgatgagcacagcgactccgaaatgtatgtgatgcccgcagaagagaatgctgatgatagctatgagcctccaccagtagaacaggagacgagacctgttcatcccgccctcccgttcgctaggggggagtacatcgataatcgatccagccagcgccattccccccccttctctaagactttgccaagcaaaccttcctggccgagcgaaaaggcacgacttacatccacgctgcctgccctcacggccttgcagaagcctcaggtcccacccaaacctaaaggcctgctggaggacgaggctgattatgttgtaccagtggaggataatgatgaaaattatatacatccgaccgagtcatcatcacctccccctgaaaaagcaccgatggttaacagatccactaagcccaactctagtacacctgcaagcccaccagggacagcatccggaaggaacagtggggcctgggagactaaatcccccccccctgctgcaccatcacctcttcccagagccggtaagaaacccactacccccttaaaaactactcccgtcgcctcacagcagaatgcttcatcagtgtgtgaggagaagcctatcccagccgagcgtcatagggggtcatcacacagacaggaagccgtgcaatcgccagtttttccacctgcccagaaacagatccaccagaaacctattcccctgcctcggttcaccgaaggcggaaaccccactgttgacggtccactcccatcattctcctccaactcaactatctccgaacaggaggccggcgttctctgcaaaccttggtatgctggtgcatgcgatcggaaaagcgctgaggaggctctacacaggagcaacaaatatttcggctccgtagctgagatcataaggaatcatcagcacagcccactggtgttgattgacagtcagaataacaccaaggatagcaccaggctgaaatacgctgttaaagtgagttag

SEQ ID NO: 180275 - DNA, 1266 bp, synthetic construct
  misc_feature 1..1266: note = Description of Artificial Sequence: Synthetic coding sequence
  source 1..1266: mol_type = other DNA
atggacaagctgaacaagatcaccgtgcccgccagccagaagctgagacagctgcagaaaatggtccacgacattaagaataacgaaggaggaattatgaacaagatcaagaagctcaaggtcaaagctccaccgtcagtgccccgcagggattacgcaagcgagagtcctgctgatgaggaggagcagtggagtgacgactttgacagtgattacgagaatcccgatgagcacagcgattccgaaatgtacgtgatgcccgcagaagagaatgcggacgattcttacgaacctcctcctgtcgaacaagagacacggccggtgcatcctgctctcccatttgcacggggcgagtacatcgataatcgctccagccaaaggcacagccctcccttctccaagacactcccatcaaaacctagttggccatccgagaaagctcgcttgacgagcactctgcctgctttgaccgctctgcagaagccacaggttccaccaaaacctaaaggactgctggaagatgaggcagattacgtggttccggtggaagataatgatgagaattacatccatccgacagagtcttcttctccgcccccagaaaaggcccctatggtaaaccggtccacaaagccgaattcaagtacacctgcatctcctcctggcaccgccagcgggaggaactccggcgcttgggagaccaagtccccacctccagctgcacctagccccctgccgcgggcgggcaaaaagcccacaacgccgcttaagaccaccccagttgcttcccaacagaacgcaagctcagtttgtgaagagaagcctattcccgccgaacgtcatcgtggatctagtcatcgccaggaagccgtacagagtccagtatttcccccagcacagaaacagatccatcagaaacctatccctttgccccggtttaccgagggcggcaacccgactgtggacgggcccctgccaagcttctctagcaattctactatctctgagcaagaggcaggcgtactctgtaaaccctggtatgctggcgcttgtgatagaaaaagcgccgaggaggctctgcacagatcgaacaaggacccccaaccccccctgccaagcaagcagtgggagacacggaagctgcagtacttcgggtccgtcgctgaaataatacggaatcaccagcacagccctctggtgctcatcgatagccagaataacacaaaagattccactcgcctgaagtatgctgttaaggtttcctag

SEQ ID NO: 180276 - DNA, 630 bp, synthetic construct
  misc_feature 1..630: note = Description of Artificial Sequence: Synthetic coding sequence
  source 1..630: mol_type = other DNA
atggacaagctgaacaagatcaccgtgcccgccagccagaagctgcggcagctacagaagatggtgcacgatattaaaaacaacgagggcgggattatgaataagattaagaaattgaaggtaaaagccccgccttcagttccacggcgggattacgcgagtgagtctcctgccgatgaggaagagcagtggtcagatgacttcgattccgattacgaaaatcccgatgagcattccgattcagagatgtacgttatgcccgcggaggagaatgcagacgacagttatgagcccccaccagtggaacaggagaccaggcctgtacaccccgctcttccctttgctcggggggagtacattgataatagaagctctcagaggcactctccacccttctccaagaccctgcccagcaagcccagctggccgtccgaaaaagcgagactgacgtcaaccctgcccgctttgaccgctttgcaaaagccccaggtaccacctaaacctaaaggactgctggaggacgaagccgactacgtggtgcctgtagaggacaacgacgagaactacatccaccccaccgagtctagtagccccccacctgaaaagggtaagaatcaacgccatcattag

SEQ ID NO: 180277 - DNA, 900 bp, synthetic construct
  misc_feature 1..900: note = Description of Artificial Sequence: Synthetic coding sequence
  source 1..900: mol_type = other DNA
atggacaagctgaacaagatcaccgtgcccgccagccagaagctgagacaactgcagaagatggtccacgatataaaaaataatgaaggcggaatcatgaacaagatcaagaagttgaaagtgaaagcgcctccaagcgttcccaggcgcgattacgccagcgagtcacccgctgacgaagaggagcaatggtccgacgactttgactcagattacgaaaaccccgacgaacattctgactctgaaatgtacgtgatgcccgccgaagagaatgccgacgacagctatgaaccaccacctgtggagcaggagaccagacctgtacatcctgcacttccattcgcacgaggcgagtatattggcaggaactctggcgcatgggagacaaagtcccctccacctgctgcgccgagtcctctaccccgggctggaaagaagcccacgaccccacttaaaactaccccggtggccagccaacagaacgcttccagcgtgtgcgaggaaaagccgatccccgccgaaaggcatagggggagttcccaccggcaagaggccgtccagtctccagtcttcccccccgcccagaaacagattcatcagaaacccataccacttcctagattcaccgaaggtggcaacccaacagttgatggaccactaccttctttcagctccaactccaccatttcagagcaagaggcaggagtgctgtgcaaaccttggtacgcgggggcctgcgaccggaagagcgcagaagaggcgttgcataggtccaacaaatatttcggttcggttgctgagattattaggaaccaccaacactctcccctggtcttaatcgattcacagaacaatacaaaagacagcactcgcctgaagtatgcagtgaaagtgagttag

SEQ ID NO: 180278 - DNA, 2358 bp, synthetic construct
  misc_feature 1..2358: note = Description of Artificial Sequence: Synthetic coding sequence
  source 1..2358: mol_type = other DNA
atgctgcccgccgcccccggcaagggcctgggcagccccgaccccgctccttgcggtcccgccccacccggtaatacaaaagacatcattatgatctatgaggaagatgctgaagagtgggccctctacctgactgaggtcttcctacacgtagtgaagagggaagccattttgctctacaggctggaaaatttttcatttagacacttggagctactgaatctcacatcatataagtgcaagttgctgattctgagtaactccctcttgcgcgatttaacaccaaagaaatgtcagttcctggagaaaattctgcattcccccaaaagcgtcgtcaccttactgtgcggggtgaaatcctccgatcagctgtacgaattgctcaacatttcccagagccgctgggagatcagcaccgaacaggagcctgaagactacatctcggttatacagagtattatatttaaggactccgaagattatttcgaggtcaatatccctaccgacctgagagctaaacactcaggggaaatctcagagcggaaagagattgaggaactgagtgaggcctctagaaacacgattccccttgcagtggtcctgcccaccgaaataccatgcgaaaatcctggtgaaatttttattatcctgcgcgatgaggtgatcggagacaccgtggaagtggagttcacctcctcaaataaacggattcggaccaggccggctctatggaacaagaaggtgtggtgcatgaaggctctggaattccctgccggcagcgttcatgtcaatgtatattgcgatggcattgtcaaagccactaccaagataaaatattaccccactgctaaggccaaagagtgtctgttccggatggctgactcaggtgagagcctctgtcaaaatagtattgaagagcttgacggagtcttaacgagcatcttcaagcacgagattccttactacgaatttcagtccctgcaaaccgagatttgttctcagaataagtacactcattttaaggagctgcccacacttctccactgtgctgctaagtttgggctgaagaatctggccatccacttactccagtgttctggggccacgtgggcatcaaagatgaaaaacatggaaggaagcgatcccgctcacatcgcagagcggcatggtcacaaggagctgaaaaaaatctttgaggacttctcaatccaggagatcgatataaacaatgaacaggagaacgattacgaggaagacattgcctctttcagcacctacatcccttccacacagaaccctgccttccaccacgaaagtcgtaagacgtacggccagtctgccgacggagcagaagccaacgaaatggaaggggaggggaaacagaatggctcaggcatggagacaaaacattcccccttggaagtcggcagcgagtcatccgaagatcagtacgatgatctgtacgttttcatcccaggagccgatcctgagaataatagccaggagcctcttatgtcaagtcgcccgcccctccctccgccgagaccagtcgccaacgcttttcagttggaacgaccccatttcacactgccaggcaccatggtcgaggggcagatggaaaggagccagaactggggacatcctggcgtcaggcaggagaccggtgacgaacctaagggagagaaagaaaaaaaagaggaggaaaaagaacaagaggaagaagaagatccatacactttcgcagaaatcgatgacagcgaatatgatatgatactggctaatctttcgatcaaaaagaagactggctcacggtcctttatcatcaatcggccgcccgccccaacacctaggccgacctccattccaccgaaggaagagaccaccccatatatagcccaggtgttccagcagaaaacagccaggcgacagagcgatgatgataaattctgcggtctaccaaagaagcaagatagagcgaggattgaatcacctgctttctccacactccgtgggtgtctgactgatggccaggaggaacttatcttgttacaggaaaaagtcaagaacggcaaaatgagcatggatgaagctctggagaagttcaagcactggcagatgggcaaatccggcttggaaatgattcagcaagagaagttacggcagttgcgcgactgtatcataggtaagagaccagaagaggagaatgtgtacaataagttgacaatcgttcaccaccctggaggaaaggagaccgctcataacgaaaataaattttacaacgtccacttcagcaacaagttgcccgcaaggccccaagtcgagaaggagtttggtttctgttgtaagaaggatcattag

SEQ ID NO: 180279 - DNA, 1959 bp, synthetic construct
  misc_feature 1..1959: note = Description of Artificial Sequence: Synthetic coding sequence
  source 1..1959: mol_type = other DNA
atgctgcccgccgcccccggcaagggcctgggcagccccgaccccgccccctgtggcccagcccccccagattcagaggattactttgaagtgaatattcccacagatctccgcgcaaaacatagcggagagatcagcgaacggaaggaaattgaggaactgagcgaggcatccaggaacactatcccactagcagtggtactgcctacagaaatcccatgcgagaaccccggagagatttttatcatcctacgggacgaggtgatcggcgatacagtggaggtcgaatttacttccagcaataagcggattcgcactaggccggccttgtggaataagaaggtgtggtgcatgaaagctctggagttccccgccggatcagtccacgttaatgtctactgtgatggaatcgtcaaggccactacgaagatcaaatactatcccactgcaaaggccaaagaatgcttattcagaatggctgattcgggggaatccctttgtcagaattccattgaggaacttgacggagtcctaaccagcatattcaagcatgaaattccatactatgagttccagagcctgcagacggaaatttgctcacagaacaagtacacacatttcaaagagctacccactctgttgcattgcgcagctaaatttgggctgaaaaacctggctatccatctcttacagtgttccggtgcgacatgggcctccaagatgaaaaatatggaggggtcagatcctgcgcacattgctgaacggcacggacacaaagagctgaaaaagatttttgaggatttctctatccaggaaatcgacattaataacgagcaggagaacgattatgaggaagacatcgcaagttttagcacctacattccctcgacacagaacccagccttccatcacgaaagtcggaaaacgtacggtcaatctgctgatggcgccgaagccaacgaaatggagggagaaggaaaacagaacggctccggaatggagacaaagcacagtcctttagaagtggggtctgagagctctgaagatcagtacgatgacctgtacgtatttataccaggtgctgatcccgagaataacagccaggagcctcttatgtcaagtagacctcccctgccccccccacgccccgtggccaatgcattccagttagagcggcctcacttcacccttcctggcacaatggtggagggccagatggagagatcacagaactggggacatccaggcgtaagacaggaaactggtgacgagccgaaaggcgagaaggagaagaaggaagaggagaaggagcaagaggaggaggaagacccctacacgttcgccgagatcgatgacagtgagtatgatatgatcctagccaacctcagtataaaaaagaagacagggtcgcggtcctttatcatcaatcgaccgccagcacctaccccacgcccaacatcgattccacctaaggaggagactactccctacatcgcgcaagtctttcagcagaagacagccaggagacagtcagacgatgacaagttctgtgggttgccaaagaaacaggaccgcgcccgaatcgagtctcccgcctttagtaccctgagggggtgtctcacagacggacaggaggagctcatcctgctgcaggaaaaggttaagaatgggaagatgtccatggatgaagccctggagaagtttaagcattggcagatgggaaagtcgggccttgaaatgatccaacaggagaaattgagacagttgcgggattgcatcatcgggaaacgacccgaggaagagaatgtctataacaaactgaccatcgttcatcatcctgggggaaaagagactgcccataatgagaacaagttttacaatgtgcacttctccaacaaactgccagctcgcccccaggtggaaaaggaattcggcttctgttgcaagaaggaccactag

SEQ ID NO: 180280 - DNA, 2268 bp, synthetic construct
  misc_feature 1..2268: note = Description of Artificial Sequence: Synthetic coding sequence
  source 1..2268: mol_type = other DNA
atgatctacgaggaggacgccgaggagtgggccctgtacctgaccgaagtcttcctgcatgtcgtgaaacgcgaagctatcttactgtaccggcttgagaatttctccttccggcacctggaacttctcaacctgacatcttataagtgtaagctgcttattctgtcgaattcactcttgagagacttgaccccaaagaagtgtcagtttctagagaagatcttgcacagccctaaatctgtggtgactctgctatgtggagtaaaatccagtgaccagttgtatgagctccttaatatcagccagagccgctgggaaataagtaccgagcaggagcctgaagactacatctctgttatacaatctatcatctttaaggattctgaagattatttcgaggtcaacatacccactgatctccgggcaaagcatagcggcgaaatctccgagcgcaaagagattgaggagcttagcgaagcaagcagaaacaccattccccttgccgtcgtgctgcctacagaaataccttgcgagaatcctggcgagatttttattattctgagagatgaagtgatcggtgacacagtggaggtagaatttacctcgtcaaacaagagaattagaaccagaccagcactgtggaacaaaaaggtctggtgcatgaaggcactggagtttcctgctggctcagttcacgttaacgtctactgcgatggaattgtgaaagccacgactaagattaagtattaccccaccgccaaagccaaagagtgtctctttagaatggccgatagtggagaatccctttgtcaaaattcaattgaggagctggacggcgtgctcaccagcatcttcaagcacgagattccgtactacgagttccaatccctgcagactgagatttgttcccagaataagtacacccattttaaggaactgccgactcttcttcactgcgccgcaaaattcggcctcaaaaatcttgcaatccacctcctacaatgttccggagccacatgggcctcgaagatgaaaaacatggagggaagcgatcctgcccatatcgcggaaagacatggtcataaggaactgaagaaaattttcgaggatttctctatccaagaaattgacattaataacgagcaggaaaacgattatgaggaagatatcgcttccttttccacttacatccccagcacacaaaacccagcgtttcatcacgagtctagaaaaacatacggacaatcggctgatggggctgaagctaacgagatggagggcgagggcaagcaaaacggatcaggcatggagacaaagcactcacccctggaggtgggcagcgagtcaagcgaggaccagtacgatgacttgtacgtgttcatccctggagccgatcccgagaataatagccaagaaccactgatgtctagcagacctccccttccaccaccccggcctgtcgccaacgcgttccagctggagcgaccccatttcacactccctggtactatggtagagggacaaatggaacgtagtcagaactggggccacccgggagtaagacaggaaaccggcgatgagcccaagggcgaaaaagagaagaaggaggaagaaaaagagcaggaggaggaagaggacccttacaccttcgccgaaatcgatgattctgagtacgatatgatcttggcgaatttgtccataaaaaaaaaaactggcagtagaagttttattatcaatcgtccacccgcccccaccccaagacccacgagtatccctccgaaggaagagaccaccccgtacatcgctcaggtctttcagcagaaaacggcccgccgccagtccgacgacgataaattctgcggccttccgaaaaagcaagacagagctcgaattgagtctccagctttttccacacttcggggatgcctcaccgacggccaggaggaattgattttactccaggagaaagtgaagaatgggaagatgtcgatggacgaggccctggagaagtttaagcactggcagatgggtaaaagtggcctggagatgatccagcaagaaaagttacggcagcttcgcgattgtatcattgggaaacgtcctgaggaggaaaacgtgtataacaagttgacaatcgtccaccatcccggaggcaaggagactgcgcataacgaaaataaattttataatgtccatttcagtaacaagcttcccgctaggccccaggtggagaaagaatttggcttttgctgtaaaaaagatcactag

SEQ ID NO: 180281 - DNA, 2313 bp, synthetic construct
  misc_feature 1..2313: note = Description of Artificial Sequence: Synthetic coding sequence
  source 1..2313: mol_type = other DNA
atggtgaactgccacctgaagatcggcaacaccaaggacatcatcatgatctacgaagaggacgctgaggagtgggcactatatctgaccgaggtctttcttcatgttgtcaagcgagaagcaattctcctgtatagacttgagaacttctcttttcgccacctggaactgctgaaccttactagttacaaatgcaagctgctgatcctaagtaactcgcttctgcgtgatctgacgcctaaaaagtgtcagtttcttgaaaaaatattgcatagccctaagagcgttgtgacactgttatgcggggtcaagtcctccgatcagctgtacgagctgttgaatatttcacaatcaagatgggaaattagcactgagcaggaaccagaagactacatcagcgtaatacagtccattatctttaaggattcagaggattattttgaggtgaatatcccaaccgacctccgggctaagcactcgggggagatatcagagcgcaaggaaattgaggagctgagcgaggctagcaggaacaccattccactagccgtggtgctcccaacggagattccatgtgagaatcccggagaaattttcatcatcctgcgcgatgaggtcatcggggacactgtggaagtggagtttacatcttcaaacaaacgaatcaggacaaggcccgctttatggaacaagaaggtctggtgtatgaaggctctggaattccctgccgggtcagtccacgtgaatgtgtactgtgatggtattgtcaaagcgaccactaaaattaagtattacccaaccgctaaagccaaggagtgcctgttccggatggcagactctggcgagagcctctgccagaatagtatagaggaactggacggcgtgttaacatccatctttaagcacgagattccatattatgagtttcagtccctgcaaaccgagatctgctctcagaataaatatacccacttcaaggaactcccaacgttactgcactgcgccgcgaaattcggcctgaaaaatctagccatacatctgcttcaatgtagtggggctacctgggcctccaaaatgaagaatatggaggggtcggatccagcccacatcgcagagcggcacggccacaaggagctgaagaaaatattcgaggattttagtattcaagagatcgatatcaacaacgagcaggagaacgactacgaggaggatattgcctcttttagtacatatatcccgtctacccaaaatcctgcgttccaccatgagagccgaaaaacgtacggacagtctgccgatggcgcggaggctaacgagatggaaggcgagggcaaacaaaacggttctggaatggagacaaaacatagcccccttgaagtgggatctgaatcttctgaggaccagtatgacgacctgtacgtgtttatccctggcgctgaccccgaaaataactcacaggaacctcttatgagctctaggcctcccctgccacccccgcgcccagttgctaacgcattccagctggagaggccccacttcacattaccagggaccatggtggaaggtcagatggagcggtcccaaaattggggacatccgggtgtgagacaagagactggagatgaaccgaaaggcgaaaaggaaaaaaaggaggaagaaaaagagcaggaggaggaagaggatccatacacttttgctgagatcgacgactcagaatatgacatgatcctggctaacctgtccatcaaaaagaagactggctcccgctcgttcataataaatagaccgccggcccccacaccacgccccacttcgatccctcccaaggaggaaaccaccccgtacatcgcccaggtgttccagcaaaaaaccgcacggcggcaatctgacgatgacaagttttgtggcctgcctaagaagcaagatcgagctcggattgaatcgccggcgttttccaccttaagagggtgcctgaccgatggccaggaggaacttattctcctgcaggaaaaggtgaagaacggcaagatgtcaatggacgaggcattagaaaagttcaagcattggcagatgggtaagagcggactggagatgatccaacaggagaagctgcggcaattacgagactgtattatcggcaaacgcccggaagaggaaaatgtatacaataaattaacaatcgttcaccaccccgggggcaaggaaacagcgcataacgaaaacaagttctataacgtgcacttctccaacaaactgccagcacggccacaggtggagaaggaatttgggttttgctgtaagaaggatcactag

SEQ ID NO: 180282 - DNA, 1959 bp, synthetic construct
  misc_feature 1..1959: note = Description of Artificial Sequence: Synthetic coding sequence
  source 1..1959: mol_type = other DNA
atgctgcccgccgcccccggcaagggcctgggcagccccgaccccgcaccctgcggtcctgccccccctgactctgaggactactttgaagtcaatattcccacggatctaagggctaagcattcaggggaaatatccgagcgcaaggagattgaagagcttagcgaggcttccaggaacactatccctttagctgtggtgctcccaacagaaattccctgtgagaacccaggtgaaatattcattatacttcgcgatgaggttatcggtgataccgtcgaggttgagtttactagctcaaataaacgtatccgcacccggcctgccctctggaataaaaaagtttggtgtatgaaagcactcgaattccccgctggatctgtacacgttaatgtgtattgcgacggcattgtaaaggctactaccaaaattaaatactaccccaccgctaaggctaaagagtgtttattcaggatggcagatagtggagagtctctttgtcagaatagtatagaggagctggatggcgtgttaacctctattttcaagcacgagatcccgtactatgaattccagtcactgcagactgagatatgctctcaaaacaagtacacacacttcaaggaactacccacgcttttacattgcgccgcgaagtttggacttaagaatctggcgatacacctgttgcaatgcagtggcgccacgtgggctagcaagatgaaaaatatggagggctccgaccccgcacacattgctgaacgccacgggcacaaggagctgaaaaaaatatttgaagacttttcgatacaggagatcgacattaacaacgagcaggagaacgactacgaagaggatatcgcgtccttcagcacctatatccctagcactcaaaatcctgccttccatcatgaaagtagaaaaacctacggccagtcagctgacggcgctgaggcaaacgagatggagggcgaaggtaagcaaaacggatctggtatggagacaaagcatagcccattggaagtcgggtccgagagcagcgaggaccagtatgacgacctttatgtattcattcccggggcggatccagagaataactcacaggaaccacttatgagctcacgacccccactgcctcctcctagaccggtagcaaatgcgtttcaattggaacgtccacattttacccttcctggcaccatggtagagggtcagatggaacggtcccagaactggggacatccgggcgtcagacaggaaactggggacgagccaaaaggggagaaagagaaaaaggaggaggagaaagagcaggaggaagaggaggatccatacacatttgcagagatcgatgactccgaatatgatatgatcttggctaatctgtctatcaagaaaaaaacaggaagcaggtccttcataataaaccggccaccagctcccaccccacgcccaacaagcatccctcctaaggaagagacaacaccctatatcgcacaggtgtttcaacaaaaaaccgcaaggcggcagagcgacgacgacaaattctgtggcctgcctaagaagcaggacagggcacggatagagagccccgctttttcaacactgcgaggatgcctgactgatggccaggaagagctgattctactccaggagaaggtgaaaaatggaaagatgagtatggacgaggccctggaaaaattcaaacattggcaaatgggcaagtccggcctcgagatgatccagcaggaaaaactgaggcagctgcgggattgcattatcgggaagcgtcccgaagaagagaatgtttataacaagctgaccatcgttcatcaccccgggggtaaggaaactgctcacaatgagaacaagttctacaacgtgcatttttccaacaagctccccgctagaccgcaggtggagaaggaattcggcttctgttgtaaaaaagatcattag

SEQ ID NO: 180283 - DNA, 516 bp, synthetic construct
  misc_feature 1..516: note = Description of Artificial Sequence: Synthetic coding sequence
  source 1..516: mol_type = other DNA
atgcaccccttctacacccgggccgccaccatgatcggcgagatcgccgccgctgtttcctttattagcaagttcctgaggaccaaggggctcactagtgagcgccaactccagacatttagtcagagcctgcaggaattactggccgagcattataaacatcactggttccccgaaaaaccttgtaaaggctccggttatcggtgcatccggatcaaccacaaaatggatccccttattggacaggctgcccagcgcatcgggctcagctctcaggagctgtttaggctgctgccaagcgagttaactctgtgggttgacccctacgaggtgtcatacagaataggggaggatggctcaatatgcgttctgtacgaagcatctccagctggaggaagtacgcaaaattccactaacgtgcagatggttgacagtcgcatctcttgtaaagaggagttgctcctcggccgcacatccccatccaaaaattacaatatgatgaccgtatccggctag

SEQ ID NO: 180284 - DNA, 672 bp, synthetic construct
  misc_feature 1..672: note = Description of Artificial Sequence: Synthetic coding sequence
  source 1..672: mol_type = other DNA
atgcgggacgagatcgccaccaccgtgttcttcgtgacccggctggtcaaaaaacacgataaactgagcaaacagcagatcgaggacttcgctgagaagctgatgaccattctcttcgagacctatagatcacactggcacagcgactgcccaagtaagggacaggccttccgttgcatacgcattaacaacaatcaaaacaaggatcccattttggagcgggcatgtgtagagagcaacgtggacttcagccatcttggtctgccaaaagagatgaccatctgggtcgaccctttcgaagtgtgttgccgatacggtgagaagaatcatccgttcactgtcgccagcttcaaggggcggtgggaggagtgggaattatatcagcagatcagttatgccgtaagtcgggcttccagtgacgtgtcttccggaacgtcctgcgacgaagaaagctgtagcaaggaaccccgagtgatccctaaagtatccaatccgaagtccatctatcaggtggaaaacctgaaacagcctttccagtcttggctgcagatccctcgaaagaagaatgttgtggatgggcgagtggggttactgggaaatacttaccacggaagtcagaagcatccgaaatgctaccgaccagcgatgcacaggcttgacaggatactgtag

SEQ ID NO: 180285 - DNA, 483 bp, synthetic construct
  misc_feature 1..483: note = Description of Artificial Sequence: Synthetic coding sequence
  source 1..483: mol_type = other DNA
atgcgggacgagatcgccaccaccgtgttcttcgtgacccggctggtgaagaagcacgacaagctaagcaagcagcagatagaagattttgcggaaaaacttatgaccatactgtttgagacctatagatcccactggcactctgattgcccctccaaaggacaagcgtttcgatgtatcaggatcaacaataaccaaaataaagaccccatcctggagagggcctgtgtagaatctaacgtggactttagccatttaggtctacctaaagaaatgaccatatgggtggacccctttgaagtgtgctgtaggtacggcgagaaaaatcatccctttactgtggcatcatttaaggggcggtgggaggaatgggagctgtaccagcagatttcctatgcagtctcgcgtgcaagctccgacgtcagtagtggaacatcctgcgacgaagagagctgtagtaaggagccaagggtgattccatag

SEQ ID NO: 180286 - DNA, 1188 bp, synthetic construct
  misc_feature 1..1188: note = Description of Artificial Sequence: Synthetic coding sequence
  source 1..1188: mol_type = other DNA
atgagcctggtggacctgggcaagaagctgctggaggccgcccgggccggtcaggatgacgaagtgcgcatcctgatggcaaacggggctccattcacaacagactggctgggcacttcaccactccacttagctgcccagtacggacattatagtaccactgaggtgcttcttcgggcgggtgtgtctcgagacgctagaaccaaagtggacaggactcccctgcatatggccgcaagcgaaggacacgcatctatcgtggaggtgttgctgaagcacggggccgatgttaatgccaaagatatgctgaaaatgactgcgcttcactgggcgaccgagcataaccatcaagaggtggtggaactcctgatcaaatatggggcggatgttcacacccagtctaagttctgcaaaactgcattcgatatctcaattgataatggaaacgaggacctggccgaaatcctgcagatcgcaatgcagaaccagatcaacacaaacccggaatctccggacactgtcaccatccacgccgctacgcctcagtttataatcgggccaggtggcgtggttaatttaacaggcctggtgtcgagcgagaattcatcaaaagctaccgatgagacgggcgtctccgccgtccagtttgggaatagctctacatccgtgctggcaactcttgctgctctggctgaagcatctgcgcccctctctaacagtagcgaaacacccgttgttgccaccgaggaggttgtcaccgccgagtcagtcgacggggctatccaacaggtggtgtcaagcgggggccagcaggtaatcaccatagtgacggatggtattcagctggggaatttacattcaattcccaccagtggcatcggacagcccataatcgtgacaatgccggatgggcagcaggtattaaccgtgcccgccactgacatcgccgaagaaacggtgatttccgaagagccccctgccaaaagacagtgtattgagattatagaaaaccgagtggaatctgccgagattgaagaacgggaggctttgcaaaagcagctcgatgaggcgaatcgggaggcgcagaaatataggcagcaactcctcaagaaggaacaagaggcagaggcctatcggcagaaattagaggcaatgactcggttgcagaccaataaagaagccgtctag

SEQ ID NO: 180287 - DNA, 555 bp, synthetic construct
  misc_feature 1..555: note = Description of Artificial Sequence: Synthetic coding sequence
  source 1..555: mol_type = other DNA
atggagcccagccagtgcgtggaggagctggaggacgacgtgttccagccagaggacggagagcctgtgacccaacctgggtccttgctcagcgctgatctgttcgcccagtccctgcttgactgcccactgtcaagactgcagctctttcctctgacccactgctgtgggcctggacttagacctacgtctcaggaagataaagccactcagaccctcagtcccgctagcccttcccagggcgtgatgctcccgtgcggagttactgaggaaccccaacggctcttctatggaaacgcaggctaccggctgccgctgcccgcaagcttccctgcggtccttcccatcggcgaacaaccaccggaaggacagtggcagcaccaagcagaagtgcagatcgcccggaagctgcaatgtatcgcagatcaattccatcgattacacgtgcaacaacatcagcaaaaccagaatagggtgtggtggcagatcctgttatttctccataatctggctctcaacggggaggaaaaccgaaacggcgccggacctcgctag

SEQ ID NO: 180288 - DNA, 555 bp, synthetic construct
  misc_feature 1..555: note = Description of Artificial Sequence: Synthetic coding sequence
  source 1..555: mol_type = other DNA
atggagcccagccagtgcgtggaggagctggaggacgacgtgttccagcctgaagatggagagcccgtgactcagcccggttccttgctgtctgctgatttattcgcacagtcactacttgattgcccactgtcacgactgcagctgttcccattgacccattgctgcggacccgggctgaggccaacctctcaggaagataaggctacgcaaactttatcccccgctagtcctagccagggcgtaatgctcccctgtggcgtgacagaggaacctcagaggctattctatggaaacgcagggtacaggttgccattacctgcctctttccccgctgttctgcccattggggaacagcctcccgaaggacagtggcagcatcaggctgaagtgcagatagctcgcaaattacaatgcatcgcagaccagttccaccgactccatgtccagcagcaccagcagaatcaaaaccgcgtctggtggcaaatcctgctctttctgcacaatcttgctctgaacggagaggaaaatagaaacggagcaggcccccggtag

SEQ ID NO: 180289 - DNA, 492 bp, synthetic construct
  misc_feature 1..492: note = Description of Artificial Sequence: Synthetic coding sequence
  source 1..492: mol_type = other DNA
atggagcccagccagtgcgtggaggagctggaggacgacgtgttccagccagaagacggggagcctgtgacccaacccggatccctcctgagtgccgacttattcgcacagtcgttgctggactgtcccctgagccgcttacagctcttccccctcacacactgttgcggcccggggttgagacctacatcacaggaagataaagcaactcaaacactgtccccagccagcccatcacagggggtcatgctcccttgcggagtgacagaggagccccaacgtctgttttacggcaatgccggctaccggctgccactccctgctagttttccggccgttctgcccattggagagcagccacccgaaggacaatggcagcaccaggcggagcaccagcagaaccagaatagagtatggtggcagatccttctttttctccacaacctcgccttgaacggagaggagaatagaaatggggcaggacctaggtag

SEQ ID NO: 180290 - DNA, 186 bp, synthetic construct
  misc_feature 1..186: note = Description of Artificial Sequence: Synthetic coding sequence
  source 1..186: mol_type = other DNA
atggagcccagccagtgcgtggaggagctggaggacgacgtgttccagcccgaggatggggaacccgtgacacagcctgggtccctgctgtcagcagacctgtttgcacagagcctattagactgtccactctctcgcctgcaactgtttcctttgacacactgctgtgggcctgggttaagatag

SEQ ID NO: 180291 - DNA, 390 bp, synthetic construct
  misc_feature 1..390: note = Description of Artificial Sequence: Synthetic coding sequence
  source 1..390: mol_type = other DNA
atggagcccagccagtgcgtggaggagctggaggacgacgtgttccagcccgaggacggtgaacctgtgactcagcccgggagcctgctttcagcagacctcttcgcccaatcccttctggattgtcccctttcccgactgcagttgttccccttaacccattgctgtgggcctgggctgcggccaacaagccaagaggataaagcaacacaaactctcagccctgctagcccaagccaaggtgttatgttaccctgcggcgtgacagaagagcctcaaaggttattctatgcacccgccgaacccaaatcatgtgtagttgcagatcctcccctcccagcacagccttgtttcgagtggcggagggagcaggaacgcggcaggccatag

SEQ ID NO: 180292 - DNA, 42 bp, synthetic construct; identical to SEQ ID NO: 74098
  misc_feature 1..42: note = Description of Artificial Sequence: Synthetic coding sequence
  source 1..42: mol_type = other DNA

SEQ ID NO: 180293 - DNA, 555 bp, synthetic construct
  misc_feature 1..555: note = Description of Artificial Sequence: Synthetic coding sequence
  source 1..555: mol_type = other DNA
atggagcccagccagtgcgtggaggagctggaggacgacgtgttccagcctgaagatggagaacctgtgacacagccaggatctctcctttccgccgacctttttgctcagtcactcttggattgtcccctcagtaggctgcagttgtttcctcttacacattgttgcggaccaggcttgagacctacaagtcaggaagataaggctacccagactctgtcccctgcctcaccttcgcaaggggtaatgctcccgtgcggcgtgacggaggaaccacaaaggttattctacggaaatgctggctataggctcccgctgcctgcttctttccccgctgtgctacctataggagagcaacccccagaaggacaatggcaacatcaagctgaagtgcagattgcaaggaaactccagtgtatcgccgaccaattccataggctacacgtccagcagcaccagcagaatcaaaaccgagtttggtggcagatactactgtttctgcataacctggcacttaacggcgaggaaaaccgaaacggtgctggtccccgctag

SEQ ID NO: 180294 - DNA, 555 bp, synthetic construct
  misc_feature 1..555: note = Description of Artificial Sequence: Synthetic coding sequence
  source 1..555: mol_type = other DNA
atggagcccagccagtgcgtggaggagctggaggacgacgtgttccaacctgaagatggggagccggttactcaacccgggtctctgttatcagccgacttattcgcacagtcgttattagattgtccactgtcccggcttcaactgttccccctgacacactgctgcgggcccggtcttagacctactagtcaggaagataaagcaacccagacactgtccccagcctccccgagtcagggagttatgctgccttgcggagtgaccgaagaaccccagcggttgttttatggcaacgctggatataggctgccattgccagcttcttttcccgccgtgctgcctatcggggagcagccacctgaaggccaatggcagcatcaggccgaagttcagatcgcccgcaagttgcaatgtatagctgaccagttccatcgcctccacgtgcagcagcatcagcagaaccagaatagggtgtggtggcagattctgctgttcctccacaatcttgcgctgaatggagaagagaacaggaatggcgcgggacccagatag

SEQ ID NO: 180295 - DNA, 585 bp, synthetic construct
  misc_feature 1..585: note = Description of Artificial Sequence: Synthetic coding sequence
  source 1..585: mol_type = other DNA
atgagccagaacggcgcccccggcatgcaggaggagagcctgcagggatcgtgggtcgagttacacttcagcaacaacggtaacggcggcagtgtgccagcgagcgtgtcgatctacaacggagatatggagaagattttgcttgatgcccagcatgagtccggaagatctagcagtaagtcttcacactgcgacagtccgccacgctcacaaaccccacaggatactaaccgcgcatctgagactgacacccattctattggagagaaaaattcaagtcagtcagaggaggacgatatagaaagaaggaaagaagtagagagcatccttaaaaaaaactcagactggatttgggactggtcatcccggcccgagaatattcccccaaaggaattcctattcaagcaccctaaacggaccgcaaccctcagtatgcggaacacaagcgtcatgaagaaaggtggtatcttttcagcagaattcttaaaagtgtttctcccatcactgctgctcagtcatctgctggcaattggcctgggtatatacatcggccgtcggcttacaacatccacctctacgttttag

SEQ ID NO: 180296 - DNA, 543 bp, synthetic construct
  misc_feature 1..543: note = Description of Artificial Sequence: Synthetic coding sequence
  source 1..543: mol_type = other DNA
atgagccagaacggcgcccccggcatgcaggaggagagcctgcagggttcttgggttgagctacacttcagcaataatggaaacggaggatcagttcccgcctccgtctccatctacaacggagatatggaaaagattctcctggacgcacaacacgaaagtggacgctcaagcagcaaatcttctcactgtgactctccccctagatcgcagaccccacaggacaccaatagggcgtctgagaccgatactcatagcattggagaaaagaattctagccagtctgaggaagatgacattgagcgccgtaaggaagtcgagagcattttaaaaaagaacagtgactggatctgggactggagctccaggcccgaaaatatcccacctaaagagttcctgtttaaacatccaaagagaactgctactctgtctatgcggaacacatctgtcatgaagaaggggggtattttcagtgcagagtttctgaaagtattcctccctagtttactcctatctcacctccttgcaattggactgggatag

SEQ ID NO: 180297 - DNA, 1071 bp, synthetic construct
  misc_feature 1..1071: note = Description of Artificial Sequence: Synthetic coding sequence
  source 1..1071: mol_type = other DNA
atgagccggcccctgctgatcaccttcacccccgccaccgaccccagcgacttatggaaggatggccagcagcagccccagcccgagaagcctgagtctaccctcgatggtgcagccgccctggctttctatgaagctcttatcggggacgaatcctccgcccccgattctcaacgatctcaaaccgaacccgctagggagaggaaacgaaaaaaacggcggatcatgaaggccccagctgcagaagccgtggctgagggcgctagtggtcgacacgggcaagggcgatccctcgaggcggaagataaaatgacccacagaatactcagggctgcgcaggaaggcgacctccctgagctgcgaaggctgctcgagccacatgaagccggcggtgcaggcggcaacattaacgccagggacgccttttggtggactcccctgatgtgcgctgcgcgtgctgggcagggcgccgcagtgtcctatttactgggccgtggcgctgcctgggtcggcgtctgcgaactgtccggaagggacgctgctcagttagcagaagaagctggtttccccgaggtcgctcggatggtccgagaaagtcatggagagacccggtcccccgagaataggtcccctacacccagccttcagtattgtgagaactgtgacacccatttccaagattctaatcatcgcacgagtaccgcccatctgttgtcacttagccaaggacctcagccacctaacctcccgttgggtgtgccaatctcatctccaggtttcaagctcctcttaaggggaggatgggagcctggcatgggcctgggaccgcgtggggagggacgagcaaatcccatcccgacagtgctcaaaagagaccaagagggtcttggctatcggtctgcgccccaaccacgtgttacacactttcctgcctgggacacacgggccgtggccggaagagagaggccccctagggtggccacactgtcctggagagaggagaggcgtagagaggaaaaggaccgagcctgggagcgggacctccggacctatatgaaccttgaattttag

SEQ ID NO: 180298 - DNA, 3399 bp, synthetic construct
  misc_feature 1..3399: note = Description of Artificial Sequence: Synthetic coding sequence
  source 1..3399: mol_type = other DNA
atggagcccaacgacagcaccagcaccgccgtggaggagcccgactccctggaagtcctggtgaaaactctcgactcgcagacacgtactttcattgtgggcgctcagatgaatgtgaaagagtttaaggaacacatcgcagcatccgtctcaatccctagtgaaaaacaacgactgatctatcaggggcgagtgctgcaggacgataaaaagttacaggagtacaatgtggggggcaaggtcatccacctcgttgagcgggccccaccacagactcatctgccgtccggagcctctagcggtaccggctccgcttcagcaactcatgggggggggtctccaccagggacacggggacctggggctagcgtccatgaccgcaatgcaaattcttacgtgatggtcggcacgttcaatctgccctctgacggctcagcagtggatgtgcatataaatatggaacaggctcctatccagtctgagccccgcgtgcgtctcgttatggcccagcacatgattcgcgacatccagactctgctgtcccggatggagacgctaccctatctccagtgtagaggaggcccccagcctcagcattcccaacccccccctcagcctcctgccgtgacgccagaacccgtggctttatccagccagacgtctgaacctgtggaatccgaagcccctcccagggagcccatggaagccgaagaggtggaagaacgtgctcctgctcaaaaccccgagctgacaccaggccctgcccccgcaggccccacgccagctcctgagacaaatgcgcccaatcacccctcccctgccgagtacgtggaagtcctgcaggagctgcagcgtctcgagtcccgactccagcctttccttcagcggtattatgaggtcttgggggctgctgcgaccaccgactacaataacaaccacgaaggacgagaggaagaccagcgcctgatcaacttagtgggcgagtcactgagactgcttggaaacactttcgtcgctctgagtgaccttcgttgtaatctcgcatgtacaccgccgagacatctccacgtggtgaggcccatgagccattatacaactcccatggttctgcaacaggccgccatccccattcaaatcaatgtcggtaccactgtgactatgacagggaacggtaccagacccccccctaccccaaatgcagaagcacccccaccagggccaggtcaagcatcaagcgtcgccccctcatctactaatgtggagtcatccgcagagggggctccgccacctggacccgcccctccaccggcaacttctcacccacgagtcatacgcatttcgcaccagtctgtggagccagtggtgatgatgcacatgaatattcaggactctggtacccagcccggcggggtgccttctgcacctactggtcccttgggaccaccaggacacggccaaacccttggccagcaggtgccgggattcccaaccgcgccaacaagagtggtcattgcaagaccgacgcctccccaagctaggccgagccaccctggagggcccccagtgagcggcacgttgcagggcgccggattaggaaccaacgcgtcactcgcccagatggttagcggcttggtcggtcagttgctcatgcagccagtattggtcgcccagggcacccccgggatggccccccctcccgcgcccgcgactgcgagcgccagtgccggcaccacaaataccgccaccactgccggacccgcccccggcggcccagcccagcccccacccacgccacagccctccatggccgatctgcagttctcccagctcctgggcaacctcctgggacctgcaggcccaggcgccggcggctccggcgtcgcttctcccacaatcaccgtggctatgccaggagtgccagcctttctacagggaatgaccgactttcttcaagcaacacagactgccccaccaccgccccccccccccccgccacctcccccggcacccgaacaacagacgatgccaccacccggctctcccagcggaggcgccggctctccaggaggcctgggccttgagtccctatctcctgagttcttcacaagcgtagtccaaggggtcctgtcatctctgctcggaagcttgggtgcgcgggccgggagcagtgaaagcatcgccgcatttatccagaggttaagcggaagctccaatattttcgagcctggtgcagatggagccctggggtttttcggtgccctgttgagcctgctctgtcagaatttcagcatggtggatgttgtcatgctgcttcacgggcacttccagcccctccaacggctgcaaccccagctgaggtcattttttcatcagcattatctagggggccaggagcccacaccttcaaatattcggatggctactcacaccttaatcacggggctggaggagtacgtacgagagagtttttcactggtgcaggtgcagcccggcgtggatattatccggactaatctggagttcttgcaggagcagtttaattcaattgccgcccacgtattacattgtaccgattcaggattcggggccaggctcctggaactgtgcaaccagggtttgttcgaatgtttagctctgaatcttcattgtctgggcggccagcagatggaactggcagctgtgattaacggcagaattaggagaatgtcacggggcgtgaacccttccctggtgtcctggctcaccacaatgatggggctccggctccaggtcgtcctcgagcatatgcctgtgggtcccgatgccatcctccgatacgtgcggcgagtgggtgaccctccccagccactgccagaggagcctatggaggtccagggggctgaaagagcaagtcccgagccccagagggaaaacgcatcacccgcacccggcacaactgcagaggaagccatgagccggggacctccacctgcacccgaaggcgggagtcgcgacgagcaggatggggcctctgccgagacggagccgtgggctgctgccgtccctcccgagtgggtgcccattatccagcaggacattcagagccaacgcaaagtaaagcctcagcctcctctctcagatgcctacctgtccggcatgccggcgaagagacgtaagacaatgcaaggcgagggcccgcagctgctgttaagcgaggccgtgtcccgcgctgcaaaggccgcaggagctcgtcccctgacatcaccagaatccctctcgcgtgatttggaggctcccgaagttcaggagagttaccggcagcaactcagaagtgacatacagaagaggctgcaagaggatcccaactattcgccacagaggtttcccaatgcgcaacgcgccttcgctgacgatccttag

SEQ ID NO: 180299 - DNA, 3234 bp, synthetic construct
  misc_feature 1..3234: note = Description of Artificial Sequence: Synthetic coding sequence
  source 1..3234: mol_type = other DNA
atggagcccaacgacagcaccagcaccgccgtggaggagcccgacagcttggaggttctggtgaagaccctggattcacagacacgcactttcattgttggcgcacagatgaatgtaaaggaatttaaggaacatattgccgcctcggtttccatcccttctgaaaaacagcggctcatctaccaaggtcgtgtgctccaggacgacaaaaaattgcaggagtacaatgtgggaggaaaagtcatccatctggtggagcgagctccaccccaaactcacctgccatctggggcttccagcggaaccggttccgcctcagcaacccatggaggaggtagcccccccgggacccgggggccaggagctagcgtgcatgatcggaatgctaactcctacgtgatggtggggactttcaatttgccaagtgatggctcagctgttgatgtccatattaacatggagcaggcacctattcagtcagaacctcgagtgaggctggtgatggcccaacacatgattcgggacatacaaacactgttatccagaatggagtgcagaggaggacctcagccgcagcactcccagccccctcctcagcctcccgctgtgacacccgagcctgtggctcttagcagccagacaagcgagcccgtggagtccgaggcacctcctagggagcctatggaggccgaagaggtcgaggagcgggcaccggcccagaaccccgagcttactcctgggcctgctcccgcggggcctactcccgccccggaaaccaatgccccgaaccacccctccccggctgaatatgtggaagtgctgcaggaactgcaacgtctcgagagtcgcctgcagccttttctccagcgctattatgaagttttgggggctgcagccaccacagactataacaacaatcatgaaggacgtgaggaagatcagagactgattaatctcgtgggcgagtctctccggcttttagggaatacgtttgttgctctctccgacttgaggtgcaacctggcctgcacccctccgcgtcatttgcatgtggtaagacccatgtcccattacacaacccccatggttttgcagcaggccgcgatccccatacagataaacgtcggcacaactgtgaccatgaccgggaatgggaccagaccacctcctactcccaatgcagaggcgcctcctcccggtccgggccaggcctcaagcgtcgcgccaagcagcacaaatgtggaatccagcgcagagggagccccccctccggggcccgctccaccccctgccactagccaccccagagtcatcagaatttctcaccagtccgtcgaaccagtggtgatgatgcacatgaacatccaagatagtggcacacagcctgggggtgttccctcagcgcctacaggacctctgggcccgcccgggcatggtcaaacacttggccagcaggtgcctggtttcccaactgcacccaccagagtcgtgatcgcacgccccaccccaccccaggcaaggccgtcgcatcctggcggcccaccagtctcaggcacgctgcagggcgccggtctgggtacaaacgccagtctggcacagatggtctctggacttgtcggccagctattaatgcagcctgtgttggtggcacagggaactcccggtatggctcctccacctgctcccgctaccgcctcggctagtgcggggacaaccaacactgccacaacagccggacctgctcctggaggacctgctcagccgccaccaactccacaaccttctatggcggaccttcaattcagccagctgctcggtaatctcctgggacccgctgggcccggagccggcgggagtggagttgcctctccaaccattaccgtggctatgcccggcgtgccggctttcttgcaaggcatgactgacttcttgcaagctacacagacggctccgcccccccctccccctccccctccgccaccccctgcccctgagcagcagacgatgccccctcctggctccccaagcggcggagctggctcacctggcggccttggcctggagtctctgtctcccgaattttttacgtctgtggtacaaggggtactgtcctcactcttaggtagcttgggggcacgcgccgggagctccgagtcaattgctgctttcatacagcgcctgtccggctcaagcaacatcttcgagccaggcgctgatggggctctcgggttctttggtgctttgttgtccctgctgtgtcagaacttttctatggtcgacgtggtaatgttgttgcacggtcacttccagcctcttcaaagattgcagccacaactgcgtagtttcttccatcaacactacttaggcggacaagaaccgacgccttcgaacatccgaatggccacgcacaccctgatcaccgggctcgaggaatatgtccgggagagcttttctctggtgcaggtgcagcccggggtggacataatccggaccaacctggagtttcttcaagaacagtttaatagcatagccgctcatgtgctccactgtacagattctggattcggtgcgcgcctgcttgagctgtgcaaccagggactcttcgaatgcctggcactcaacctgcactgcctgggtggtcagcaaatggagctcgccgctgtcattaacggccgaatcagacgaatgtctcgcggcgtaaatccaagcctcgtctcatggctcaccacaatgatgggactgcgtctgcaggtggtactggaacacatgccagtaggcccagacgccatactcaggtacgtgaggagggtaggggaccctccacaacccctaccagaggaaccaatggaggtgcagggggctgagagggcatctccggaaccacagcgggagaacgcaagccctgcacctggcactacagcggaagaggccatgtctcggggccccccaccagcaccggaggggggcagtcgggacgagcaggacggcgccagtgcggagacagagccttgggctgccgcagtgccaccagagtgggtccccattatccaacaagatattcagtcccagcgcaaggtgaagcctcagccaccgttgtccgatgcatatttgtcaggcatgcctgccaaacgcagaaagctaaggtccgacatacagaagagactgcaggaagatccaaattacagccctcagaggttccctaacgcgcagcgcgcattcgctgacgacccatag

SEQ ID NO: 180300 - DNA, 3399 bp, synthetic construct
  misc_feature 1..3399: note = Description of Artificial Sequence: Synthetic coding sequence
  source 1..3399: mol_type = other DNA
atggagcccaacgacagcaccagcaccgccgtggaggagcccgactctctggaagtgttggtgaaaacattggatagccagacacgtacattcatcgtgggtgctcagatgaatgtgaaagagttcaaggagcatatagctgccagcgtgtcgatccctagtgaaaaacagaggcttatttaccaggggcgcgtgctccaggatgacaagaagctccaggagtacaacgttggtggcaaggtcatccaccttgtggagcgggccccaccccagacccacttaccctccggcgcgagcagcggaaccggaagcgcctctgccacccacgggggcggctcccctcccggaaccagagggccgggtgcttctgtgcacgatcgaaacgcaaactcttatgtgatggtcgggaccttcaatctaccaagtgacgggagcgccgttgatgttcacatcaatatggaacaggcccccattcagtcagaaccccgggtgcgcctcgtgatggcccagcacatgatcagggacatccagacactgctgagtcggatggagactctgccttatttgcaatgtagggggggccctcaaccccagcattcccaacccccaccccaaccacccgccgtgacgcccgaaccggtcgccctgtcgagtcagactagtgaaccggtggaatcagaagctcctccaagagaacccatggaggcagaggaggtcgaggaaagagcgccggctcagaatccagagcttacacccggccccgctccggctgggcccactccggctcccgaaactaacgctcctaaccacccctctcccgccgaatatgtcgaagtgctgcaagagctgcaacggctcgagagtcgcttacaacccttcctccagcgttactatgaggtgctaggagctgccgctacaacagattataataacaaccacgaggggcgcgaggaggaccagcgactaatcaatctggtaggcgaatctctgagactgcttggcaatacattcgtcgcactgagcgatctccgatgcaacctggcatgcaccccccctagacacctacacgtggttcggcctatgagccactacaccaccccaatggtcctgcagcaagccgccattcctatccagatcaatgttgggaccacagtgaccatgactggtaacggcacccggcccccacccacgcccaatgccgaggcccctccaccaggaccaggacaagcatcgtcggtggcacccagtagcaccaacgtggaaagctccgcagaaggcgcgccacctccgggccccgcaccacctcccgccacttcccaccctcgcgtgattcgtatcagccatcagtccgtagaaccggtggtgatgatgcacatgaatattcaagattccggtacacagcctgggggggtgcccagtgctccaactgggccattgggacctccgggacatggccagaccctgggacaacaggtgcctggatttcctaccgcacctaccagggtcgttattgcgaggccaacacctccccaagcacggccgtcccatcctgggggaccacccgtctccgggactctacaaggagctgggctgggcaccaacgccagcctggcccaaatggtttcagggctcgtgggtcaactgctcatgcaaccagtactggtagcccaaggcacccccggcatggcacctccaccagctcctgcgactgcatctgcctctgctggcactaccaatacagccactaccgccggtccggcccccggcgggcccgcacagcctcccccgacaccccagccatccatggcggacctgcagttcagccaactgctaggaaacttgttaggacccgccggcccgggcgctggggggagcggcgtcgcgtcccctactattacagttgccatgcctggtgtgccagctttcctgcagggaatgacggacttcctgcaggccacacagactgctccccccccccccccaccacctcccccccctccccccgcccctgagcaacagaccatgcccccacccggatcaccgtccgggggcgctggttcccccggcggccttggtctggaatccctatctcctgagtttttcacctccgtggtgcagggagtgctctcgagtttgcttggaagcttaggcgcgagagcaggatccagtgaatcaatagctgctttcatccaacgactttcaggcagctccaatattttcgaacccggggccgatggagcgctgggtttctttggtgccctgttgtccctgctctgccagaatttttccatggtggacgtagtgatgctgttgcatggccatttccaacctctccagcgtctgcagccccagcttaggtcatttttccaccaacactacctcggaggacaggaacccactccctccaacatccgaatggcaactcatactttaatcactggactggaagagtacgtgagagagtccttctctttggttcaggttcagccgggagttgatattattaggaccaacctggagttcctacaggagcaattcaattccatcgctgcccacgtgcttcactgcacggactcagggtttggcgccaggctcctggaactctgcaaccagggcttattcgagtgccttgccctgaacctgcattgcctgggaggccagcagatggaactggccgcagtgatcaatggccggattaggcggatgtcacgaggtgtgaatccgtccctggtctcgtggcttactaccatgatgggcctgagattacaggttgtgcttgaacatatgcctgtgggcccagacgcaatcctgcgttatgtacggcgggtgggcgatcctccccagccactcccggaagagcctatggaggtccaaggggctgagagagcctctcctgaacctcagagggagaacgcttcacccgctccgggaaccactgccgaggaagctatgagtcgggggcctcctccagctcctgagggcggctctagggatgaacaagacggcgccagcgccgagaccgaaccctgggccgcagcagtcccaccggagtgggtgcctattattcagcaagacattcagtcgcagagaaaggtgaaaccacaacctcctctgagtgacgcctatctctccggaatgccagccaagcggcgcaaaacgatgcaaggagaaggcccacaactgttgctgagtgaggccgtcagcagagctgcaaaggctgcgggggccaggccacttactagcccagaatctctgagtcgcgatctagaggccccagaggtacaggaatcctaccggcagcaattgcgctctgatatccagaaaaggctacaggaggacccgaattattccccccagagatttcctaatgctcaaagagcctttgctgatgacccatag

SEQ ID NO: 180301 - DNA, 3381 bp, synthetic construct
  misc_feature 1..3381: note = Description of Artificial Sequence: Synthetic coding sequence
  source 1..3381: mol_type = other DNA
atggagcccaacgacagcaccagcaccgccgtggaggagcccgactctcttgaagtactggtgaaaacactggactctcagacacggacctttattgtgggtgcccaaatgaacgttaaggaattcaaggagcatattgccgcttcggtctccatcccctccgagaagcagcggctcatttatcagggacgggtgttgcaagacgataaaaagctacaggaatacaatgtaggcggcaaggtcatacacctcgttgagcgcgcgcccccccagacccatctcccttccggggcctcctccgggacggggagcgcctccgctacccatggggggggaagcccacccggcacccgagggccgggtgcgtctgttcatgatcggaacgccaactcatacgtgatggtcggaacttttaatcttccatctgatggatcagcagtcgacgtacacattaatatggaacaggcaccaattcagtctgaacctcgcgtcagactggtgatggcgcagcacatgattagagacatacagactctgttaagccggatggaatgcaggggcgggcctcagcctcagcatagccagccacctccccagcccccagctgtcactcccgagccagtcgctctgtcgtcacagaccagtgaaccagttgagtccgaggcaccgcctagagaacctatggaggcggaagaagtggaagaaagagctccggcgcagaaccctgagctcactcccggacctgccccggccgggcctactcccgctccagaaacaaacgcccctaatcacccaagtcccgctgaatacgtagaggtcctacaagagttgcagaggctggaatcaaggcttcagccatttctccagcggtattacgaggtgctgggcgctgccgctacgaccgattacaacaataatcacgaaggacgggaggaagatcagaggctcatcaatcttgttggtgaaagtctgagactgctcggaaatacctttgtggcgctgagcgacctcaggtgcaacctggcatgcacaccccctaggcacctgcacgtagtgcgacccatgagccactatactacaccaatggtattacagcaggctgccatccctatccaaattaacgtgggtacgactgtcaccatgactggaaatggcactcggccacccccaaccccaaatgccgaagcacctccgccaggtccaggccaggcctcttccgtggcaccttcctccacaaatgtggagtcttccgccgagggagcccccccacctggaccagccccaccccctgctacatcacatccccgcgttatcaggatcagtcatcagtcagtcgagcccgtggtaatgatgcatatgaacatccaagacagcggtacacagcccggcggagttccctcggcaccaaccggacccctggggccccccggccacggccagacactcggccagcaggtccccggattccccactgcccccacaagggtcgtgatcgcacggcctacccccccccaggcaagacctagccatccaggcgggccccccgtcagcggtaccctgcaaggggcagggttgggaacaaacgccagtcttgctcagatggtgagcggattggtcggtcagcttctgatgcagccggtcttggtggcccagggcacacctggaatggcaccccctccggctcctgccactgcgagcgctagcgctggtactactaacactgctactactgcgggtcctgcgcctggaggcccagctcagcctccccccactccacagccatcaatggctgacctgcaattctcccagctgctcggcaaccttcttggtcccgcgggtccaggggctggggggagcggcgtggcctcacctactatcactgtcgcgatgcccggagtgcctgcctttctccagggcatgaccgacttcctccaggcaacacagactgcacctccgcccccacccccacctccgccaccaccccccgctccagaacaacagaccatgccccctcctgggagcccatccgggggtgccgggtcaccgggtggactaggcctggagagtctgtcccctgaattcttcacttcagttgtgcaaggcgtgctctccagcctgttaggtagcctgggcgcacgggctggctcgagcgagagcattgccgccttcatccagcgccttagcggtagtagcaatatttttgaacctggagccgacggggcattgggttttttcggagcactgctgtctttgctgtgccagaatttttccatggtagatgtcgttatgttgctgcacgggcatttccagccgttgcagcggctgcagccgcagttgcgaagctttttccaccagcactatctggggggccaggagcccactccatctaatattaggatggcaacacacaccctaatcactggactcgaggagtacgtccgagaatccttctcacttgtgcaggtccagccaggagtagacattattcgaactaacctagagttcctgcaagaacagttcaatagtatcgcagcacatgtccttcattgcacagattctggcttcggcgctcggctcttggagttgtgtaatcaggggctgtttgagtgcctagcattgaacctacattgtctcggcgggcaacagatggagctcgccgcagttatcaatggcaggataagaaggatgtctagaggagtgaacccgagtctcgtgtcatggctaacaaccatgatggggttgcggctgcaggtggtgctggaacatatgccagtggggcccgacgctattctgcgctatgtgcgacgggtgggcgatccaccgcagcctctgcctgaggaaccgatggaagtccagggagccgagagagcctcacccgagccacaacgagagaatgcatcacccgcgcccggcactaccgcggaggaggctatgtcacgggggccacccccagcccctgaaggcggctcaagagatgaacaggacggggcctcagctgagacagaaccctgggccgcggccgtaccacctgagtgggtaccaataattcaacaggatatccaaagccagaggaaggttaaaccgcagcctccgctgtctgatgcatatctaagcgggatgcctgccaaacggcgcaagaccatgcaaggagagggaccgcagctgcttttgagcgaagctgtaagtagggccgccaaagcggccggagccagaccacttacctcccctgagtccttatccagggaccttgaagccccagaggtacaggagagctataggcagcagctccgatcggacatccagaagagactgcaggaagatcccaactattccccgcagaggtttcctaatgctcagagggcctttgccgacgatccctag

SEQ ID NO: 180302 - DNA, 3381 bp, synthetic construct
  misc_feature 1..3381: note = Description of Artificial Sequence: Synthetic coding sequence
  source 1..3381: mol_type = other DNA
atggagcccaacgacagcaccagcaccgccgtggaggagcccgactccctcgaggtgctggttaaaaccctggatagtcagacacgcaccttcatcgtgggtgcccagatgaacgttaaagagtttaaagagcatatagcagcctctgtctcaatcccttcggagaagcagagactcatctaccagggaagagtattgcaggacgataaaaaactccaggaatacaacgtcgggggaaaggtgatccacctggtagaaagagcaccgcctcaaacccatctcccctccggagctagcagtggaacgggctcagcgagcgctacgcatgggggagggtctcctccgggtacacgaggacctggggcctcggtgcacgatagaaacgcgaattcatacgttatggtagggactttcaaccttccgagcgacggatcggcagtggacgtccatattaacatggagcaggcacctattcagtctgagccccgcgttagattagttatggcccaacacatgattcgtgatatccagacgctgctgtcacgcatggaatgccgcggaggtccccagccacagcactcccagccccctccccaacctcccgctgtcactcccgaaccagttgccctctcttcccagacttcagaaccagtggagtcggaagctccaccaagagagcctatggaggcagaagaagtggaagaacgggcacccgcccagaatcctgagcttaccccaggacccgccccagcgggtcctacaccagcgccagaaacaaacgcaccaaaccaccccagccccgcagaatacgtggaagttctccaggagctgcaaaggttagagagccggctccagccatttttgcagcgctactatgaagtgctgggtgccgccgccactactgattacaataacaaccatgaagggcgcgaggaagatcagaggctgattaatctggtgggagagtcgcttcgactccttggcaacacttttgtggccctgtccgacctgcgatgcaacctcgcgtgcacccctcccagacatctgcatgtggtaagacctatgtctcactacacgactcccatggttttgcagcaggcagccatccctatccagataaatgtggggaccacggtgacgatgaccggcaacgggacacgcccaccccctaccccaaacgccgaagccccgcctcctggaccaggccaagccagttcggtggccccctccagcacgaacgtcgaatcctccgcggagggcgccccacctcctgggcctgccccaccacccgctaccagccacccacgagtcatcaggattagccatcagagtgtcgagcccgttgttatgatgcatatgaacatacaagattctggaacgcagcccggaggagtgccctcagctcccaccggacccctagggcctcctggccacggccagacgctgggtcagcaggtgcccggtttccccacagcacccacaagggtggtgattgctcggccgacgccccctcaggccaggccaagtcaccccggtggaccgcccgttagcgggacactccagggtgcaggcttgggtacaaatgcgtccctggcccagatggtttctggtctggtcgggcagctgctcatgcagcctgttctcgttgcccagggcactcccggaatggcccctccacccgcaccagccactgcttcagcctctgccggaaccactaatacagcgacaactgctgggccagcgcccggtggtcccgcacaaccgcctccaacgcctcagcccagtatggcagacttacagtttagtcagttactggggaatcttctgggaccagcagggcccggcgcagggggctcaggtgtcgccagccctacaataacagtcgctatgcccggagtgccagccttccttcagggcatgacagatttcttgcaagctacccagacagcccctcctccaccgcctccccccccacccccccccccagcccccgagcaacaaacgatgcctccccctgggagccctagtgggggggcaggctctcctggcggcctggggctcgagagtctgagcccagaattcttcacttcagtggtgcagggcgtcctctcatcactgctcggatctttgggcgcccgcgcggggtcatctgagtctattgctgcattcatacagagactatccggatcctccaacatctttgagcctggagccgatggggcactgggatttttcggagccctgctctcactgttgtgtcagaatttcagtatggtcgacgtagtgatgctccttcacggacactttcagccgctgcaacgcctgcagccccagctgagatctttttttcatcagcactacctgggcggccaggagccaacaccgtccaacatcagaatggctacacacacgctcattacaggccttgaagagtacgtccgggagtcattcagcctggtacaggttcaacccggagtcgacataattcggacgaatctggaattcctacaggaacagttcaatagtatagcagcacatgtcctgcattgcacagactcaggatttggagcccgactactcgagctctgtaatcagggcctcttcgaatgcttggctcttaatttgcactgcctgggtggtcagcaaatggagttggcagctgtgataaatgggcgcattagaaggatgagccggggagtgaacccctcactggtcagttggttaacaaccatgatgggattgagactacaggtcgttttggagcacatgcctgtgggaccggacgcaattctacgctatgtcagaagggtcggagatccaccgcagcccttacctgaagagccaatggaggttcagggagccgagagggcttctccggagccacagagagagaacgcgagccctgcccctggcacaaccgctgaggaagccatgagtaggggccccccgcccgctcctgaagggggctcccgagacgagcaggatggggccagtgctgaaaccgaaccctgggccgccgcagtcccacctgaatgggtacccattatccagcaagatatccaatctcagagaaaggtgaagccccagcctccactgagcgacgcatacctgtctggcatgccagctaaaagacggaaaactatgcaaggcgagggacctcagttactcctcagtgaggccgtaagtcgcgcagcaaaggctgccggagcaagaccattgactagtcctgaatctctgtcgcgtgatttggaagctcccgaagttcaggagtcttacaggcagcagctgcgctcagacatccagaagcgactgcaggaggaccctaactattcaccgcagagattccccaacgcacagcgcgcatttgccgatgacccttag

SEQ ID NO: 180303 - DNA, 3381 bp, synthetic construct
  misc_feature 1..3381: note = Description of Artificial Sequence: Synthetic coding sequence
  source 1..3381: mol_type = other DNA
atggagcccaacgacagcaccagcaccgccgtggaggagcccgactctctcgaagtgctcgttaagactttggatagccagaccaggactttcattgtgggtgcacaaatgaatgtcaaggagttcaaggagcacattgcagcctccgtctccatcccgagtgagaaacaaaggctcatctatcagggacgagtcttgcaggacgataagaaactccaggaatataacgtcgggggaaaggtaatccacctagtggaaagagccccccctcagacccacttgcctagtggtgcctcttctgggacgggatccgcctccgccacacatgggggcggctcacccccagggacgcgaggcccaggagccagtgtacatgacagaaacgccaactcttatgtaatggtgggcaccttcaatttaccttccgacggttccgctgtcgacgtgcacatcaacatggagcaggcccctattcagtcagagcctcgcgtccgccttgttatggcccagcacatgatcagagacatccagaccctcctttctagaatggagtgtagaggcgggccacagccccagcatagccagccacccccccagcctcccgccgtaacacccgagcccgtggctctgagctcccagacttctgagcccgtggagtccgaggcgcctcctcgagagcctatggaggctgaggaagtggaggagcgcgctccagctcagaatcctgagctgactcctgggccggcccctgccggccctacacccgccccggaaaccaacgcgcccaatcacccctcaccagcagagtacgtagaagtgctccaagaactacagcgtctagagtcacgtctgcagccgtttttacagcgctactatgaagtgctgggagccgcagccaccaccgattacaataataaccacgaaggaagggaggaggatcagaggttaatcaacctggtcggcgaatcactgagactgttgggtaatactttcgttgccctgtccgacctgaggtgtaacctggcatgcaccccacctcggcacctgcacgtagtccgcccaatgtcccactataccacacccatggtactgcagcaagccgccattcctattcagattaatgtgggaacaactgtcaccatgacaggcaacgggacccgccctcctccaacccccaacgccgaggcccctccacctggcccaggacaagcttcctcagtcgctccttcctctaccaatgtcgaatccagtgcggagggtgccccacctccaggccctgcgcctccacctgcgacatctcacccccgagttattcggatcagccaccagtcagtggaaccggtggtgatgatgcatatgaatattcaagattctggaacacaacccggcggcgtgccatctgctccgaccgggcccttgggccctcccggacatgggcagaccctggggcaacaggtgcctggattcccaacggcccctacccgcgtcgtgatcgcaagacccactcctccacaagcccgaccaagtcaccccggaggtccacctgtgagcgggacactgcaaggcgcgggactgggaacaaatgccagtttggcacaaatggtttccggtctcgtgggccagcttctgatgcagcccgttctggtagcccagggcacaccgggtatggcccccccgcctgcacccgccacagcctctgcgagtgctggaacaaccaatactgccacaaccgcgggtcctgcccctggaggccccgcgcaaccgcctcctactccccagcccagcatggcagatctacagttctcacaactcctcggcaacctcctcggccctgcaggtccaggagcaggagggtccggggttgccagtcccactattaccgtggcaatgcctggtgttcccgctttcttacaaggcatgactgacttcctgcaggcaacacagactgctcctccaccccctccccctccgccacctcccccaccggcccctgaacagcaaacgatgcctcccccagggtcccctagcggaggtgccgggtctcccggcgggcttggcttagagtcccttagccctgagtttttcacatcagtggtgcagggtgtccttagctcactgctggggagcctgggtgccagggcaggcagctccgaatctatagccgccttcatacagaggctgagtggctcctcaaacattttcgagcctggggctgatggggccctgggctttttcggtgcactgttgagcctgctttgccagaacttttcaatggtggatgtggttatgttgttgcatggccactttcagccgctgcaaaggctgcagccacagttgagaagttttttccatcagcattacttgggcgggcaagaaccaacaccttccaatatccgaatggctacccataccttgatcacaggcttagaggaatacgtgcgagaatcctttagtctggtgcaagtgcaacccggagtggacataattaggactaaccttgaattcctgcaggagcagttcaatagcatcgctgcacacgtcctccactgcacagatagcggcttcggcgcaagattgctagagttgtgcaatcaggggctctttgaatgcctcgctttaaacctgcactgccttggaggtcagcaaatggaactggccgccgtgatcaatggacgcatcaggcgcatgtctcgaggggtgaatcccagcctcgtgagctggctgactaccatgatggggctgagacttcaggtggttcttgagcacatgcctgtggggccggacgctatattgcgctatgtccgccgcgtgggcgatcccccccagcctctgcccgaagagcctatggaagtccagggtgctgagagggcaagcccagaaccccagagggagaatgcatctcccgcgcccggcaccaccgcggaggaagctatgagccggggccctcctcctgcgcctgaaggcggaagtagggatgagcaagacggcgccagtgccgagaccgagccttgggcagccgctgttccccctgagtgggtgcccattattcagcaggatattcagagccaacgtaaggtcaagccacagccaccgttaagcgacgcatacctgagtggcatgcccgctaagagacgaaagactatgcagggagaaggtccacagctgctcttgtccgaagcagtttcgagggctgctaaggctgccggggctcgacccctgaccagcccagagtctttatcccgcgatcttgaggcccccgaggtacaggagagctatcgacagcagctgcgcagcgacattcagaaaaggctgcaggaggaccctaattactcaccgcaaaggtttcccaatgctcagcgggcttttgccgacgacccctag

SEQ ID NO: 180304 - DNA, 3489 bp, synthetic construct
  misc_feature 1..3489: note = Description of Artificial Sequence: Synthetic coding sequence
  source 1..3489: mol_type = other DNA
atggagcccaacgacagcaccagcaccgccgtggaggagcccgactccctcgaagtactggttaaaacactggatagccagacgagaacatttatcgtcggggcccagatgaatgtaaaggagtttaaagagcacatcgctgcctctgttagtattccaagtgaaaagcagcgcctcatctaccagggaagggtgctgcaagatgacaaaaaactgcaggagtataacgtcgggggtaaggtgatccacctcgtggagagagccccaccccagacccatctgcccagcggtgccagttcaggtacggggtctgcctcagccactcatggtggtggcagcccgccaggaactcgcggccccggagcgtccgttcacgatagaaatgcaaacagctatgttatggttggaactttcaatctgccatctgacggaagcgcagtggacgttcatataaatatggaacaggcccctatccagagcgagcctcgcgtgagactggtaatggctcagcacatgatcagggatattcagaccctgttaagcaggatggagtgtagaggagggccccaaccccagcatagccaacccccgcctcagccccctgctgttacacctgaaccagtcgccctgtcatctcagacctcagaacccgtcgaatccgaagcaccacctcgagagccaatggaggccgaagaggtggaagagcgtgcccctgctcagaacccagagctgactccgggccctgcccctgctggccccaccccagcaccggaaactaacgcgcccaatcacccctctccagccgaatacgtggaggtgctgcaggagctgcaacggctggagagcaggctgcagccttttttgcagcgttattatgaggtcctcggcgccgcagcaaccaccgactacaataataaccacgagggtagggaggaagatcagcggctcataaaccttgttggcgagagtctccgactgctggggaatacttttgttgccttaagtgatttacgctgtaacctggcttgtacccccccccgccacctccacgtggtccggcccatgtctcattacactacacctatggtgctgcagcaggccgccattccaattcagatcaatgttggcacgacggtcacaatgactgggaacgggactcgacctcctccaacgcccaatgctgaagcgccaccacctggacctggtcaggcttccagtgtggccccctcttctaccaatgttgagagctctgccgagggcgctcctccccctggaccggctccccctcctgcgacaagccatccacgggtcatccgaatctctcaccagtctgtggagccggtggtgatgatgcatatgaacattcaggattccggaacacagcctggcggcgtgcctagcgcaccgacaggacctctcggacccccaggccacggccagacattgggatccaccctcattcagctcccttcacttcctccagagttcatgcacgccgtcgcacatcagattacccatcaagcaatggttgccgccgtggctagcgctgccgcgggccaacaggttccagggtttccgactgcgccaactcgggtagtgatcgctcggccaacacctccgcaggcacgaccttcacatcctggaggaccacctgtctccggtacgctgcagggcgccgggcttggcactaatgcgtcactggctcagatggtgtctggccttgtcggacagctgctgatgcagccagtgctggttgcacagggcacaccaggcatggcgccaccccctgccccagccaccgcgtccgctagtgctggaaccacaaacaccgccaccacagcaggccccgcacctggtggccctgcccagccccccccaactccacagcctagcatggccgacctccagttcagccagctcctgggcaatctgctcggaccagccgggccaggggctggcggaagcggggtcgcctcccccacgataacagtagcgatgcccggggtgcccgctttcctccagggtatgacagacttccttcaggctacccaaacagcgcctcctcctcctccgcctccgcccccccctccccccgctcccgaacagcaaactatgccacccccagggagtccatcaggaggggccggaagtcccggggggctcggactagagagtctcagcccagagttctttacctcggtggtccaaggagttctgagctctctcctgggtagcctcggggcccgagctggaagctctgagagcatagctgcctttatccagcgcctgtctggcagttccaacatctttgaacccggcgctgatggcgcattgggattttttggggcattgctcagtctgttatgtcaaaatttcagcatggtggatgtggtaatgctcctgcatggccacttccagcccctgcagcgcctgcagcctcagctgcgctcattctttcaccaacactatttaggtggccaagaacctaccccatctaacattcgaatggctacacatactcttattaccgggctggaggagtatgtgcgtgaatccttttctcttgttcaggtgcagcctggcgtggacataatacgcactaatctggagttcctccaggaacaatttaactccattgccgcccacgtcctgcactgcaccgattccgggtttggggcacggcttcttgaactgtgtaaccagggtctgttcgagtgcctagccctgaatctacactgtcttggtggacaacagatggaacttgcggctgttattaatggaagaattcgaagaatgagcagaggtgtgaacccctctcttgtgtcatggctgaccacgatgatgggcctgaggctgcaggttgtgctcgagcatatgccggtaggaccagacgctattctgagatacgtgagaagagtaggggaccctcctcagccactcccagaggaaccaatggaagtccagggggccgaacgtgcttcacccgaacctcaaagggagaatgcaagccctgccccaggaacaaccgccgaggaggctatgtcacgagggcctcctccagctccggagggggggtctagagatgagcaggatggcgcaagtgccgagacagaaccatgggccgccgcagtgccacctgaatgggtgccgataatccagcaggatatccaatcccaaaggaaagtaaagccgcaacccccactgagcgatgcctacctgtccgggatgccagctaagcggagaaaaacgatgcagggagagggcccgcagctccttctgtctgaagctgtttcgcgcgcagcaaaggcggccggagcaagacctctaacgtcaccggaatccctttctcgagatctggaggccccagaggtgcaggagagttacagacagcagttgaggagtgatattcaaaagcggctccaggaggacccaaactattccccccagagattcccaaacgctcagcgggccttcgcagacgacccctag

SEQ ID NO: 180305 - DNA, 738 bp, synthetic construct
  misc_feature 1..738: note = Description of Artificial Sequence: Synthetic coding sequence
  source 1..738: mol_type = other DNA
cccccccggcacctgcacgtggtgcggcccatgagccactacaccacaccgatggtgctgcagcaggcagcaatcccaattcagatcaacgtgggcaccacagtaacaatgactggcccggctccccccccagctacctcccacccacgggtgatccggatctctcatcagtccgtggaaccagtcgtaatgatgcacatgaacattcaggattccggcacgcagcctggaggcgtaccatccgcccccacgggccctcttggaccacccgggcatgggcagaccctgggacagcaggtgcctggctttccaactgcacccacccgtgtcgtcattgctcggcccaccccaccgcaagctaggccatctcatccggggggccctccagtcagcggtactcttcagggagccggactgggaacaaacgccagtctggcacagatggtcagcgggttggtgggccagctcctcatgcaacccgtgcttgtcgctcaaggcacacctggtatggccccacctcccgccccggccaccgccagcgccagtgcagggacaacaaataccgctaccaccgccggccctgccccgggcggccctgcccaaccaccacccaccccacagccttctatggccgacctgcagttcagccagctgcttgggaatctgcttggccctgctggccccggagccggcggttctggtgtggcctcaccaacaattactgtggcgatgccatag

SEQ ID NO: 180306 - DNA, 3381 bp, synthetic construct
  misc_feature 1..3381: note = Description of Artificial Sequence: Synthetic coding sequence
  source 1..3381: mol_type = other DNA
atggagcccaacgacagcaccagcaccgccgtggaggagcccgactccctggaggtgttggttaaaacactcgatagtcaaacccggacctttatcgtcggcgcacagatgaatgtcaaggaatttaaggagcacatagccgcaagcgttagtatccccagcgaaaagcagcgtctgatctatcagggtcgtgtcctgcaagacgataagaaattacaggaatacaacgtggggggtaaggtgatccaccttgtcgagagggcgccccctcagacccacttaccgagcggggctagtagcgggaccggcagcgcctctgcaacccatgggggaggcagtccaccaggcactagaggcccaggggcaagtgtacacgatagaaatgccaactcctacgtaatggttggaacattcaacttgccaagcgatggctctgcagtcgatgtgcacattaacatggagcaggctcctatccagagcgagccaagggtacgtcttgttatggcacagcatatgatccgcgatattcagacacttcttagccgaatggagtgccgggggggaccccagccacagcattcccagccccctcctcagccccctgcggtgaccccagagcctgtggcactgagctcccaaacttccgaacctgtcgagagtgaagcgccaccacgcgaacccatggaagccgaagaggtggaagaacgcgcaccagcacagaacccagaactcactccaggcccagcaccggccggtccaaccccagcacccgagaccaacgctccgaatcatccgagtcccgcagaatacgtagaagtgctccaggagttacagcggctcgagagtaggctgcagccctttctgcagcgttattatgaggtattgggcgccgccgctaccacagactataacaacaaccatgagggtcgagaggaggatcaaaggctgatcaatctcgtcggggagtctctccggctcctgggaaatactttcgtagccctgtcggacctgaggtgtaatctcgcttgcacgccgcccaggcatttacacgtagtccgccccatgagccactatactacacctatggtgctgcaacaagctgcaatacccatacaaataaatgtcggtacaactgtgaccatgaccggaaatggtactaggccacctccgacacccaacgccgaagctccacctcccgggcctgggcaggccagcagcgtggcccctagttccaccaatgtggaaagctctgccgaaggggcgccccctccgggtcctgctccacctcccgcaacaagccaccccagggtcattcgcatctcacatcagtccgtagagcctgtcgtaatgatgcacatgaatatccaagattccgggacacaacccggcggcgtcccctcagcgcctaccggacccctgggcccaccaggccacggacaaactctagggcagcaggtgcccggttttcccacagcacctacccgcgtagtgatagcccggcccactccccctcaagctagaccatctcacccggggggcccacctgttagcggcacgctgcagggggccggtctcgggacgaatgcctccctggctcagatggtgagcggcctggtaggacaactccttatgcagccagtactagtagcccagggcacacccggcatggctcccccccccgctcctgccactgcatccgccagcgctggcaccacgaacaccgcaaccaccgccggcccagccccgggcggccccgcacagcccccccccactccgcagccgtctatggctgaccttcagttcagtcagctgctggggaatctgttggggcccgccggcccaggcgcaggcggtcccggtgtcgcaagcccgacaattacagtggctatgccgggcgtgcccgccttcctgcagggaatgaccgactttctccaagccacccagaccgctccccccccacctcctcctccgccaccgcctcctccagcacccgagcagcagactatgcccccacctggctccccatcgggcggggctggttctcctggtggtctgggcttagagtcactgagccctgagtttttcacctccgtcgtgcaaggcgttctgtccagcctccttggatctctcggggcccgggctggctcctccgaatccatcgctgcgttcatccagaggctgtctggatcatcaaatatctttgagcctggagctgatggggcactaggcttctttggggctctcttgtctcttctatgccagaactttagtatggtcgacgtggtgatgctcttacacggccatttccaaccactccagaggcttcagccacagttaaggagtttcttccatcagcactatttgggcgggcaagagcctactccttccaatatccggatggcaacccatactttaattaccggcttggaggaatatgttcgggagagcttcagcctagtgcaagtccagccaggcgtggacattatccgaacaaatctggaattcctgcaggaacagtttaactctattgcagctcacgtgctccattgtaccgatagcgggttcggcgcacggctgcttgagctctgcaaccagggcctgttcgaatgcctggctctcaatctgcattgtctgggcggtcaacagatggagctcgctgccgtgatcaatggtagaattaggcgcatgagccgaggggtgaatcctagtcttgtgagctggctgaccacaatgatggggctacgcctgcaggtcgtgctcgagcatatgcccgtgggtcccgacgccatactgcgctacgtgcgcagggtcggggaccctcctcagcccttgcctgaggaaccaatggaagttcagggcgcggaacgggcttcacccgagccccagagagaaaatgcaagccccgcccccggtactaccgcagaggaagcaatgtcccgtggtcccccacccgctccagagggcggcagccgagacgagcaagacggagcttcggcagagacagagccatgggcagctgcagtgcctccggagtgggtgcccataattcaacaggacattcagagccagcgcaaggtaaaacctcagccacccctatcagacgcatatctgagcgggatgcccgctaagagaagaaagacaatgcagggggaaggtccccagttgctcctctccgaagccgtttccagggcagcgaaggccgcgggagcccgccccctgacttctccagagagtttgagcagggaccttgaagcccccgaagtgcaggaatcctaccgtcagcaactgcgctcagatattcagaaaagactgcaggaggacccaaattattctccgcagaggttccccaacgcccagagggcgttcgctgatgatccttag

SEQ ID NO: 180307 - DNA, 789 bp, synthetic construct
  misc_feature 1..789: note = Description of Artificial Sequence: Synthetic coding sequence
  source 1..789: mol_type = other DNA
atggagcccaacgacagcaccagcaccgccgtggaggagcccgacagcctggaagtgctagttaagacccttgatagtcagactagaacgttcattgtgggcgctcagatgaatgttaaggaattcaaagaacacatagccgcctcagtgtcgattccgagcgaaaaacagagactgatctaccagggacgcgtactccaagacgacaagaaactgcaggaatacaacgtaggcgggaaggtaatccatttggtagagcgtgccccaccccagacccatttaccatccggcgcatcttcagggacaggcagcgcgtcagctacacatggcggagggtccccccctggaacacgggggcccggcgcctcagtccacgacaggaacgctaatagctatgttatggttggcacttttaatctgccatccgatgggtcagccgtggacgtgcacattaacatggaacaggctccaatccaatctgagccgcgcgtgcgattagttatggcccagcacatgatccgagatatacagacactactgagccggatggagtgccggggaggcccccaaccccagcactcccaacctccaccacagcctcccgcagtcacccctgaaccggtggctctgtcctcgcagacctccgagcctgttgagagcgaagccccgcctcgcgaaccaatggaggcagaggaagttgaggaacgtgcccccgcccaaaatccagagctgacaccaggcccagcgcccgctgggcccacacccgcacccgagactaatgcaccctag

SEQ ID NO: 180308 - DNA, 717 bp, synthetic construct
  misc_feature 1..717: note = Description of Artificial Sequence: Synthetic coding sequence
  source 1..717: mol_type = other DNA
agcagcgccgagggcgcccccccccccggccccgcccccccccccgctactagccatccacgagtgatccgaatctcccaccagagcgtggagcccgtggtgatgatgcacatgaacatacaaggccccctgagtctgtcaccctgtcccgattctggcacccagccagggggggttccgtccgctcccaccggcccgctcggcccacctggacacggccagactcttggtcagcaggtaccaggattccctacagccccaaccagggtggtgatcgcaagaccaactcccccacaggccagaccaagccacccagggggtccgccagtgagcggcacactgcaaggcgctggactcggcaccaatgcgagtttagctcagatggtgagcggcctggtaggccagctgctgatgcaacccgttctcgtcgcacagggcactcctggcatggcacctccacctgccccagcgacggcctccgccagtgcaggaactaccaacacagctacaactgccggcccagcacccggaggcccggcacaacctcctcctaccccccagccaagcatggccgacctccaattcagtcagcttttggggaacctgcttgggccagccggcccaggagcagggggcccaggagtagcctcaccaactatcacagtcgctatgccgggcgtcccagccttcttgcaggggatgaccgattttttgtag

SEQ ID NO: 180309 - DNA, 3381 bp, synthetic construct
  misc_feature 1..3381: note = Description of Artificial Sequence: Synthetic coding sequence
  source 1..3381: mol_type = other DNA
atggagcccaacgacagcaccagcaccgccgtggaggagcccgacagcctggaggtgctggtcaagactctggacagccaaacaaggacattcattgtgggtgcccaaatgaacgtcaaggaattcaaagagcacatagccgcctctgtctcgatcccatccgaaaagcagaggctgatttatcagggtcgtgtgctccaagatgataagaagctgcaggaatacaacgtaggcgggaaggtcatacacttagtagagcgcgctccgcctcagacccacctccccagtggggccagctctgggacgggatctgcgagtgcaacacatggcggtggctccccaccagggaccagaggcccgggcgctagcgtgcacgacagaaatgcaaatagctacgtgatggtgggcacatttaacctgccctcggatggtagtgctgtggatgtgcacatcaacatggagcaagctccgatccagagcgaacctagggtccgcttagtgatggctcaacatatgataagagatatccagacactgctttctaggatggaatgtaggggcggaccgcagccacagcacagccagccccctccccagcctcccgcagtgacgcctgaacccgtcgccttgagctcacagacgtcggaaccggttgagtccgaagcccccccacgggaacctatggaagctgaggaggtggaagaacgcgctccagctcagaacccggagcttacgcccggtcctgcacccgcgggaccaacacctgctcctgagactaacgcgccaaatcatccctctcctgccgaatacgttgaggttctgcaagaactccagaggctagagagcaggctccagcctttcctgcagagatactacgaggttctgggcgcggctgccacaactgactacaataataaccatgagggtcgggaagaggaccagaggttgatcaacctggtcggcgaatctctgcgactcctggggaacaccttcgtggctctctctgacctgcgatgcaatctggcctgtactccaccacggcacctgcacgtggtgcgacctatgagccactacaccactcccatggtcctgcagcaggcagccatccccattcaaatcaatgtcgggacaactgtgacaatgacagggaacggcacacgccctcctcctactccaaacgccgaagctccaccccctggacctgggcaggcctcatcagtggccccgtcaagcaccaacgtggaaagcagtgcggaaggagccccccccccaggccctgcccctcccccagctacatctcaccccagggtgatccgcatttcacaccagagcgtggagcccgtggtcatgatgcatatgaacatccaggacagtgggacccagcccgggggagtgccaagcgccccgacaggacctctcggtcccccaggacacgggcagacattgggccaacaggtgccgggattccccaccgctcccacccgggtggtcatcgccagaccaactcctccccaggctcgaccgtcgcatcctggtgggcctcccgtctcaggcacccttcagggagccggactcggaacgaacgccagcctggcccagatggtttcaggtctggtcggccagctgctgatgcagccagtcctcgtggcccaaggaacccctggaatggccccaccccccgcccccgccacagccagcgcttctgcagggactacaaacaccgcaactacagctggccccgctccgggcggacccgcgcaaccacctcccactccccaaccctccatggccgaccttcagttttcccagctgctcggcaacctactggggccagcgggtcctggggcaggtgggccaggggtggcttcccctacaattacagtggctatgcctggcgtgccagcctttctgcagggcatgacagattttcttcaggcaacacaaaccgcgccacctccacccccaccaccgcccccccctccacccgcccccgaacagcagaccatgccgcctcctggcagcccgagtggcggtgccggcagcccgggaggactaggtctggagtcactgagccctgagttttttactagcgtggttcagggcgtgctgagctccctgctgggatcactgggcgctcgggccgggagtagcgagtcaatagccgcctttattcaacgtctgtcaggcagcagcaatatatttgagcccggggctgacggagccctgggctttttcggggccctcttgtctttgctatgtcagaacttttccatggtggacgttgtgatgctcctacacggccattttcaacccctccaaaggctccagccccaactgaggtccttcttccaccaacactacctgggcggacaggagcccacaccttccaacatccggatggcaactcacactcttatcactgggctcgaggaatacgtgagggaaagctttagcctggtgcaggtgcagccaggcgttgatattataagaaccaacctggaattcctgcaagaacaattcaacagcatcgccgcccacgttctccactgcaccgacagcgggttcggcgcgcggctgctagagctgtgcaaccagggtctgttcgagtgcctggcgctgaatcttcactgtcttggcggccagcagatggaactggcagctgtgattaatggtaggatacgacgaatgtctcgtggtgtgaacccctccctcgtgagctggttaacaacgatgatgggcttacgtctgcaggttgtgctcgagcacatgcctgtgggaccagatgctatcctgagatatgtaaggagagtgggagacccacctcaaccactgccagaggagcctatggaagtccagggtgctgagcgggcaagtccagagcctcaaagagaaaatgccagcccggctcccgggacgaccgcagaggaagcgatgagcaggggtccgccacccgcgccagaagggggttcacgagacgaacaggatggggccagcgccgagacggagccatgggcagccgccgtgccaccagagtgggtgcccatcattcagcaggatatacaaagtcagcgcaaggtgaagccacagccccctctgtccgacgcctatctgtcagggatgcccgccaaacggcgaaaaacaatgcaaggagagggcccacagctgctgctttctgaggccgtgtctcgagccgctaaagcagccggcgctcgcccactgacaagccctgaatcccttagccgggacctggaagcccccgaggtgcaagagtcatatcgccaacaattgcggagcgacattcagaagcgccttcaggaggatccaaactacagcccacagcgttttccgaacgcccagagagcgttcgcagacgatccttag

SEQ ID NO: 180310 - DNA, 648 bp, synthetic construct
  misc_feature 1..648: note = Description of Artificial Sequence: Synthetic coding sequence
  source 1..648: mol_type = other DNA
atggagcccaacgacagcaccagcaccgccgtggaggagcccgactcacttgaagtgctggtgaagacactcgacagccaaacacggacgttcatagtaggagcccagatgaacgtcaaagagttcaaggaacacattgctgcaagtgtcagcattccatctgaaaagcagcgcttaatttaccagggacgcgttctgcaggatgacaagaagttacaagaatacaatgttgggggtaaagtgattcatttggtcgagcgagctccccctcagacccatttaccatccggcgctagttcaggcaccggctccgcctcagccacacatggcggagggtctccaccaggcacaagaggaccaggagctagtgtgcacgacagaaatgccaattcttacgtgatggttggaactttcaatctgcccagtgaaccacgagtgaggctggtaatggctcaacacatgattagagatatccagacactgctgagccgtatggagtgtcggggaggcccacagccccaacatagccaacctccaccccaaccccccgccgtcacgccagaacctgtggccctgtcctcgcagacctctgaacccgtcgagagcgaggcacctcctcgggagcccatggaggctgaggaggtgtag

SEQ ID NO: 180311 - DNA, 789 bp, synthetic construct
  misc_feature 1..789: note = Description of Artificial Sequence: Synthetic coding sequence
  source 1..789: mol_type = other DNA
atggagcccaacgacagcaccagcaccgccgtggaggagcccgacagtcttgaggtgctcgtgaaaaccctggattcacaaactcggacatttatagtgggagcacagatgaatgtaaaggagttcaaggaacacattgctgcttccgtttctatacctagcgagaagcagcggttaatataccagggccgagtcttgcaggacgacaaaaagctccaggaatacaacgtgggtggtaaagtcattcatctggtggagcgagcccctcctcagacgcatctgcccagcggcgcgtcgagcgggaccggctcagcaagcgcaacacacggaggaggatcacctccagggacacgtggacctggagccagtgtgcatgacagaaacgccaattcttacgtgatggttgggactttcaatctccctagcgatggcagcgctgtggacgtgcacatcaacatggaacaggcccccatccaaagcgagccacgcgtaagacttgtgatggcccagcacatgatcagagacatccaaactttactcagtagaatggagtgccgcgggggacctcagcctcagcacagccagccccctcctcaaccgccagctgtcacccccgaacccgtcgcactgagctcccagacttccgaacctgtggagtctgaggctcccccccgcgagcccatggaagccgaagaggtcgaggaacgagcacccgcccagaatccggagcttaccccagggccagcgccggctggtccaacgcctgctcccgagacaaacgcaccttag

SEQ ID NO: 180312 - DNA, 2232 bp, synthetic construct
  misc_feature 1..2232: note = Description of Artificial Sequence: Synthetic coding sequence
  source 1..2232: mol_type = other DNA
atggagcccaacgacagcaccagcaccgccgtggaggagcccgacagccttgaagtcttggtgaaaactttagatagtcagacccgcacatttatcgtgggggcccagatgaacgtgaaagagttcaaggaacatatcgctgcaagtgttagcatcccgagtgaaaaacagagactgatctaccagggtcgggtacttcaggacgataaaaaactacaggagtacaatgttggaggaaaagtgatccacttggtggaacgcgcccctccccagactcatttaccctcaggtgcatcttccggcactggcagcgcctccgcaacacacggcgggggttctccccccggcacacgcggtcctggcgcttccgtgcatgatcggaatgctaactcctatgtaatggtcggaacattcaatctgccaagtgacgggagtgcggtagatgtgcacataaacatggaacaagcccctattcaaagcgaacctcgcgtcaggctagttatggcacagcatatgattcgggacatccagaccttgctcagtaggatggagtgcaggggtggcccgcaaccccaacattcacagccgcctccccagccgcccgctgtcacacccgaacccgttgccctgagctcccagacatccgagccagtggagagtgaagcccctccacgtgaacctatggaagcagaggaggtcgaggagagagcccccgcccagaatcccgagctgacccctgggccagcgccggctggcccaacccctgcccccgagaccaatgcccccaaccacccaagccccgctgagtacgtcgaggtgctgcaggaattacaaaggttggagtctagactccagcccttcctgcaacggtattatgaggtcttgggggccgccgccacaacagactataataacaaccacgaagggcgcgaggaggaccagcgattgatcaatctagtgggcgaatctctcagactgctgggcaatacatttgtggccctgtcagatctgaggtgtaacctggcgtgcacaccccctcgccacctgcacgtggtgcgcccgatgtcccattatactacaccaatggtactacagcaggccgccattcctatccaaataaacgtcggaacgacggtcacaatgactggtaacggtactagacctccacccaccccgaacgcagaagctccacctccaggccccgggcaggctagttccgtggccccaagttcaacaaatgttgagtcttccgccgaaggtgccccaccacctgggccagcacccccgcctgccactagccatcctcgtgttatccgaatttcccaccagagcgtagagcccgtggtcatgatgcacatgaacatccaggactctgggacacagcccggcggtgtgccgagtgcccccaccggccccctcggccccccaggacatggacagacactgggatcaacactcatacagttgcctagtctgcccccagagttcatgcacgcagtcgcgcatcagatcactcaccaagctatggtggcagccgtcgcttctgccgccgcaggtcagcaggtgcctggatttccgaccgctccaacaagggtagtcattgccagaccaacaccaccccaagcaaggccctcacatcccggcgggccccctgtgtctggcactctgcagggggccgggctgggcacgaatgcctctctggcccaaatggtgagcggtctggtaggccaacttctcatgcagccggtattggtggcccaggggacgcctggcatggccccccctcctgcgcctgcgaccgcctccgcctccgcggggaccactaatacggccacaactgccggccccgcacccggtggaccagcccagcctccaccaaccccacaaccctcaatggccgatctgcagttctctcagctgctgggaaatttgctcggcccagctggcccgggggcaggagggcccggagttgccagccctaccatcacagtggcaatgcccggagtccctgcatttctgcaagggatgactgacttcctccaagcaacccaaacagctccaccacctcctccacctccccccccccctcccccggcacccgagcagcaaacgatgccgcctccgggctccccttcgggtggcgccggctcgcccgggggcctgggacttgaatctctatccccagaattcttcacgtcagtggtgcagggtgtgctgtcttctttgctgtag

SEQ ID NO: 180313 - DNA, 3381 bp, synthetic construct
  misc_feature 1..3381: note = Description of Artificial Sequence: Synthetic coding sequence
  source 1..3381: mol_type = other DNA
atggagcccaacgacagcaccagcaccgccgtggaggagcccgacagtctcgaagtactggtgaagaccctcgacagccagacgcgtacctttattgtgggcgctcaaatgaacgtcaaggaattcaaagagcacatcgccgcgtcggtgtctatacctagcgagaaacagcgactgatctaccagggccgtgtcctgcaggacgataagaaactacaggaatacaatgtgggaggaaaagttattcatctggtcgagcgggctcctcctcagacacacctacctagtggggcatcaagtggaactggctctgcaagtgcaacacacggcggtggatctcctcccggaactcgtggtccaggggcgagcgtgcatgataggaatgccaattcctatgtgatggtcggcaccttcaatcttccaagcgacgggtctgccgttgacgtccatatcaatatggaacaagccccaattcaatccgagccccgagtacgcctcgtaatggctcaacacatgatccgcgatatccagaccctcctgtctagaatggaatgtaggggtggcccccagccacagcacagccaacctcctccccagcccccagcggtgactcccgagccagtggccttaagtagccagacctcggaacccgtagaaagtgaggcgcctccccgcgagccaatggaagccgaagaggtggaggaaagggcccctgctcagaaccctgagctgacccccggccctgcccccgctggcccaacccctgctccagagacaaatgcccccaaccaccccagcccagcggagtacgttgaggtcctccaggagctgcaacggctggagtcaagactgcaacccttcctccaacggtattacgaagtcctgggggcagccgcgactacagattataataacaatcatgaaggacgtgaagaggatcagagactcatcaacttggtgggtgagtccctgcgcttactgggaaatacatttgtggctctgagcgacttacgctgtaacctggcttgcaccccgccacgccatctgcatgtggttcggcccatgagtcactacaccacaccgatggtgctgcagcaggctgcgattcccatccagatcaacgtgggcacaacagtgacaatgacagggaacggcacacgtccacctccgactccaaacgctgaggctcctcctccgggcccgggacaggctagttccgtggctccctccagtacaaatgtagagtcttccgctgaaggggctcctccgcccggtccagcacctccccccgcgacctcacacccacgtgtaatccggatttctcatcagtcagttgaaccagtggtgatgatgcacatgaacatccaggacagcgggacccaacccggcggggtgcccagtgcaccaactggacccttgggtcctcccggacacgggcagaccctggggcagcaagtgccagggtttccaactgcccccacccgagttgtgatagcccgccctactcctccccaggccagacctagtcatccaggcggcccccccgtaagcggaacactccaaggcgccgggctcggaaccaacgcttctctggcacagatggttagcggattggttgggcagcttctgatgcaacccgtgttggtggcccagggaacaccaggcatggcaccgccaccggctccagccacggcttccgccagcgctgggactacaaatacggccactactgctggacctgcccccgggggtcccgctcagcccccccctactcctcagcccagtatggcagatttgcagttttctcagctcttgggcaacctgctcggaccggcagggcccggagccgggggacctggcgttgctagccctaccattactgtggctatgcccggggttcccgcattcctgcaagggatgaccgattttcttcaggcgacacagaccgctcctccacctcctccgccaccgccaccgccaccgcccgcaccagaacaacaaaccatgcctccccccggcagccccagcggcggggccggaagcccaggcgggcttggccttgagtcgttgagccctgagtttttcaccagtgtcgtgcagggggtcctgagcagtctgctcggttcattgggggcccgggcaggctcctccgagagcatcgccgcgttcattcaaaggctctccggaagctccaatatcttcgagcccggagctgatggagcccttgggttcttcggtgctcttctttccctgctgtgtcagaattttagcatggtcgatgtcgtgatgctcctgcatggtcatttccaacctctgcagcgcctgcaaccgcagctgcggtccttcttccatcagcactatctcgggggccaggagcctactccatctaacattcgaatggctacccacacactgatcacgggcctggaggaatacgttagggagtccttcagccttgtccaagtccagccaggagtcgatatcatcaggactaacctggagtttctccaggagcaatttaacagtatcgccgcacacgttctgcactgtaccgatagtggctttggagctcgtctgttggagctttgtaatcagggcctattcgaatgcttggctctgaatcttcactgtttggggggacagcaaatggaactggcggcggtcatcaacgggcggattagaagaatgtccagaggagtaaacccgtccttagtgagctggcttacaacgatgatgggacttcggctccaagtggtgcttgaacatatgcctgtgggcccggatgccatcttacgatacgtgagacgggtgggcgaccctccccaaccattacccgaagagccaatggaggtacaaggcgccgaacgagcatccccggagccacagcgggaaaatgcatcccctgccccgggtacaaccgcagaggaagcgatgtcaaggggtcctccaccagctcctgaaggtggtagccgagacgagcaagatggcgcaagtgccgaaacggagccttgggctgctgccgtgcctcccgagtgggtgcctattatccaacaagatatccagtcacagcggaaggttaagccacagcctccactgtctgacgcctacctaagcgggatgcctgccaagcggcggaagacaatgcaaggcgaggggcctcaactactgctctctgaggccgtgtcaagggccgcaaaggcggccggggcccggccattaacctcaccagagagcctttcgcgagatctggaggcccctgaagtccaggagtcatataggcagcagctgcgttccgacattcaaaaacgcttgcaggaggatccgaactattcccctcaaagatttcccaatgcccagcgggcctttgcagacgacccctag

SEQ ID NO: 180314 - DNA, 3381 bp, synthetic construct
  misc_feature 1..3381: note = Description of Artificial Sequence: Synthetic coding sequence
  source 1..3381: mol_type = other DNA
atggagcccaacgacagcaccagcaccgccgtggaggagcccgactccctggaagttttagtaaaaactctcgacagccaaacccgaacattcatagtgggcgctcaaatgaacgtgaaagagtttaaggagcatatcgccgcgagcgtttctattccctcggaaaaacagcgactgatctaccaggggcgtgtgctgcaggacgataagaagctccaggaatacaacgtgggcggcaaagttattcatctcgtggaacgtgccccaccgcagacacacctgccctccggggcatcctccggaacaggctcggccagcgctactcatggaggcgggtccccaccagggacacgcggccctggcgcttcggtccacgataggaacgccaacagttacgttatggttggcaccttcaacctgccctctgatggatcagccgttgacgttcacatcaacatggaacaggcccccattcagtctgagcctcgggtgcggctagtcatggcgcagcatatgataagggatatccaaacactgctgagccgaatggagtgccgcgggggcccccaacctcagcatagtcaacctcccccacagcccccggccgtgactccagaacctgtcgcactgtcctcccaaaccagtgaacccgtcgagtccgaagcaccccctagagagcctatggaagccgaagaggtagaggagagagctcctgcccaaaacccagagttgacccccgggcctgccccagctggacccacaccagctcctgagactaacgctcctaatcaccccagcccagctgagtacgtcgaggtgttacaggaattacaaagacttgaatcccggctgcaaccctttctacaacgatactatgaagtgctgggagctgctgctaccaccgactataacaacaaccacgaagggcgggaagaggaccagcggttaatcaacctggtgggggagtcattacgtttgctgggcaatacttttgttgccctttctgatctgcgttgcaacctggcatgtaccccaccgcgccatctacatgttgtgcgccccatgtcacactatacgacacctatggtgctgcagcaggccgctatccccatccagattaacgtcggcacaactgttaccatgactggtaatgggacccgcccccccccaacacccaacgccgaggccccccctcctggccccggccaggcttccagcgtcgcaccatcatccacaaatgttgaaagttccgccgaaggggcccccccccctgggcctgccccccctcccgcgacttcacatccacgggtcattaggatctcccatcaaagtgtagagcctgtagtcatgatgcacatgaatatccaggattcaggaacccagcctggcggcgtaccctcagctcccaccggccccttggggccacccgggcatggacagaccctgggccagcaagtgcccgggtttccaactgccccaactagagtcgtcattgcccgaccgactccgccccaagcccgtccaagtcacccaggaggccctcccgtgagcggaactttacagggcgccggcctcggaaccaatgcatcactcgcgcagatggtttctggtctagttgggcagctgctaatgcagcccgtgctcgtggctcaaggtacgcccggcatggcaccacccccggcgcccgcgacagcaagtgcgagcgctggtaccaccaacactgctaccacagctgggcctgctcccggaggtcctgcccagccaccacccactccccagcctagcatggctgatctgcagttttcccagctgctgggtaatttgctcggcccagctggacctggcgcaggcggccccggggtagcatcccccacaattaccgtggcgatgcctggcgtgcccgccttcctgcaggggatgaccgactttctacaggcgacgcagactgcaccaccgccacctcccccaccgcccccacctccgccagcccccgagcaacaaaccatgccaccacccggctctccaagcggtggggccggatccccaggggggctcggtctcgaaagcctgagtcccgagttttttacgagcgtcgtccagggagtgctgagtagcttactcgggagtctcggagctagagctggctcctctgaatcaattgcagctttcatccagcggctgagtggcagttcaaatatcttcgaacctggtgccgacggagctctcggcttttttggggctctcctgagcttgttgtgtcagaattttagcatggtcgacgttgtgatgctcttgcacggccatttccagccacttcagcggctgcagcctcaacttcgttccttcttccatcagcactatctgggaggccaggagcccaccccctccaacattcggatggcaacccacacactgattacagggctggaagaatacgtcagggagagcttctccttggtccaagtgcagccgggggtggacataatccggaccaaccttgagtttctgcaggagcagtttaatagcatcgccgcacacgtacttcactgtactgactcaggcttcggagcacgcctgctcgaactgtgcaaccagggactctttgaatgcctggccctcaacctgcactgcttggggggacagcaaatggagctcgccgcggttatcaacggaaggattcggaggatgtcaagaggagttaatccttcacttgtgagctggctcactaccatgatgggtctccgccttcaagtcgtcctggagcacatgccggtaggccctgatgccatattgaggtacgtccggagagtgggggatccaccacaacctctgcctgaagaaccaatggaggtccaaggcgccgaacgcgcaagcccggagccacagcgggagaatgcatctcccgctcccggtactaccgccgaggaggctatgtcccgaggccccccccctgcacctgaaggcggctctcgggacgagcaggatggggcctccgccgaaactgagccctgggctgccgcggtgccaccagaatgggttccaattattcagcaggatatccaaagccagagaaaggtcaaaccacagcccccgctcagcgacgcctatttgtccggcatgccagcaaaacggcgcaaaaccatgcagggagagggcccacaactcctcctcagcgaggcagtctccagagccgccaaggccgcaggtgccagacctttaacaagtcccgagagcctatcccgcgacctggaggcccccgaggtgcaagaatcatatcggcaacagctcagatcagatattcagaagaggttacaggaggaccctaattacagcccccagaggttccctaatgcccaaagagcctttgctgatgacccctag

SEQ ID NO: 180315 - DNA, 411 bp, synthetic construct
  misc_feature 1..411: note = Description of Artificial Sequence: Synthetic coding sequence
  source 1..411: mol_type = other DNA
tgacggatgagccggggcgtgaaccccagcctggtgagctggctgactacgatgatggggttacggttgcaagtcgtcctcgaacatatgccagtgggcccagacgccatcctgcgatatgttcggagggtcggcgatccaccacagcccttgcctgaggaaccaatggaggtgcagggggctgagagagcatcaccagagccacaggagtgggttccaattatccaacaagacattcagagccagaggaaagtcaagccgcagcccccactgtcggacgcctacctttctggaatgcctgcgaaaagacggaagctgagatccgatatccaaaaacgcctgcaggaggatccgaactactcacctcagcggtttcccaacgcacagcgagctttcgcagacgatccttag

SEQ ID NO: 180316 - DNA, 789 bp, synthetic construct
  misc_feature 1..789: note = Description of Artificial Sequence: Synthetic coding sequence
  source 1..789: mol_type = other DNA
atggagcccaacgacagcaccagcaccgccgtggaggagcccgacagcctggaggtgctggtcaaaactttggacagtcagacacgcacctttattgtcggcgcccagatgaatgtgaaagaattcaaagagcacattgccgcctctgtctccattcctagcgaaaaacaacgactgatctaccaaggcagggtgctgcaggatgataaaaaactgcaagaatacaatgtcggcggtaaggtaattcatctagtggagcgagcccccccgcagactcacttgccttctggcgcctcatcgggaacaggcagcgcatcagcgacacacggtgggggaagtccaccaggcactaggggtcctggagcttcagtccacgatcggaatgccaactcatatgttatggtgggaacctttaacctgccctctgatggctccgccgtcgacgttcacattaacatggaacaggcccccattcagtctgagcctcgagtgaggttggtaatggctcagcacatgattcgggatatccagactctattgagtcgaatggaatgtaggggtggtcctcagccacagcattcgcagcctccaccgcaaccacctgccgtgacacccgaacctgtcgcattgagctcccagaccagtgaaccggtggaaagcgaggccccccctcgtgagccgatggaggctgaggaggtggaagagagggccccagcacagaatcccgaattgacacctggccctgcacctgccggtcccaccccggctccagaaacaaacgccccatag

SEQ ID NO: 180317 - DNA, 735 bp, synthetic construct
  misc_feature 1..735: note = Description of Artificial Sequence: Synthetic coding sequence
  source 1..735: mol_type = other DNA
atggagcccaacgacagcaccagcaccgccgtggaggagcccgactccctggaagtgctggtgaagactctagattcccagacaagaacctttattgttggcgcacaaatgaacgtcaaggaatttaaagaacatattgccgcatcggtgagcatcccttccgagaagcagaggcttatctaccaggggcgagtgcttcaagacgataagaaactccaggagtataatgtgggaggcaaagtaatccatttggtggagagggctcctccacagacccatcttccatctggggcatcttccggcaccgggagcgccagtgctacacacggcggggggagcccacctggtactcgcgggccgggggccagtgttcatgacagaaacgcaaacagctatgtgatggtgggaactttcaaccttcctagcgagcctcgcgtaagattagtgatggcccagcatatgattcgcgacatacagaccttgcttagtagaatggaatgtaggggaggaccgcaacctcagcattcccagcctccaccacaaccaccagcagtcactccagagccagtggctttgtcttcacaaaccagcgagcctgtggagtccgaggcccccccacgggagcccatggaggcggaggaggtggaagaaagggcgcctgcacaaaatccagagctgacccccggaccggcacccgcaggaccgaccccggcccctgagacaaatgctccttag

SEQ ID NO: 180318 - DNA, 594 bp, synthetic construct
  misc_feature 1..594: note = Description of Artificial Sequence: Synthetic coding sequence
  source 1..594: mol_type = other DNA
atggagcccaacgacagcaccagcaccgccgtggaggagcccgactcactggaggtacttgtgaaaacattggattcccagacacggacattcatcgtcggtgcccagatgaacgttaaagaattcaaggaacatatcgccgcgagtgtctcaattccttccgaaaaacagcggttgatttatcagggccgggtcttacaagacgacaagaaactccaagagtataacgtaggaggtaaggtaatccatctggtagaacgggcgcccccgcagacgcacctcccttctggcgccagcagcggcactgggagtgccagcgcgacacatggtggaggtagccctccaggcaccagaggacctggggcctctgtgcacgaccggaacgctaattcttacgtgatggtaggtacttttaatttgcctagtgatggcagtgccgtggacgttcatatcaatatggagcaggctcccattcagtctgagcccagggtgcggttagttatggcgcagcacatgatccgtgacatccagacattactctctaggatggagtgcaggggaggcccccagccgcaacacagccagccaccgtag

SEQ ID NO: 180319 - DNA, 621 bp, synthetic construct
  misc_feature 1..621: note = Description of Artificial Sequence: Synthetic coding sequence
  source 1..621: mol_type = other DNA
atggagcccaacgacagcaccagcaccgccgtggaggagcccgactctttggaagtgctcgtcaagacactagactctcaaactcggaccttcatcgttggggctcagatgaatgtcaaagaattcaaagaacatattgctgcctcggtcagcatcccatccgaaaagcagcggttgatataccaagggcgcgtcctgcaggatgacaagaaactccaggaatataacgtggggggaaaggtgatccacttggtggaacgcgctccgccccagacccacctgccgagcggcgcctccagtggtacgggatctgcctctgcaacacatggagggggctcgcccccaggaacccgcgggccgggggcatctgttcatgatagaaacgccaactcctatgtgatggtgggaacgtttaacctgcctagcgaacctagagtgcgcctggtgatggcacagcatatgatccgggacatccagacccttttatcacgaatggagtgccgcggaggacctcaacctcagcacagccagcccccccctcagccccccgccgtcacacccgagcctgtggcactgagcagtcaaacatccgagcctgttgagtctgaggcgccaccttag

SEQ ID NO: 180320 - DNA, 735 bp, synthetic construct
  misc_feature 1..735: note = Description of Artificial Sequence: Synthetic coding sequence
  source 1..735: mol_type = other DNA
atggagcccaacgacagcaccagcaccgccgtggaggagcccgacagcctggaagtattagtgaaaacccttgacagccagacacggacctttatcgtgggggcccaaatgaacgtgaaggagttcaaggaacacattgcagctagcgtgtccattccctcggagaagcagcggctcatctaccagggtcgggtcctgcaggacgataagaagcttcaggaatataacgtgggagggaaagtgatacatctggtggagagggcccccccccaaacgcatctcccgtctggcgcctcttctgggactggctcagcgtcagcaacccacggaggtggctccccccccgggacgagaggtccaggagcgtcagtgcacgaccgcaatgctaattcttatgtcatggtcggcacctttaacctgccaagcgaaccccgagtaagattggtgatggctcagcacatgattcgggatatccaaaccttacttagcaggatggagtgccgaggggggccccaacctcagcattcccaacctcccccccaaccccctgcggtaacccccgagccggtcgccctttcctctcagactagtgagcccgtcgagtccgaagccccgcctagagagccgatggaagctgaagaagtggaagagagggcccctgcccagaatcctgaactgacacctggaccagctcccgccggcccgactcccgctccagagaccaacgctccctag

SEQ ID NO: 180321 - DNA, 3381 bp, synthetic construct
  misc_feature 1..3381: note = Description of Artificial Sequence: Synthetic coding sequence
  source 1..3381: mol_type = other DNA
atggagcccaacgacagcaccagcaccgccgtggaggagcccgactccctggaagtcctggtcaagacgcttgactcccagacgagaaccttcattgttggagcccagatgaacgtgaaggaattcaaggaacatatcgccgcaagcgtgtcgattccatctgaaaagcagcgactcatttatcaggggagagttctacaggatgataaaaaactccaggagtacaacgtggggggaaaggtaatccacctggttgagagggcaccccctcagacccaccttccttcgggagcctcatcagggaccgggagcgcaagcgccacgcacggtggggggagcccgccaggaacccgaggccccggggcaagtgttcacgaccggaatgctaatagctacgtgatggtcggaactttcaacttaccaagcgatggaagcgcagtggatgtccatatcaatatggagcaggcccctattcagagcgagcccagagtgaggctcgtgatggcccagcacatgatccgagacattcagactctgctgtctaggatggaatgtaggggtgggccacaaccacagcatagccaacccccaccccagcctccagctgtgacccccgagccagtggcgctgtcatcacagacaagtgaacccgtcgaatcagaggcaccaccacgggagcccatggaagcagaggaggtggaagagcgagccccagcccaaaacccggagctgacgccgggcccagcgcctgcaggacccacccctgcacctgagactaacgctccgaatcacccttcgccagctgagtacgtggaagtgcttcaagagctgcagcgtctggagtcacgcctccaacctttcctccagcgatattacgaggtactgggcgccgcagccacaacagattacaacaacaaccatgagggacgtgaggaagaccagcgcttaataaacctcgtgggggagtctttgaggctgctaggtaacacatttgtcgccctctccgacctccgctgtaacctggcgtgtacccccccgcgacaccttcatgtggtgcgacctatgtctcactatacaaccccaatggtcctgcagcaggctgccatccccattcagatcaacgtaggtactactgttactatgactggcaacgggacccgtccgccgcccacgccaaacgccgaagcccctcctccaggcccgggtcaggcctctagcgtggcccccagctcgaccaacgttgagagcagcgccgaaggagccccacccccaggaccagcgcctccacccgccacaagccacccacgagtcatacgaatctctcaccagtcagtagagcctgtggtaatgatgcatatgaacatacaggacagtgggacacaacctggaggggtgccttctgcccccaccggccccttggggccccccggtcatggtcagactctgggacaacaagtccccggtttccctaccgcacctactagagtcgtgattgctcggccgactccccctcaagccagaccaagccaccccggaggcccccctgtatctggcacccttcagggagcaggtctgggcactaatgcttcactcgcacaaatggtatcaggtctggtgggccagctattgatgcagcctgttttggtcgcacaggggaccccagggatggcgccacctcccgctccagcaacggcatccgcctctgctggaacgacaaataccgccactacggccggccctgcacctggtgggcctgcccagccacctccaaccccacaaccatcgatggcagacctccagttttctcaactccttggaaacttattgggccctgctggcccgggggcgggggggtctggtgtggcttcacccactattactgtcgctatgcccggggtgcccgcatttcttcagggtatgacggattttctccaggcaacacagacggccccacccccccctccaccccctcctccaccacctcccgctccggagcagcaaactatgcccccccccggatcccccagcggtggcgctggatcccccggaggactcgggctggaatcactgagcccagaatttttcacctctgtggttcagggtgtactaagtagcctcctcggtagcttgggagctagagcagggtcgagcgagagcatagcagcatttattcagcggctcagtggatcttccaatatcttcgaacccggtgccgacggggccttgggatttttcggagctcttctttctctcctgtgccagaattttagtatggtggatgtggttatgctccttcacggtcatttccagcccctgcagcgcttacagcctcagcttcgatccttcttccatcagcattacctgggtggacaggagccgactccgtccaatatcagaatggcgactcacacactgatcacaggtttggaggagtatgtgagggaaagcttctcattggtgcaggttcagccaggggtcgacattattagaactaatctggagtttctgcaggagcagttcaacagtattgcagcccatgtgctgcactgtactgactctggattcggcgcgaggctcttggagttatgcaatcagggactgtttgagtgcctggccctgaacctgcactgtctcggtgggcagcagatggaactggccgcagtgattaacggcagaatcagacgcatgagtcggggagttaatccatcgttagtgtcttggttgacgacaatgatgggcttgagactgcaggtggtgctggaacacatgccagtggggcctgatgccatccttaggtatgtgaggagggtaggcgacccccctcagccgttgccagaggagcccatggaggtgcaaggtgccgaacgtgccagcccggagcctcagagagagaatgcgtctccagcacctggaaccacggctgaggaggctatgagtagggggccgccccccgctccagagggggggagtcgggatgagcaagatggggccagcgcggaaactgagccatgggcagctgccgtacctcccgaatgggtaccaatcattcagcaggacatccaaagtcagaggaaagtcaaaccacaaccccccttgtctgacgcttacttgtctggcatgcccgccaagcggcggaaaaccatgcaaggcgagggaccccaattgttactctcagaggctgtgtcccgagcagctaaggccgccggtgccaggcctctcacatctcctgagtcgttgtcccgcgatttagaggcgccagaggtccaggagagctacagacagcaactgagatctgacatacagaaacgcctgcaggaggacccaaactatagtcctcaaagattcccgaatgcacaaagggcttttgccgacgacccttag

SEQ ID NO: 180322 - DNA, 735 bp, synthetic construct
  misc_feature 1..735: note = Description of Artificial Sequence: Synthetic coding sequence
  source 1..735: mol_type = other DNA
atggagcccaacgacagcaccagcaccgccgtggaggagcccgactctttggaagtactggtcaaaacactggacagtcagacccggacctttatcgtaggtgcacagatgaacgttaaagagtttaaggagcatatcgctgcttcagtgtctataccctctgaaaagcagaggcttatctaccagggtcgcgtgctccaagacgacaagaaactgcaagaatacaacgtcggcggaaaagttatacatcttgtggaacgtgctcccccacaaacacatctcccgtctggagcctcgtccggcactggctctgccagcgcgactcacggcgggggctctccgccaggcacccgcgggccaggtgcctcggttcatgaccggaatgcaaactcttacgtcatggtgggcacttttaacttaccttctgagccacgtgtgagactggtcatggcccagcacatgattcgggacatacaaactttgctgagtcggatggaatgtcgggggggcccacaacctcaacattcacagcccccaccccagccgccagccgtgacaccagaacctgttgctctgagttctcagaccagtgagccggtcgagagcgaggcacccccccgcgagccaatggaagcagaggaggtagaagaacgcgcccctgcccaaaatccagaacttacgcctggtcctgctcctgcaggccccacaccggcccccgaaacaaatgccccctag

SEQ ID NO: 180323 - DNA, 717 bp, synthetic construct
  misc_feature 1..717: note = Description of Artificial Sequence: Synthetic coding sequence
  source 1..717: mol_type = other DNA
agcagcgccgagggcgcccccccccccggccccgcccccccccccgccacttctcacccaagagtgattagaatatcccatcagtcagtcgagccagtagtgatgatgcatatgaacattcaaggacctctcagtctgtccccttgcccagattctggcacgcagcctggaggcgtgccgagtgcacctacaggacctctgggccccccagggcacggccagacgctggggcagcaggtaccgggctttcctacagcaccaacaagagttgttatcgctagaccaactcctcctcaagcaagacccagccacccagggggccctccagtctctggaactctccagggggccggtctcggcaccaatgccagtctcgcgcagatggtttccggcctggtgggacaattgttaatgcagcctgttctggtcgcccaaggcactcctggcatggcgccacccccagcccctgccaccgccagcgcctcggctggtaccactaacaccgcgactaccgccggccctgcccccggagggcctgcgcaaccgccccccacccctcagcccagcatggcagacctgcaattcagtcagttgttgggcaatctcctcggcccggcaggacccggcgcaggtgggagtggcgttgcctctccaaccataacagtcgctatgcccggtgtccccgctttcctgcaaggtatgactgactttctgtag

SEQ ID NO: 180324 - DNA, 735 bp, synthetic construct
  misc_feature 1..735: note = Description of Artificial Sequence: Synthetic coding sequence
  source 1..735: mol_type = other DNA
atggagcccaacgacagcaccagcaccgccgtggaggagcccgacagtctggaggtgttggttaaaacccttgactcccaaaccagaacttttatcgtaggtgcccagatgaatgtgaaagaattcaaagagcacatcgcggccagcgtgtctatcccatcagaaaagcagagactcatctaccaggggagagtgctccaagacgataagaaactgcaggagtataacgttggaggaaaggtgattcacctcgtggagagagccccaccacaaacacatctcccttcaggcgcctcctccggcacaggatcagccagtgctacgcatggcggcgggagcccacccggcacacggggtccaggagcttccgtgcacgacaggaacgctaactcctatgttatggtgggcacctttaacctgccgtccgagcctcgcgtgaggcttgtcatggcccaacacatgattagagacatacaaaccctgctctcacgtatggagtgtcgcggtgggcctcagcctcagcattcccagccccctccacaaccccctgctgttacacccgagccagtggccctgtcgagccagacctcagaacctgtggaaagtgaagcgcccccaagagaacctatggaggcagaggaggtcgaggagcgggcccccgcgcagaatcccgagctgactccaggtcctgctcccgctgggccgacacccgccccagagacaaacgctccatag

SEQ ID NO: 180325 - DNA, 2232 bp, synthetic construct
  misc_feature 1..2232: note = Description of Artificial Sequence: Synthetic coding sequence
  source 1..2232: mol_type = other DNA
atggagcccaacgacagcaccagcaccgccgtggaggagcccgactccctcgaggtactggtgaagacattggactcccagactcggacttttatcgtcggcgctcagatgaacgttaaagagttcaaagaacacattgccgcttcagtgtcaattcctagtgagaaacagagactaatttaccagggccgcgtcctgcaggatgataaaaagttgcaggaatacaacgttgggggaaaagtgatacatctggttgaaagagccccaccacaaacacatctcccgtccggcgcatcgtctgggaccggaagtgcctccgcaacccatggtggtgggagcccccccgggacgagggggccgggtgcctccgtgcacgatagaaacgctaacagctacgtgatggtggggactttcaacctgccctccgatgggtcagccgttgatgttcacatcaacatggagcaggcaccaattcagtcagagccacgggtgcggttagttatggctcaacacatgatacgggatattcaaacgttgctgagcagaatggagtgccgggggggaccacaaccacagcacagccagccgcctcctcagcctcccgcggtgacgcctgagcccgtggctctgtcctctcagactagcgaacccgtcgaatcagaagcaccaccgcgcgaaccaatggaagccgaggaggtggaggaaagagcacccgcccaaaatccagaactgacccctggtcctgccccagcaggacccactccggccccggagacaaatgctccaaatcacccttccccggcggaatatgtggaagttctgcaggagctgcagcgattggaaagcagactgcagcctttcctgcaaaggtattacgaggtgctgggcgccgcagctaccaccgattataacaataaccacgagggacgcgaggaagaccaacgattgattaacctcgtgggtgaatccctgaggttgctgggtaatacattcgtcgcattgagtgatctgaggtgtaacttggcctgtaccccgccacggcatctacatgtggtccgtcctatgtcacactataccacccccatggtgttacagcaggctgcaatccccattcaaatcaatgtaggaaccacggtcactatgaccgggaacggtacccgacctcctccaactccaaatgcagaggcacctcctccaggcccgggccaggccagctctgtggctccctcttcaaccaatgtggaaagctccgcagaaggagcaccaccaccagggccggctcccccacctgccacctcacacccgcgagtcatccgaatctctcaccagagtgtcgagcccgtagtgatgatgcacatgaatatccaggactcaggcacacagccaggaggcgtgccgtctgctccgaccggccccttggggccaccaggtcatggccagacacttggatctacactgatccagctcccttccctgccccctgagttcatgcacgcggtcgcccaccagattacccatcaagctatggttgcagcagtcgcctcagcagctgctggacagcaggtcccaggctttcctactgcacccacgagagtcgtgatcgcccgtcccacccctccccaggcaagaccctcgcacccaggcgggccacctgttagcggaacgttgcagggcgctggattagggacaaatgcttcccttgcacagatggtgtctggtcttgtgggccagttgttaatgcaaccggttctggtggctcagggcactccagggatggctcctcctccggcccccgccacagcatccgctagcgctggcactaccaataccgcgaccactgcaggcccggctcccggcgggcctgcccaaccaccacccactccccagccaagtatggccgacttacaattctcccagcttctcggaaatctgctggggcccgcaggccctggggcaggaggcagtggggttgcgagtccgactataactgtggccatgccaggggtgccagcgttcctgcagggcatgaccgactttctgcaggcaactcagactgctcctccgccccccccaccccctccacccccaccaccggctcccgaacagcagacaatgccccccccagggtctccatccgggggtgcagggtcccccggaggcctgggactcgagtcactgtcacccgagtttttcaccagcgtcgtgcaaggcgtcctgagcagcttgctctag

SEQ ID NO: 180326 - DNA, 477 bp, synthetic construct
  misc_feature 1..477: note = Description of Artificial Sequence: Synthetic coding sequence
  source 1..477: mol_type = other DNA
atggagcccaacgacagcaccagcaccgccgtggaggagcccgacagtctggaagtgttggtgaagaccctcgacagccagaccaggaccttcatcgtcggagcacagatgaacgtgaaggagtttaaagagcacattgccgccagcgtaagcattcccagtgaaaaacaacgcctgatttatcaggggcgggtgttacaggacgataaaaagcttcaggagtacaatgttggcggaaaggtgattcatctagtcgagcgtgctcctcctcaaacacatctcccttccggcgcaagctcaggaacaggtagcgcctcagcaacccacgggggaggcagccctccaggtactcgaggtcctggcgcctctgtgcacgatcgtaatgcgaactcatacgtgatggtgggcactttcaatctgccgtctgatggctccgccgtcgatgtccacatcaatatggagcaagcacccatttag

SEQ ID NO: 180327 - DNA, 681 bp, synthetic construct
  misc_feature 1..681: note = Description of Artificial Sequence: Synthetic coding sequence
  source 1..681: mol_type = other DNA
tgaagcggcttcggcgcccggctgctggagctgtgcaaccagggcctttttgaatgtttggctctgaacctgcattgcttgggggggcagcagatggagttggcggcagtcatcaatggaaggatcagacgcatgagcaggggagtgaatccctctctggtgtcctggttgaccaccatgatggggctgcgcctgcaagtggtcttagaacacatgccggtcggacccgacgcaatcctcaggtatgtccgacgggtgggcgatccccctcagcccctgccagaggagccaatggaggtgcaaggagcggaacgagcatctcccgagccacagcgcgaaaacgccagtcctgcaccgggcaccacggcagaagaagccatgtctcgaggaccacctccggcccccgaaggcggctctagggatgagcaggacggagccagtgccgagactgaaccttgggcggcggcggtaccaccagaatgggtaccaataatacaacaggacatccaaagccagcgcaaagtgaaaccgcaaccaccgctatctgacgcctacctatcaggtatgcctgctaagcgtcggaagctgaggtcagacattcagaagcggttgcaggaggacccaaattactctcctcagcgctttccaaatgcccaaagggcttttgcagatgacccctag

SEQ ID NO: 180328 - DNA, 717 bp, synthetic construct
  misc_feature 1..717: note = Description of Artificial Sequence: Synthetic coding sequence
  source 1..717: mol_type = other DNA
agcagcgccgagggcgcccccccccccggccccgcccccccccccgctacttctcacccacgggtgatccggattagtcaccagtccgtggaacccgtggtcatgatgcacatgaacattcagggaccacttagtctgtccccttgtcctgacagtggaactcaacccgggggagtcccctccgctcctactgggcccctgggacctcctggtcacggccaaactctggggcagcaggtgcctggatttcctaccgcaccaacccgggtcgtcatagccaggccaacccctcctcaggccagaccatcccatcccggcgggcccccggtctcaggtaccctgcagggcgctggccttggcaccaacgcttcactagcccagatggtctctggtctcgtgggtcagttgttgatgcagcccgtactcgtcgcccagggcacaccagggatggcaccccctcctgctccagccactgcgtcagcgtctgcggggactaccaacacagctactacggctggccccgccccaggaggtccagcccagccgccaccgacgccacaaccttcaatggcggatttgcagtttagccaactcctggggaacttgctagggcccgcagggcccggcgccggcgggccaggcgtggcatcacccactatcacagttgctatgccaggagtccccgccttcctgcagggaatgactgattttttgtag

SEQ ID NO: 180329 - DNA, 3381 bp, synthetic construct
  misc_feature 1..3381: note = Description of Artificial Sequence: Synthetic coding sequence
  source 1..3381: mol_type = other DNA
atggagcccaacgacagcaccagcaccgccgtggaggagcccgactcactggaggttctggtcaagactctcgacagccaaactagaacatttattgtgggagctcaaatgaatgtgaaagagttcaaagagcacatcgccgcaagtgtgtcaataccctcagagaaacagcgtctgatctatcagggccgagtgctccaggatgacaaaaagctgcaggagtacaatgtgggtggtaaggtgattcacctggtggagagagctcctccccagacacacctgccaagcggtgcctcgtctggcaccgggtctgcctccgcaacccacggtggggggtcccctccagggacacgaggcccgggcgcgtcagtccatgatcgaaacgcgaactcctacgtaatggtgggcaccttcaatcttccaagcgatgggagtgctgtggacgtgcatatcaacatggagcaggcccctatacagtctgaaccacgcgtgcggctagtcatggcacagcatatgattagggacattcaaactctgctaagtcgtatggagtgccgcggaggtccacagccacagcattcccagccccctccacagccccccgcggtgaccccagagcctgtggccctctcaagccagacttctgaacccgtagaatctgaggccccaccccgtgaacccatggaagctgaagaagtcgaagagcgggctcccgcccagaatcctgagctgactcccggccctgcccccgctgggccaacgcccgctccagagactaacgcccccaatcatccctctcccgcggagtacgtggaagtcctgcaggagctccagcggctggagtccagactccagccttttttgcagagatattacgaagtgctgggtgccgccgccaccacggactataacaacaatcacgagggacgcgaagaggaccaacgactgatcaatcttgtcggagagtcactccggctcctcggaaatacctttgtcgccctatccgatctgcgctgcaaccttgcttgcacccctcctaggcacctgcacgtggtgcggcccatgtctcactacacaacccctatggtgcttcagcaggccgccatcccaattcaaatcaacgtcgggacaacagtaactatgacaggcaacggcacaagaccgcctcccaccccaaatgccgaggcccctcccccgggtccaggacaggccagcagcgtcgcaccatcctctaccaatgtcgaaagttccgccgagggggcgcctccgcccggcccagctccgcctcctgctacttcacacccaagggtgatacggatatcccaccagtccgtcgagccagtggtaatgatgcatatgaacattcaggatagtggtacccagcctgggggcgtcccatctgcaccgacaggcccactgggtcctcctggccatgggcagacattagggcagcaggtgcctggatttcctacagcccctacaagggtggtaatcgctcgccccactccacctcaggcacggccctcacaccccggcgggcccccggtgagtggcacactgcagggcgccggcctagggactaatgccagcctagctcagatggtgagcggcttggttgggcagctgctgatgcagccggtactcgtagctcaaggaacgccaggcatggctccgcctccggctcccgcaactgcttcagccagcgccggcacaaccaataccgccactactgctggaccggctcctgggggacctgcacagcctccacctacaccacagcctagtatggccgatttgcagttttctcagctcctaggaaatctgctggggcccgctggcccaggtgctggaggtagcggtgtcgcctcaccgaccatcacggtggctatgcctggcgttccagcattcctgcagggcatgactgattttctgcaggcaacccagactgcaccccccccccctccacccccaccccctccacctcctgctcctgagcagcagaccatgccgccgcccgggagccccagtggcggcgcagggtcacccgggggactagggttagaatccttatcaccagaattcttcactagcgtggtccagggagttttaagcagcctgctcgggtctctgggggcccgagccggatcatctgaaagcatcgccgcattcatccaacgtctgagtgggtcttctaatatctttgagccaggggccgatggtgctcttgggttctttggcgccctcctgtctcttctttgccagaacttttccatggtcgacgtcgttatgttgctgcacggacactttcaacccctgcagagactacagcctcagctgagaagtttttttcatcaacattatctggggggacaggagcccactccctctaacatccgaatggctacccatacccttatcaccggcctggaggaatacgtgcgagagagcttcagcctcgtacaggttcagcctggggtggacatcatccgaaccaacctggagtttctccaggagcaatttaattcaatcgctgcacacgtcctccactgcaccgactccgggttcggggcccggcttctggagctgtgtaaccaggggttatttgagtgcctagcactcaatctgcactgtctcggtggccagcagatggagttggccgccgtgattaacggccgcattcgccgaatgagtaggggagtgaatccctctctggtgtcctggttgaccaccatgatgggactcaggctccaggttgttttagagcacatgccagtaggaccggacgccatactgcgatacgtgcgcagggtgggtgatccacctcaaccgctgccagaggagccaatggaagtccaaggagcagagcgggcatcccccgaaccacaacgggaaaatgcaagtccagctccgggcacaacggccgaggaagccatgtctaggggtccacccccagccccagaggggggaagtcgagacgagcaggatggtgcatctgccgaaacggagccatgggccgccgccgtgcctcctgaatgggttcccattatacaacaggacatccagagccagagaaaggtgaaaccacaaccaccactgagcgatgcctacctcagcggtatgccagcaaagcgacgtaagactatgcagggagaggggcctcagctgcttttaagcgaggctgtttcccgcgctgccaaggcagcaggtgctcgccccctgactagcccagagtccctgagccgcgacctggaagcccctgaagtacaggaaagttatcgccaacagctacggagcgatatacagaagaggctgcaggaagacccaaactactctccccagcgtttcccgaacgcacagcgggcatttgcagatgatccctag

SEQ ID NO: 180330 - DNA, 789 bp, synthetic construct
  misc_feature 1..789: note = Description of Artificial Sequence: Synthetic coding sequence
  source 1..789: mol_type = other DNA
atggagcccaacgacagcaccagcaccgccgtggaggagcccgactctctcgaggtgctggtgaagactctggatagccagactcggaccttcatcgtaggtgcccagatgaatgttaaagaattcaaagagcatatcgcagcatccgtatctattccaagcgaaaagcagaggctgatctatcaagggcgtgtcctccaagacgataagaaattgcaggagtataatgtcggtgggaaggtgattcacttggtggaaagggcccctccccagacccacctgccgtcaggggctagctcaggcacgggcagcgctagcgcgacccacggtggaggctccccccctgggacaagaggcccgggggcgagcgtccatgatcgcaacgcaaactcttacgtcatggtaggcacgttcaatctcccttcagacgggtcagccgtcgatgtgcatattaatatggagcaggcacctatccagtctgaaccccgcgtgcgcttagttatggctcagcacatgataagagatattcagacgcttcttagtaggatggaatgccggggcggacctcagccacagcactctcagcccccgccccaaccccccgctgtgacacctgagccagttgccttatcctcccagacctcagaacccgttgagtctgaggccccccctcgggaaccaatggaagccgaagaggtggaagagagggcccccgcacagaacccggaactgaccccaggcccagcaccggcaggaccaactcctgcccccgaaaccaatgcaccatag

SEQ ID NO: 180331 - DNA, 477 bp, synthetic construct
  misc_feature 1..477: note = Description of Artificial Sequence: Synthetic coding sequence
  source 1..477: mol_type = other DNA
atggagcccaacgacagcaccagcaccgccgtggaggagcccgactcactagaggtcttggtcaaaaccctggattctcagacgcggacattcatcgttggggcgcagatgaacgttaaagagttcaaggagcatatcgctgcgagtgtgagcatccccagtgaaaaacagagactaatataccaagggagggtgttgcaggacgacaagaagcttcaggagtacaacgtgggtggtaaggtgattcacctcgttgaacgtgcgcctccacagactcaccttccaagcggggccagttccggcaccggctcagcctctgccactcacgggggcggctctccacctggcacgcgcgggcctggagccagcgttcatgatcgcaatgccaattcatacgtgatggtcggcaccttcaacttgcctagtgacgggtctgcagtcgatgtgcacatcaatatggagcaggccccgatttag

SEQ ID NO: 180332 - DNA, 777 bp, synthetic construct
  misc_feature 1..777: note = Description of Artificial Sequence: Synthetic coding sequence
  source 1..777: mol_type = other DNA
atggagcccaacgacagcaccagcaccgccgtggaggagcccgacagcttagaagtgttagtcaaaaccttggattcccagacgcgcacatttatagtgggggctcaaatgaatgtaaaagagtttaaggagcacatcgcggctagcgtatctatcccctctgagaaacagcggctgatatatcaggggcgcgtgctccaggatgacaaaaagcttcaggaatacaatgtgggtggcaaggttatccacctggtggagcgggcaccacctcagacccatctgccatccggagcatcctcaggcacaggaagtgctagcgctacccatggaggcgggagcccgcctggcacccgcggtcctggcgccagcgtgcatgacagaaatgctaacagttatgttatggttggaacattcaatctgccttctgatggaagcgccgtcgacgtgcacatcaatatggagcaggcacccatccagtcagaacctagagtccggttggtcatggcgcagcatatgatccgagatatccaaacccttttaagcaggatggagtgtcgaggcggccctcaacctcagcactcacagcctcctcctcagccgcctgcggttacgcccgagccggtagccctatcctcacagacgtccgaacccgtcgagtccgaggcacctccacgggagcccatggaggccgaagaggttgaagagcgtgctccggcccaaaacccggaactgacccccgggcctgctccagctggtccaactcctgccccggagtag

SEQ ID NO: 180333 - DNA, 735 bp, synthetic construct
  misc_feature 1..735: note = Description of Artificial Sequence: Synthetic coding sequence
  source 1..735: mol_type = other DNA
atggagcccaacgacagcaccagcaccgccgtggaggagcccgactcgctggaggtgctggtgaaaacgttggactcccagacgcgtaccttcatagtcggggctcagatgaacgttaaagaatttaaggaacatattgcggcgtcggtttccatcccgagcgagaaacaaagactaatctaccagggcagggtcttgcaggacgacaagaagctgcaagagtataacgtcggaggaaaagtcattcatctcgtggaacgagcgcccccacagacccacctccctagcggggcatcaagcggcaccggaagcgctagcgccacccacgggggagggagtccaccgggcacccgcggaccaggcgcttctgtacatgacagaaacgctaattcatatgtgatggtagggacatttaacttgccctcagaaccacgtgttaggctggttatggcccagcacatgatccgcgatattcagacactgctcagtaggatggagtgtcgaggagggccccaacctcagcattcgcagccccctcctcagccccccgcagtgacacccgaaccggtggcactttcctcccaaaccagcgagcctgtcgaaagcgaggcacctccacgggaaccaatggaagccgaggaagtggaggaacgagcccctgcacaaaacccagagttgacacccggtcccgcgcccgctggacccacccccgcccctgagaccaatgcaccctag

SEQ ID NO: 180334 - DNA, 1548 bp, synthetic construct
  misc_feature 1..1548: note = Description of Artificial Sequence: Synthetic coding sequence
  source 1..1548: mol_type = other DNA
atggagcccaacgacagcaccagcaccgccgtggaggagcccgactccttagaggttctggtgaagaccctcgacagccagacccgaactttcatcgtcggggcccagatgaacgtgaaggagttcaaggagcacattgctgcgagcgtgagcatcccgagtgagaaacaacggctaatctaccagggccgggtgcttcaagatgataaaaagctgcaggaatacaatgtgggcggtaaagtgatccacctggtagaacgagcacctcctcagacccatctgccgagcggcgcgtcgtctgggaccggttcagcgagcgcgacccatggggggggatcacccccggggacccgaggtcctggggccagcgttcacgatcggaacgccaactcctatgtcatggtcggaacctttaacctcccaagtgatggatctgccgtggacgtgcacatcaatatggagcaagcacctattcagtccgagcctagggttaggctggtgatggctcaacacatgatacgcgacatccaaaccctgttatctcggatggaatgtcgcggtggtcctcagccacaacattctcagccaccaccgcagccccccgctgtgacacccgaacccgtcgcactgtcctcccaaaccagtgaaccagtggagtccgaagctccaccaagagagcccatggaggctgaggaggtggaagaaagggcaccagcccagaaccccgagcttactcctggacctgctcccgctggccctaccccagcacctgagactaatgccccaaatcacccaagccctgccgaatatgtggaggtgctccaggagctgcagcggctagagagtcgcctccagcctttcctacagcggtattacgaggtactgggcgctgcagccacaaccgactacaacaataaccatgagggtcgggaggaggatcagcggctcatcaacttagtcggagaatctctcaggctgctgggcaatacctttgtggcccttagcgatctgagatgtaacctagcctgcacccctcctcggcatctccacgttgtccggccaatgtcacattacacaacaccaatggttctacagcaagctgctatccccattcagattaatgtcggtaccactgtgaccatgactggaaatgggacccggcctcccccaacccctaacgcagaggcaccgcccccgggacctggacaggcatcctcagtggcaccctcgtctactaacgtggagtcttcggcagagggggctccacccccagggcccgcccccccaccagccaccagccacccacgcgtgatccgcatttctcatcaaagcgtggagcccgtggtcatgatgcacatgaacatccaggactccgggactcagcctggaggagtcccaagcgctccaaccggcccactgggacctccaggacacggacagactcttgggagtacgctcattcagctcccttcactgcctcccgagttcatgcacgcagtcgcacaccagatcacccatcaggccatggtcgccgcagtcgccagttag

SEQ ID NO: 180335 - DNA, 702 bp, synthetic construct
  misc_feature 1..702: note = Description of Artificial Sequence: Synthetic coding sequence
  source 1..702: mol_type = other DNA
atggagcccaacgacagcaccagcaccgccgtggaggagcccgactccttggaggtcctggtgaaaacacttgattcacaaacacggaccttcatcgtgggggcccagatgaacgttaaggaattcaaggagcatattgcggcctcagtgtctatcccctctgagaagcagaggctcatttaccaaggcagggtgctgcaggacgataaaaagctccaggagtataacgtgggcgggaaggtgatacatctggttgaaagagctcccccgcagactcacttgccatccggggcatcctcaggcactggatctgcgagcgccacgcatgggggggggtcgccccccggcaccaggggtcccggagccagcgtccacgatcggaatgctaactcatatgtaatggtggggacattcaatctgccatccgatggatctgccgtggacgtgcatatcaacatggaacaagcacctattcagtccgaaccccgtgttaggctggtaatggcccaacacatgattcgagatattcaaactctgttatctcgaatggagacactcccttacctacaatgtagaggagggcctcagccacagcactcccagcccccaccccagccaccagctgtgacgccagaaccagtggctctgtcgagccaaacaagtgagcctgtcgagtccgaggctccacccagggaaccatag

SEQ ID NO: 180336 - DNA, 3381 bp, synthetic construct
  misc_feature 1..3381: note = Description of Artificial Sequence: Synthetic coding sequence
  source 1..3381: mol_type = other DNA
atggagcccaacgacagcaccagcaccgccgtggaggagcccgactcattggaggtgctggtcaagaccttagacagccagactagaacttttatcgtgggggctcagatgaacgtgaaagaattcaaggagcatatcgccgctagtgtatccattccatcagaaaaacagcgactgatctaccagggccgggtactgcaggacgacaagaaactgcaggaatacaacgtggggggcaaggtcatacacttggtcgagcgggcccctccccagacccacctgccttctggcgctagttcgggcacaggctccgcgtctgcgactcatggtggagggagcccgccagggacgcgcgggccgggagcctcagtgcacgaccggaacgctaatagctacgttatggtcggtacctttaatttaccaagtgacggatcagccgtggatgtgcacatcaacatggaacaagcacctattcaatctgagcccagggttaggctagttatggctcagcacatgatcagagatatacagacgctcctgagtcgcatggaatgtcgggggggaccacagcctcagcacagccaaccacctccacagccccccgcagttacacctgagccagtggctctctcctctcagacgtcagagccagtggagagcgaggcccccccgcgggagcccatggaagccgaggaggtggaagaacgcgcgccagctcagaatcccgagctcaccccaggtcctgcaccagctggccccacccctgcccccgagactaatgccccaaaccacccatctcctgccgaatatgtggaagtgttgcaggaactccagcgactggaatccagattacagcccttcctgcaacgctattacgaagtgctgggggctgcagctactactgactacaacaataatcacgaggggagggaggaggatcaaagattaattaacctggttggggagtccttgaggctgctgggcaatacattcgtagccctgagtgatcttcgctgcaatctggcatgtacaccaccacgccacttacatgtcgtccgtcccatgtctcattatacaacaccgatggtcctacagcaagctgctattcctattcaaatcaacgtcgggaccacagtgacaatgactggcaatggcacaagaccacctcccaccccgaatgccgaggccccaccacctgggcccggccaggcttcttcagtggccccgtcttccactaatgtggaaagctccgctgagggcgcccccccaccaggtcccgccccacctcctgccaccagccaccctcgagtcatcagaatcagccaccagagcgtggaaccagttgtcatgatgcacatgaatatccaggattcaggtacgcagcctgggggcgtgccctcagcccccacaggcccattggggccgcccggacacgggcaaaccctgggacagcaggttcccgggtttcctaccgccccaacacgagttgtaatcgccaggcccacacccccacaagcccgacccagccacccgggcggccctccagtgtccggaactctgcagggcgccggcctcgggaccaatgcttccctggcccagatggtgtctggacttgttggccagctgctgatgcagcccgtactcgtggctcaggggacaccggggatggcacccccaccagcccccgcaaccgcctccgcctccgccgggacaactaataccgcaacgaccgcaggtccggcaccaggcggccccgctcagcccccacctacacctcaacccagcatggccgatctgcagttttcccagttacttgggaacctgctgggtcccgctgggccgggcgccggaggcccaggcgtggcaagccccacaattactgtagcgatgcccggggtgcctgccttcctgcagggcatgaccgacttcttacaggctacacagaccgcgcctccaccccctccaccacccccgcctccaccccccgcgccagaacagcagacaatgccacccccggggtctccgagcgggggcgctggctcaccaggcgggttaggcttagaatccctgtctcccgaattcttcacatctgtggtgcaaggggtgttaagtagtctgttagggagcctgggggctagggctggctcatctgaatcgatcgcagcattcatccaacgattgagcgggagcagcaacatttttgaacccggcgctgacggggcactcgggttttttggcgccctgcttagtttgctgtgccaaaacttcagtatggtcgatgtcgtgatgctgctgcacggtcattttcaacctttgcaacggctccaaccgcagcttaggtcctttttccatcagcattacctcggaggccaggaacccacaccctcaaatatacgaatggccacacataccctcatcactggcctggaggagtatgtgcgtgaaagtttttccttagtgcaggtccagcctggcgttgatatcatcagaactaacctggagttcttgcaggaacagttcaacagcatagcagcacacgtccttcactgcaccgatagcggctttggagcacgtctgctggagctgtgtaaccaggggctgtttgagtgtctagcgctcaacctgcattgtctcggcgggcaacagatggagctggccgcagtgataaatgggcggatcaggcgcatgagcagaggagtcaacccatcactggtgtcttggttgacaacaatgatgggtctgaggctccaagtggtgttagaacacatgcccgtcggaccagacgccattttgcggtatgtccgacgcgtgggagaccccccccaacctctgccagaagagccaatggaggtgcagggtgctgagcgggccagcccagagcctcagagggaaaacgcctctcctgctccgggcacaactgctgaggaggccatgagccggggtccaccgcctgcccccgaggggggctctagggacgaacaagacggagcctccgccgagacagagccctgggccgcagcagtgccaccagaatgggtgcccattattcagcaagatattcagtcccagcgaaaagtcaagccacagcctccattatctgatgcgtacctatctggaatgccagcgaaacgcaggaagaccatgcagggggaaggacctcaactcctgctgtccgaggccgtaagtagggctgcaaaagccgctggcgcaagacccttgacatcgccggagagtttgtcgcgggaccttgaggcacctgaagtacaagagagctaccgccagcagctgcgatccgacatccagaagcgactgcaagaggatcccaactatagtccacagcggttcccgaatgctcagcgcgccttcgcggacgatccctag

SEQ ID NO: 180337 - DNA, 789 bp, synthetic construct
  misc_feature 1..789: note = Description of Artificial Sequence: Synthetic coding sequence
  source 1..789: mol_type = other DNA
atggagcccaacgacagcaccagcaccgccgtggaggagcccgactccctggaagtactggtgaagacactcgacagccaaacccgcacgttcatcgtcggggctcaaatgaatgtcaaggaattcaaggagcacatcgcagccagtgtttcgatcccctcagaaaaacagcggctaatctatcaaggacgcgtgctgcaggacgacaaaaagcttcaggagtacaatgtaggcggcaaggtaatccatctggtcgagcgggccccaccccagactcacctcccctccggagcaagctccggcactggcagcgcctctgctactcacgggggaggcagtccgcccgggaccagaggtcctggggctagcgtccacgaccgaaatgcgaactcttacgtgatggttggcacattcaacctgccttcagacgggtccgctgtcgatgtacacataaacatggaacaagctccaattcagtccgagcccagggttagattggtcatggcccaacacatgatacgggatatccagacactgctgtctcgtatggagtgcagaggaggaccgcagccacaacattcccagccgcctccccagccccctgcggtcacaccagagcccgttgccctgagcagtcagaccagcgagccagtcgagtccgaggcccctcctagggagccaatggaggcagaggaagtcgaggagcgggcccccgcccagaaccctgagctgacgccaggccccgctccagcgggccccaccccggcccctgaaacgaacgccccctag

SEQ ID NO: 180338 - DNA, 411 bp, synthetic construct
  misc_feature 1..411: note = Description of Artificial Sequence: Synthetic coding sequence
  source 1..411: mol_type = other DNA
tgacggatgagccggggcgtgaaccccagcctggtgagctggctgacaacaatgatgggcctacgcctccaagtagtcttggagcacatgccagtcgggcctgacgccatactccgatatgtgcggcgggtaggggaccccccacagccgctgcccgaggagccaatggaggtgcagggggctgagagggcaagcccagagcctcaggaatgggttccaataatccaacaggacattcaatcacagaggaaagttaagcctcagccacccctgtccgacgcttacctctctggaatgccagctaagcggagaaagctgcgatctgatattcagaaaagactgcaggaagacccaaactacagtccccagcgtttcccaaacgcccaacgagcgttcgcagacgatccttag

SEQ ID NO: 180339 - DNA, 558 bp, synthetic construct
  misc_feature 1..558: note = Description of Artificial Sequence: Synthetic coding sequence
  source 1..558: mol_type = other DNA
tgactggcctgcacccccccccggcacctgcacgtggtgcggcccatgtctcactacaccacgcctatggtgctccagcaagcggcaataccgattcagattaacgtcggtaccaccgttaccatgacgggtaacggaactcgccccccgcccaccccaaacgcagaggctccaccgccaggccccggacaagcttcaagcgtggcgccctcgtccacaaacgtcgaatccagtgcagagggagcacctccccccggacctgcccccccgcccgcaacctctcaccctcgagtgatcaggattagtcatcaaagtgtagagcccgtagtgatgatgcacatgaatattcaaggacagcaggtgccaggcttccccaccgcccccacaagagtcgtcatcgctcgcccaacacccccccaggctaggccttcacatcccggtggccctcccgttagtggaactctgcagggagccgggctgggtacaaatgccagccttgctcagatggtcagcggactagtcgggcagttactaatgcagcctgttctcgtggcatag

SEQ ID NO: 180340 - DNA, 681 bp, synthetic construct
  misc_feature 1..681: note = Description of Artificial Sequence: Synthetic coding sequence
  source 1..681: mol_type = other DNA
tgaagcggcttcggcgcccggctgctggagctgtgcaaccagggcttgtttgagtgtcttgcactgaatctgcactgcctgggaggtcaacagatggagctggcagcggtgatcaatgggcgcattcggcgcatgtccagaggagtgaatccctctctggtgtcttggttgacaacaatgatgggcctcaggctgcaagtcgtgctggagcacatgcctgttggcccagacgccatccttcgatatgtgcgccgcgttggagaccctccacagccccttcccgaagagccaatggaggtgcagggcgctgagagagcctcgcctgaaccccagagggagaatgcctcaccagcaccaggcacaacagcagaagaagccatgagcaggggacctccccctgctcctgaggggggaagcagagatgagcaggacggggcctccgcggagaccgagccctgggctgcagccgttccaccagagtgggttccaatcatccaacaggacatccaaagccaaaggaaggtcaaacctcagccccctctttctgacgcatacttgtccggtatgccagctaagcgtagaaaactcagatccgatatccagaaaaggctccaggaagaccccaactattcaccacagagattcccaaacgcccagagggccttcgccgacgatccctag

SEQ ID NO: 180341 - DNA, 594 bp, synthetic construct
  misc_feature 1..594: note = Description of Artificial Sequence: Synthetic coding sequence
  source 1..594: mol_type = other DNA
atggagcccaacgacagcaccagcaccgccgtggaggagcccgactcacttgaagtgcttgtcaaaaccctggatagccagaccagaacattcatcgtgggagcacagatgaatgtcaaagagtttaaggagcacattgcagcttctgtgtcgataccttcagagaaacagcgcctcatttaccaagggagggttctgcaggatgataaaaaacttcaagaatataatgtcggagggaaagtcatccaccttgttgaacgagcccccccccaaacacatctaccctctggagcttccagcggcactggaagcgccagcgctacccacggtggcggttctcctcccggaaccagggggcctggggcctccgtacacgatagaaatgctaattcctacgtgatggttggaacctttaatcttccatccgacgggtcagccgtggatgtacacatcaacatggagcaggctccaatccagagcgaaccgcgcgtccgtttggtgatggcccagcacatgattagagatatacagacgctcttaagtcgcatggaatgccgcggaggcccccagccgcaacattctcagcctccatag

SEQ ID NO: 180342 - DNA, 648 bp, synthetic construct
  misc_feature 1..648: note = Description of Artificial Sequence: Synthetic coding sequence
  source 1..648: mol_type = other DNA
atggagcccaacgacagcaccagcaccgccgtggaggagcccgacagcctggaggtactcgttaagactttagacagccagaccaggactttcatcgtcggagctcagatgaacgtgaaagagtttaaggagcatatcgccgcctccgttagcattcccagcgaaaagcagcggctgatataccaggggcgtgtcttgcaggatgacaaaaaattacaagagtacaacgtcggtggcaaggtcattcatcttgtggaacgcgctcctccccagacacacttgcctagcggtgcttcctccgggacagggagtgcctccgccacgcacggaggagggtccccccccgggacacgcgggccgggggccagcgtccacgaccgtaatgctaactcctacgtgatggtcggaacctttaatttgccgtccgaacctagggtccggctggttatggctcagcatatgatccgcgacattcaaactctcctgtccagaatggaatgcaggggcgggccacagccacagcactctcagcccccgcctcagccaccagctgtgacccccgagccggtcgctctgagctcacagacaagcgaaccagtggaaagcgaggcgccgccgagagagcccatggaggcagaggaagtgtag

SEQ ID NO: 180343 - DNA, 702 bp, synthetic construct
  misc_feature 1..702: note = Description of Artificial Sequence: Synthetic coding sequence
  source 1..702: mol_type = other DNA
atggagcccaacgacagcaccagcaccgccgtggaggagcccgacagtcttgaagtactggttaagacccttgattcacagacacgaacattcattgtaggggcacagatgaatgtcaaggagttcaaggaacatatcgcggccagcgtctcaatacccagtgaaaagcagcggttaatttaccaggggagagtccttcaggacgacaagaaacttcaggagtacaatgtgggtgggaaggtgattcatttggttgagagagccccacctcagactcatcttccttcaggagccagcagtggtacggggagtgcctctgctacccacgggggcgggagccctccggggactagagggccaggtgcatctgtgcacgaccgtaacgccaattcgtacgtcatggtcgggacatttaacctgccttctgatggatcagctgtggatgtgcacattaatatggagcaagcaccgatccagagtgagccccgggtgagactggtgatggctcaacatatgattcgagatatccaaacactgctgagtcggatggagaccctgccgtacctgcaatgccgcgggggcccacagcctcaacacagccagcctcctccccagcctccagcagtgacaccagagcctgtggccctctcttcacagacctccgagccggtcgagtccgaagccccaccaagggagccatag

SEQ ID NO: 180344 - DNA, 777 bp, synthetic construct
  misc_feature 1..777: note = Description of Artificial Sequence: Synthetic coding sequence
  source 1..777: mol_type = other DNA
atggagcccaacgacagcaccagcaccgccgtggaggagcccgactctctggaggttttagtgaagactctggattcccagacccgcacctttattgttggagcccagatgaacgtgaaggagttcaaagaacacattgcagcttctgtttctatcccaagcgagaagcagaggctcatttaccaaggtagggtgttgcaggatgacaaaaaactacaagagtacaatgtgggcgggaaggtcatccacttggtggagcgagctcctccccagactcacctgcccagtggcgcttcttctgggaccggctccgcaagcgctacccatgggggtgggtccccacccggcacaagaggacctggagctagcgtgcatgataggaatgcaaatagctatgtgatggtgggaacttttaacctcccaagtgacggatcagctgtcgatgtgcacataaatatggagcaagctccaattcagtccgaaccacgggtgcggcttgtcatggctcagcatatgatcagggacatacagacgttgctgtctaggatggagtgccgcggcggcccacaacctcagcacagtcagcccccccctcagcctccggccgttacacctgagcctgtggccctctcttcgcagacgtccgagccagtggaatccgaggccccccccagggagccaatggaggccgaggaggtggaggagcgagcccctgctcagaatccagaactgactcccgggcctgcacccgccggtcctacgcccgctcccgagtag

SEQ ID NO: 180345 - DNA, 411 bp, synthetic construct
  misc_feature 1..411: note = Description of Artificial Sequence: Synthetic coding sequence
  source 1..411: mol_type = other DNA
tgacggatgagccggggcgtgaaccccagcctggtgagctggctgaccacaatgatgggccttcgcctgcaggttgtactcgagcacatgcccgtcggaccagacgccatcctgcgttatgtgagaagagtgggcgacccgcctcagccactgccagaagagcctatggaggtgcaaggcgcagaacgagccagcccagaacctcaggagtgggtgcccattattcagcaggatattcagtctcagcgaaaagtgaagccacaacctccactttcagatgcctatctatccggtatgcctgccaagcgcagaaagttgcggtctgatatacagaaaagactccaggaagatcctaattactcccctcagcggttcccaaatgcgcagagggctttcgcagacgatccatag

SEQ ID NO: 180346 - DNA, 780 bp, synthetic construct
  misc_feature 1..780: note = Description of Artificial Sequence: Synthetic coding sequence
  source 1..780: mol_type = other DNA
atggagcccaacgacagcaccagcaccgccgtggaggagcccgacagtctggaggtgctggtgaagacgttggattcccagactcgcacatttatagttggtgctcagatgaacgtaaaagagtttaaggaacacatcgctgcgagcgtctctatcccctctgagaaacaacggttgatctaccagggccgcgtacttcaagatgacaagaaacttcaggagtacaacgttggtggcaaggttatccatctggttgagagggcccccccccagactcatctgccgtccggtgcctcaagcggaacaggatccgcttccgcgacccacggggggggtagtcctcctggaacccggggccctggagccagtgtgcatgaccggaatgcaaactcttatgtgatggtcggtacattcaacctcccttccgacgggagtgcagttgacgtccacatcaacatggaacaggctcccatccagtctgagccacgggtcaggcttgttatggcacagcacatgattcgggatattcagactcttctcagccgtatggaatgtcgcgggggccctcagccccaacacagtcaaccccccccccagccgccggccgtcacccctgaaccagtcgctctgagctctcagacttcggaaccagttgaatcagaggccccacctagagaacctatggaggcggaagaggtggaggaaagagctccagctcagaatcctgagttgactccaggcccggctcccgccggaccaacccccgctcctgaaacttag

SEQ ID NO: 180347 - DNA, 2232 bp, synthetic construct
  misc_feature 1..2232: note = Description of Artificial Sequence: Synthetic coding sequence
  source 1..2232: mol_type = other DNA
atggagcccaacgacagcaccagcaccgccgtggaggagcccgacagtctggaggtgcttgttaaaaccctggacagtcagacccgaactttcatagtgggcgcccagatgaacgtgaaggagtttaaagagcacatagccgcatctgtgtctattcccagcgagaaacagagattaatctatcaggggcgggtattacaggacgacaaaaagctccaagagtataatgtcggagggaaggtgattcacctggttgagcgcgcgccacctcagacgcacctccccagtggggcatcgagcgggacgggcagcgcttcagcaactcacggagggggatccccccctggaacacggggaccaggcgcttcggtacacgatcgcaatgctaacagctacgtaatggtgggcacctttaacctgccaagtgacggttcggctgtggatgtgcacattaatatggagcaggcccccattcaatctgagcccagagtgaggctcgtgatggctcagcacatgattagggacatacagacattgctttccaggatggaatgtagaggcgggccacagccacagcattcacagccacctccacaaccccccgcagtcacccctgagccagtggctctgtcctctcagacatcggagcccgtggagagtgaagcccctccaagggaaccaatggaggctgaggaggttgaggaacgggctccagctcagaaccccgagcttactccaggtccagctcctgccgggcctaccccggcgcctgagactaacgcaccgaaccacccaagcccggcggagtatgttgaggtcttgcaggagctgcagagactggagtccagactccagccgtttctccaacgttactacgaagtcttgggagccgctgcaactaccgattacaataacaaccatgaaggaagggaagaagatcagagactgattaatctcgtaggagagtcactgcgactcttagggaatacctttgtggctctgtccgacctacgctgtaatctcgcatgcacgccaccacggcacctccatgtagtacgtcctatgagtcactataccacccctatggtcctccagcaggctgcgatccccattcaaatcaacgtgggaacgacagtgacaatgacagggaacggcacaagaccacccccgactccgaatgctgaggccccaccacccggcccagggcaggcctcatccgttgcccctagctcaaccaatgtcgaatcgtctgctgagggcgcacccccccctggcccagcccctccccccgccacttcccacccccgggtgatacgcatttctcaccagtcagtggaacccgttgtaatgatgcatatgaacatccaagatagcggcacgcagccagggggggtgccctcagcacctacaggaccattgggcccccccggccacggccagacgctagggtctactctgatccaactgccctccctaccacccgaatttatgcacgccgtggcacatcagatcacgcatcaagctatggtcgctgctgtggccagtgctgccgcggggcagcaggtgcccggatttcccaccgctccaactcgcgtcgttatcgcccgacccactccaccacaagcccgccctagtcaccctggtggcccccccgtgagcggtaccctgcagggagccggtctcggcacaaacgcaagtctggcacagatggttagtggattagtgggccaattgctgatgcagcccgtgctggtggcccaggggacacctggcatggcacctccacctgcgcctgcgactgcttcagcctcagccggcaccaccaacacggccacaaccgcggggcccgcgcccggtggcccggcgcaacctccgcccacaccacaaccctctatggccgatttgcagttcagtcagttattgggcaacctgctggggcctgcagggccaggtgcgggcgggagtggggtcgcgtcacccactatcacggtggccatgccaggcgtgccagcattcctgcaggggatgacagacttcctgcaggcgacacaaactgcaccaccccctccccctcctcccccgcctccaccccctgctcccgagcagcagactatgccaccgccgggttcacccagcgggggtgcaggatcaccaggaggcctgggtctcgaaagcctgtctcccgaattctttacatcagtggttcagggggtgctgtctagcctgctctag

SEQ ID NO: 180348 - DNA, 3399 bp, synthetic construct
  misc_feature 1..3399: note = Description of Artificial Sequence: Synthetic coding sequence
  source 1..3399: mol_type = other DNA
atggagcccaacgacagcaccagcaccgccgtggaggagcccgactcccttgaggttctggtgaaaacactcgattcccaaacacggacattcattgtgggcgcacagatgaacgtgaaagagtttaaggaacacatcgcagcttccgtctccattccttctgaaaagcaacggcttatctaccaaggacgagtgttgcaggacgacaaaaagctacaggaatacaacgtcggtggtaaggttatccacctcgtggagagggctcccccccagactcacctcccatccggggcatcctctggcaccggatccgcgtccgctacccacgggggcggctctcctccaggtacacggggacccggcgcttccgtacacgatcgaaacgccaactcctatgttatggttggcactttcaatctgccatcagacgggtcagcggtggacgtgcacataaacatggagcaggctcctattcagtcagagccaagggtgcgtctggtgatggcccagcacatgatccgagatatccagactcttctcagtcgcatggaaacactcccctatctgcagtgtcggggcggaccccagccgcagcacagtcaaccccctcctcagccccccgctgtcactccagagcccgtcgccctttctagtcagacgtccgagcctgtggagagtgaggccccgcctcgtgagcccatggaggctgaggaggttgaagaacgggcaccggctcaaaatcccgagcttacacccggacccgcccccgcaggtccaacccccgcgcccgaaaccaatgctccaaatcacccaagtcccgctgagtacgtggaagtcctgcaagagttacagcggctggagtctagactgcagcctttcctacagaggtattacgaagtgttaggggctgcagccaccaccgactataataataatcacgagggtagggaggaagatcagagactgatcaatctcgtgggagaatccctcaggctgctgggcaacacattcgtcgcgctctctgatctgcggtgtaacctcgcttgcacaccgcctaggcatctccacgtggttaggccgatgtcccactataccacaccgatggtactgcagcaggccgctatcccaatacagattaatgtgggaaccactgtgactatgaccggcaatggcacaaggcctcctcctactcccaacgccgaggctcctccacccggtccagggcaggcctcctccgttgccccctcaagtaccaacgttgaatcttctgcagagggggcccctcctccaggaccagcacccccgcccgcgaccagccacccaagagtgattcgtataagccatcaaagtgttgagccagtcgtgatgatgcacatgaacatccaggactccggtacacagcccggtggggtgccttctgcgcctacaggcccattagggcccccaggacatggacagactctgggccagcaggttccgggatttccaaccgcccccacacgagtagtcatcgcccgtccaaccccaccccaggcgaggccttcacatcctggcggcccacccgtctccgggactctgcaaggtgctgggctgggtaccaatgcatctctggcccagatggtgtccggcctagtgggccagctactgatgcagccagtcttggtggctcaggggacccccggcatggcgcctcctcctgcacctgcaactgcctctgcctctgctggaaccacgaataccgctactacagctggcccagctccaggggggcccgcccagccgcccccgactcctcagccctcaatggcggacctccagttcagtcagctcctgggcaacctgttaggtccagctggccctggagctggcggaccaggggtagcaagccccaccatcacagtggccatgcccggcgttccggcctttctccaggggatgacagacttcctccaagctacccaaacagccccgcctcctcctcctccacccccgccacctccccctgcaccagaacagcagacgatgcctcctcctggctctcccagtgggggagctgggagccccggcggactgggcctggagtctctctcgcccgaattcttcacttcggtggtccaaggtgtcctctcctccctgctgggatcgctgggggcgcgagccgggtccagtgagagtatcgccgccttcatccagaggctcagtggctcttctaatatattcgagccaggcgcagacggtgctctgggattctttggcgctctgctcagcctgctgtgtcagaacttcagtatggtcgatgtcgtgatgctgcttcacggccattttcaaccactgcaacgtctacagccccaacttcggtcattctttcaccagcattaccttggcggccaagagcctacccccagtaatattcgcatggccactcacacattaattaccggactggaagagtatgtccgagaatcctttagcctggtccaggtacagcctggggtggacataattagaacaaacctggagttcctacaggaacagttcaactctatcgccgcacatgtactacactgcaccgactcgggattcggcgcacggttactcgaactctgtaatcagggtctattcgaatgcctggctctgaacctgcattgcttaggtggccagcagatggaacttgccgcagtcattaacgggcgaatcaggaggatgagcagaggcgttaacccgtccttggtaagttggctgacgaccatgatggggctgagattacaggtggtcctggagcacatgcctgtggggcctgatgctattttgcgttacgtccgtcgcgtgggtgaccctccccaacccttgcctgaggaaccaatggaagtgcagggcgctgagagagcgagtcctgagccacagcgcgagaatgcaagccccgcacccggcacaaccgcagaagaagctatgagcaggggcccaccaccagctcctgaggggggctctcgcgacgagcaggacggtgcctctgcagagactgagccctgggccgcggcagtgccccctgagtgggtaccaattatccagcaggacatccaatcgcagaggaaagtcaaaccccagcccccactgtccgatgcatatctgtccggaatgccggcaaagaggaggaaaacaatgcagggcgaaggtcctcagctgctgctcagcgaggccgtgtctcgggcagcgaaagcagccggtgcccgtcccctgacaagtcccgagtctctttctcgggatctcgaggcacctgaggtgcaggagtcatatagacaacagctcaggtctgatatccagaagcgcctccaggaggacccaaactattccccgcaacggttcccgaatgcacagcgcgcttttgccgatgatccttag

SEQ ID NO: 180349 - DNA, 594 bp, synthetic construct
  misc_feature 1..594: note = Description of Artificial Sequence: Synthetic coding sequence
  source 1..594: mol_type = other DNA
atggagcccaacgacagcaccagcaccgccgtggaggagcccgactccttagaagttttagtcaaaactctggactcacaaaccagaacctttattgtgggcgcgcagatgaatgtgaaagagttcaaagagcacattgctgcctctgtcagcatcccctctgagaagcagcggctgatttaccagggtagggtcctccaagatgacaagaaactccaagaatacaatgtaggcgggaaggttatccatttggtggaacgtgccccgcctcagacacatctgccatccggcgcatcgagcggtactggaagcgcatcggccacacacgggggtggaagcccccccggcacacggggacctggggcttctgtccacgaccgaaatgctaactcgtacgtaatggttggcacattcaaccttcccagcgatggaagtgctgtcgatgtacatataaacatggagcaggcacccatacaatcagaacccagagtgagactggttatggcgcaacatatgatcagggacatccagacactcctgtccaggatggagtgccgtggcggaccacagccccaacattcccagcccccatag

SEQ ID NO: 180350 - DNA, 735 bp, synthetic construct
  misc_feature 1..735: note = Description of Artificial Sequence: Synthetic coding sequence
  source 1..735: mol_type = other DNA
atggagcccaacgacagcaccagcaccgccgtggaggagcccgacagcctggaggtacttgttaagacactggactcccagaccagaaccttcatcgtgggagctcaaatgaacgtgaaagagttcaaagagcatattgccgcatccgtttccatcccatcagagaagcagagattgatttaccaaggccgggtgttgcaggatgataagaaactgcaggaatacaatgtcggtgggaaagtgattcacttagtggaacgcgctccacctcagactcacctgcccagtggcgcatcttcggggactggatcagccagtgccacacacggcggaggctccccacctggcacgcgcggtcccggcgccagtgtgcacgaccgaaacgctaacagttacgtgatggtcgggaccttcaacctccctagcgaaccccgcgtgcggctggtgatggctcagcatatgattagagacatccagacactgctgtcacgcatggaatgccggggtggtccccagcctcagcactctcagcctcccccccaaccgcctgcagtgacccctgagcccgttgcactgagctcccaaaccagcgaacccgttgaaagcgaagcaccccctcgggaacctatggaagctgaggaggttgaggaaagagcccccgcccagaatccggaactgacaccaggaccagcacccgccggtcctacccccgcccctgaaacaaacgcaccttag

SEQ ID NO: 180351 - DNA, 594 bp, synthetic construct
  misc_feature 1..594: note = Description of Artificial Sequence: Synthetic coding sequence
  source 1..594: mol_type = other DNA
atggagcccaacgacagcaccagcaccgccgtggaggagcccgacagccttgaagtgctggttaaaaccctggactcacagactaggaccttcatcgtgggagctcagatgaacgtgaaggagtttaaggagcacattgccgccagcgtgagtataccatccgaaaaacagaggctgatttatcaaggccgcgtgctgcaggatgataagaagctgcaggagtacaatgtaggcggtaaggtcatccatcttgtcgagcgagcccccccccagacccacttaccgagcggagcctcatccggtaccggctccgcttccgccacgcatggcggcgggtctccacctgggactcgtggccctggggcgtcagtgcacgatagaaacgcaaattcctacgttatggtgggcacattcaacttacctagtgacggctctgctgttgacgtgcacatcaatatggagcaggcccctatccagtctgagccacgtgttcggctcgtgatggcacagcacatgattagggacatccaaacattgttgtcacgaatggaatgccgtggcggacctcagccgcagcattctcagccgccttag

SEQ ID NO: 180352 - DNA, 1548 bp, synthetic construct
  misc_feature 1..1548: note = Description of Artificial Sequence: Synthetic coding sequence
  source 1..1548: mol_type = other DNA
atggagcccaacgacagcaccagcaccgccgtggaggagcccgactctctcgaagtactggtgaagactctcgattcacaaacccgcactttcatcgtgggcgcccagatgaacgttaaggagtttaaggaacatatcgcagcgagcgtgagcatcccctccgagaaacagagattgatatatcagggtagggtcctgcaggacgacaaaaagctccaagaatacaatgtcggagggaaggttatacacttggtggaaagggctcccccacagacccacctgccctctggagcctcaagtggcacaggatctgcttccgccacccatggcggtggctcacctcctggcacaagggggcctggagcttccgtccacgaccggaatgcaaattcttacgtgatggtgggcaccttcaatctcccatcagatggatctgcggtggacgtgcacatcaacatggagcaggctcctattcaaagcgaaccccgagttaggctggtaatggctcaacacatgatacgtgacatccagacattgctcagccggatggagtgcaggggagggcctcagcctcagcacagccagcccccaccccagcccccagctgtaacaccggagccggtggcgctgtcaagtcaaactagcgagccagtcgaatcagaagcaccaccgagggagcctatggaggccgaggaagtggaggagcgagctccagctcaaaatcccgagctgacacccggcccagcacccgccggtcctacccctgctcctgaaactaatgcgccaaatcatccatctcccgctgagtatgtagaagtcctgcaggagctacagcggcttgagagcaggttacagccttttctgcagcggtattatgaggtgctcggcgccgcagccacaaccgactacaacaacaaccacgaaggacgcgaggaggaccagaggctgataaatttggtgggagaaagtctcaggttgttaggaaacacctttgtggccctgagtgacctgcgctgtaacctggcatgtacaccacccaggcacctgcacgtagtccggcctatgagccactacacgactcctatggtgctgcagcaggccgccataccaattcagattaacgtgggcactaccgtgacgatgacaggaaatggcacgcggccaccccccacccccaacgcggaagccccgcctcctggaccgggccaggcaagcagcgttgccccaagctccacgaatgtcgagtcaagtgctgagggcgctcctccgcctggaccagcccccccgcccgctacatcacacccccgggtgataaggatttcacatcaatccgttgagccagtggtgatgatgcacatgaatatacaagattctggcacgcaaccgggaggcgtgccctcggctccaactggtcctctgggcccccctggtcatggccagactctcgggagcaccttgatacagctgccatcgttaccaccagaattcatgcacgcggtcgcccaccagataacacatcaggctatggtggctgccgtagcgtcctag

SEQ ID NO: 180353 - DNA, 735 bp, synthetic construct
  misc_feature 1..735: note = Description of Artificial Sequence: Synthetic coding sequence
  source 1..735: mol_type = other DNA
atggagcccaacgacagcaccagcaccgccgtggaggagcccgactcactggaggtgctagttaagaccctagattcgcaaacacggacctttatcgtgggggcacagatgaacgtgaaggagtttaaggagcatattgccgcctcagtttctatcccatcagagaagcagcggctgatataccagggtagggtactgcaggacgacaagaaactgcaggaatataacgtgggcggcaaagtgatccaccttgtggaacgtgcccctccgcagacccacctgccctccggcgcctcgtccggcactggcagcgcctcggccacacacgggggcggttctccaccaggtacccggggcccaggcgctagtgttcacgataggaacgccaacagttatgtgatggttggcaccttcaacctaccttccgaaccccgagttcggcttgtgatggcccagcatatgattcgcgatattcagactcttcttagcaggatggaatgcagaggcggaccccagcctcagcactcacaacctccccctcaaccacctgcagtaacccctgaacccgtcgccctgagttcccagacatcagagccagtcgagtccgaagcccctccaagagaaccgatggaagccgaagaagtcgaggagcgagcccccgcccagaaccccgagcttacaccgggtccagctccagcgggccctacccctgcccccgagacaaacgcgccctag

SEQ ID NO: 180354 - DNA, 789 bp, synthetic construct
  misc_feature 1..789: note = Description of Artificial Sequence: Synthetic coding sequence
  source 1..789: mol_type = other DNA
atggagcccaacgacagcaccagcaccgccgtggaggagcccgactccttagaggtgcttgtgaagacactggattcccagacccgcaccttcattgtgggtgcgcagatgaacgttaaggaattcaaggagcatattgctgcttcggtatctataccttccgagaagcagagattaatataccagggtagggtgcttcaggatgataaaaagctgcaagagtacaatgtcggagggaaagttattcaccttgttgaacgtgcccccccacagacacacttgccctccggggcctcctcaggaacaggatccgccagcgccacccatggcggtggctcccctcccgggaccagggggcctggtgcgtccgtccacgataggaacgccaacagctatgtgatggtaggtactttcaatttaccgtctgacgggtctgccgtggatgtgcatatcaatatggagcaagctccaatccagagtgaacctagggtgagattggtaatggctcagcacatgatcagggatatccagactctgctttcccgcatggaatgccggggcgggcctcagccccaacattctcaaccacctccccagccacctgccgttacaccggaacctgtggctctttcttctcagacgtctgagcccgtggagtcggaggctccgccacgagaacccatggaagcagaggaggtggaagagagggctcccgcccagaatccagaactgacccccggcccggccccagccggacccacgccggccccagagactaacgctccttag

SEQ ID NO: 180355 - DNA, 789 bp, synthetic construct
  misc_feature 1..789: note = Description of Artificial Sequence: Synthetic coding sequence
  source 1..789: mol_type = other DNA
atggagcccaacgacagcaccagcaccgccgtggaggagcccgactcactggaagtgctggtcaaaacgctcgattcacagacccgcacattcatcgtgggcgcccaaatgaacgtgaaagaattcaaggaacacattgccgcttccgtgagtataccctccgagaagcaaaggctcatctaccaaggtcgggtcctgcaggatgataagaagctgcaggagtataatgtgggcggcaaggtgatacatctcgtggagagggctccaccccagacacatttgccttcaggcgcttctagtgggaccggttcagcatcagccacccacggaggtggatccccgccagggaccagaggacccggggctagtgtccatgaccggaatgcaaattcttacgttatggtggggacttttaatctgccatcagatgggtcagctgtggatgtgcacattaacatggagcaggcccctattcagtcggaacccagggtacggctggtcatggctcaacatatgatacgcgatattcagaccctgctgtcacggatggaatgtcgggggggaccgcagcctcaacactcccagcctccaccacagcccccagctgtcactccagagcctgtcgctctctctagtcagacatctgaacccgtggagtctgaggctccaccacgcgaacctatggaagccgaggaggtggaagaacgagcacccgctcaaaacccggaactgactcctggacccgcacctgctggacccacacccgcaccagagacaaatgcaccctag

SEQ ID NO: 180356 - DNA, 717 bp, synthetic construct
  misc_feature 1..717: note = Description of Artificial Sequence: Synthetic coding sequence
  source 1..717: mol_type = other DNA
agcagcgccgagggcgcccccccccccggccccgcccccccccccgcaacaagtcacccgcgtgtgattcgtattagccaccagtccgtggagcctgtggtgatgatgcacatgaacattcagggcccactctccctcagtccctgtccggattcaggaacacagccgggaggagtcccctctgcccctaccggtcccttgggcccgcctgggcatggccaaactttggggcagcaggttccaggttttcccaccgctcctactcgtgtagtgatcgcgagacccaccccccctcaggctcggccatcccatccaggcggtccccccgtgtctggaacccttcagggggcgggattggggacaaatgcctctctggcacaaatggtcagcggcctagtggggcagctgctcatgcagcctgtgcttgtggcacagggtacccctggaatggccccaccacctgccccagccaccgctagcgccagtgcgggcactactaatacagctacaacggcaggcccagcccctggcggcccagcccagccaccccctacgccccaacccagcatggccgacttgcaattctcccagctgctgggaaacttgctggggccagctggacctggcgccggggggagcggagttgctagtccgaccatcactgttgcaatgccaggtgttccagcgtttctacaggggatgactgacttcctgtag

SEQ ID NO: 180357 - DNA, 735 bp, synthetic construct
  misc_feature 1..735: note = Description of Artificial Sequence: Synthetic coding sequence
  source 1..735: mol_type = other DNA
atggagcccaacgacagcaccagcaccgccgtggaggagcccgactcattagaagtgctggtcaaaactctggactcccagactcggacctttatcgttggggcccagatgaacgttaaagaatttaaagagcacatcgccgcatcagtgtcaatcccatcagaaaaacaaaggctgatttaccagggccgcgtgctccaggacgacaagaagcttcaggagtataatgtcggagggaaggtgatacacttggtagaaagagcccctccccagacccatctgccatccggggcatcaagcgggactggaagcgccagtgcgacccatgggggaggttcaccacctggcacaagaggccccggcgcatcagttcacgaccggaatgctaactcttacgtgatggttgggaccttcaacctgccgtcagagccccgggtccggctggtgatggctcagcacatgatccgcgatattcagaccctgctatccagaatggaatgcaggggaggccctcaacctcaacatagccagcccccccctcaaccaccagccgttactccagagcccgtagctctgagctcccagacatccgagcctgtggagagtgaggcgcccccccgtgagccaatggaggccgaggaggttgaggagagagccccggcacagaatcccgaattgacccctgggccggctcccgccggccccactcctgctccggagactaacgccccgtag

SEQ ID NO: 180358 - DNA, 621 bp, synthetic construct
  misc_feature 1..621: note = Description of Artificial Sequence: Synthetic coding sequence
  source 1..621: mol_type = other DNA
atggagcccaacgacagcaccagcaccgccgtggaggagcccgacagcctggaggttctggtaaaaacgctggacagccagacaagaacctttattgtgggagctcagatgaatgtcaaggagtttaaggaacatatagcagcctccgtctccataccaagtgaaaaacagcggctcatttatcaagggagggttctgcaggatgacaagaagttgcaggagtacaatgtaggggggaaagttatccaccttgtggagagggccccaccacagacgcacctgccaagcggggctagtagtggaacgggctccgcgtccgcaacacatggtgggggttctccgcccggcaccagaggaccgggagcttccgtgcacgacaggaacgccaactcttatgtgatggtcggaacctttaatttgccgagcgagcctcgcgtaaggctcgtgatggcgcaacatatgatccgtgatattcagacgctcctctccagaatggagtgcaggggaggtccacagccccagcacagtcagcctcctcctcagccacctgcagtgacccctgaacctgtcgcgttgagttcacagactagcgagccggtggagtccgaagcgcccccatag

SEQ ID NO: 180359 - DNA, 735 bp, synthetic construct
  misc_feature 1..735: note = Description of Artificial Sequence: Synthetic coding sequence
  source 1..735: mol_type = other DNA
atggagcccaacgacagcaccagcaccgccgtggaggagcccgacagcttggaagtgttggtgaagaccctggactcacagacgaggactttcatcgttggcgcacagatgaatgttaaagagttcaaagaacacatcgcagcttcggtgagcatcccttctgagaagcagcgcctaatttaccaggggagagtgcttcaggacgataagaagctgcaggagtacaacgtaggaggaaaggtcattcacctggtagaacgtgcaccgccacaaacccaccttccaagtggagccagctctggcacaggcagcgcaagcgcaacacatggtggaggttctcctcctggaacccgagggcccggagctagcgttcacgaccgaaatgccaattcttacgttatggtgggaaccttcaatctgcctagcgagccccgggtccgtctcgttatggcacaacacatgattagggatatccagaccctgttgtcccggatggagtgcagaggtggcccccaaccccagcattcgcagccaccaccccagccaccagctgtgaccccggagcccgtggccctctctagccagactagcgaaccggtcgagtcagaggcacctcctagggaaccaatggaggctgaggaggttgaagaaagagcaccggcccagaacccagaattgactcctggtcccgctccggccggtccaacgcctgccccagagactaatgccccatag

SEQ ID NO: 180360 - DNA, 780 bp, synthetic construct
  misc_feature 1..780: note = Description of Artificial Sequence: Synthetic coding sequence
  source 1..780: mol_type = other DNA
atggagcccaacgacagcaccagcaccgccgtggaggagcccgactcactggaagtcttggtaaagaccctcgacagccagacaaggacttttatcgtgggagcccagatgaatgttaaggagttcaaagaacacattgctgcctcggtctcaatcccctccgaaaagcagaggcttatttaccaaggccgggtcctccaggatgataaaaagcttcaggagtacaacgttggcgggaaggtcatccaccttgtagaacgagcgccaccccagacccacctgcctagcggggcgtccagcggaaccggaagcgcctccgccacacatggaggtgggagtccccctgggacccgcggaccaggggctagtgtgcatgatcgaaacgctaactcttacgtgatggtgggaacctttaacctgccaagcgacggcagtgcggtcgatgtgcacattaatatggaacaagccccaatccagtctgagccccgcgtgagactcgtgatggctcaacatatgatccgggatattcagacgcttctgtccaggatggagtgcagaggcggaccacagccccaacacagccagccacctcctcagcctccggccgtgacacctgagccggtcgccctgtcaagtcaaactagcgaacccgtggagtccgaggccccaccccgcgagcccatggaagcagaagaggtggaggagcgagcccccgcccaaaatcccgagctcacccccggcccggcacccgctggtcccacacctgcccccgaaacttag

SEQ ID NO: 180361 - DNA, 558 bp, synthetic construct
  misc_feature 1..558: note = Description of Artificial Sequence: Synthetic coding sequence
  source 1..558: mol_type = other DNA
tgactggcctgcacccccccccggcacctgcacgtggtgcggcccatgtctcattataccactcctatggttctacaacaggccgccattcccattcagattaacgttgggaccaccgtgaccatgactgggaacggcactaggcctcctccaacaccgaatgctgaagctcctcctcccggacccgggcaagcaagtagtgtggctccctcatccactaatgtcgaatcatccgccgaaggtgcaccacctccgggtcccgcgccccctccagctacaagccatcccagggtgatccggattagccatcagagcgttgaaccagtagtgatgatgcacatgaacattcaggggcaacaggtcccaggctttcctaccgcccccacccgggttgtgatagctcggcccaccccacctcaagctcggccatcccatccgggcggccctcccgtgagcggtacactgcagggagcgggtctcggaacgaacgcctctctggctcaaatggtgagcgggcttgtcggacaactgctgatgcagcctgttcttgtagcttag

SEQ ID NO: 180362 - DNA, 621 bp, synthetic construct
  misc_feature 1..621: note = Description of Artificial Sequence: Synthetic coding sequence
  source 1..621: mol_type = other DNA
atggagcccaacgacagcaccagcaccgccgtggaggagcccgactctttagaagtgctggtaaagacccttgactctcaaaccagaactttcatcgttggtgcccagatgaacgtcaaagaattcaaggaacacattgccgctagtgtttccatcccatcagagaaacagaggttaatttatcagggacgggtgctgcaagatgacaagaagctgcaggagtacaatgtgggagggaaagttatccatctcgttgaacgcgcacctcctcagacccatctgccaagtggggcttcctccggcactggcagcgcctccgccactcacgggggaggttctccaccaggtacacgcgggcctggagcctcagtccacgataggaatgcaaatagttatgtgatggtaggtactttcaatctgccatccgagccacgggtgcggctggttatggcccagcatatgattcgggatatccagacacttctttccaggatggagtgcaggggggggcctcagccacagcattctcaaccaccaccacagccccccgccgttaccccagaacctgtggcgttatcctcacagacctctgaacccgtggagtcagaagcacccccttag

SEQ ID NO: 180363 - DNA, 735 bp, synthetic construct
  misc_feature 1..735: note = Description of Artificial Sequence: Synthetic coding sequence
  source 1..735: mol_type = other DNA
atggagcccaacgacagcaccagcaccgccgtggaggagcccgactctcttgaggttttggttaagacccttgactctcagacacgcacctttatagttggcgctcaaatgaacgttaaggaatttaaggagcacattgcggcttcagtatcaatcccaagcgagaagcagcggctgatttatcaaggacgagtacttcaggacgataaaaaactgcaggagtacaacgtgggaggcaaggtgatacacctagtcgagcgggctcccccacagacacatctccccagtggagcctccagtggtacaggcagcgcctctgccacccacggcgggggtagtcctccaggcactcgcggccccggggccagtgtccacgatcgcaatgcaaacagctatgtgatggtgggcacattcaatcttcccagcgaacctcgtgtcagactcgttatggcccagcatatgattcgcgacattcagaccctgctgagcaggatggagtgcaggggtgggcctcagcctcagcacagccagcccccgccacagcccccagcagttacccctgagcccgtggccctgagctctcagacctcagagcctgttgaatctgaggcgcctccgcgggaacctatggaggctgaggaagtggaagaacgcgccccggcccagaatcctgagttgactccaggacctgctcctgccgggcccacgcctgcccccgagacaaacgccccttag

SEQ ID NO: 180364 - DNA, 1548 bp, synthetic construct
  misc_feature 1..1548: note = Description of Artificial Sequence: Synthetic coding sequence
  source 1..1548: mol_type = other DNA
atggagcccaacgacagcaccagcaccgccgtggaggagcccgacagcctggaagttctggtgaaaaccttggattctcagacccgtacatttattgtcggcgcacagatgaacgtcaaagaatttaaggaacacatagcggcatcagtgtcaatccctagcgagaagcagcggctgatttatcagggcagagtccttcaggacgacaaaaaactacaagagtataacgtcggcgggaaagtgatacatctggtggaacgcgccccacctcagacacatctccctagtggagcatcatccgggaccggtagtgcaagtgccacccacggcgggggttctcctccaggcaccagaggcccaggagcttccgtacatgaccgtaatgccaactcatatgttatggtgggcacctttaacctgccatctgatggttccgctgtggatgttcatatcaatatggagcaggccccaatacagagcgaaccaagagtgcgtcttgtgatggcgcagcacatgattcgtgacattcagaccctcctgtccaggatggagtgtcggggtggcccacaacctcagcattcccaaccaccaccacaacctccagccgtgacacctgagcccgttgcgctatccagtcagacatctgagcccgtggagagcgaagcacctccccgggagccaatggaggcggaagaagtggaagagcgggctccagcgcagaaccctgaactcacacccggccccgcccctgccggccccactccggccccagagaccaacgcacccaaccatccctccccagccgaatacgtggaggtcttgcaggagctacagcggttagagagcagactacagcctttcctgcagagatattatgaggtgttgggcgcagctgcgacaactgattacaacaacaaccacgaagggcgcgaagaggatcagcgcctgatcaacctggtgggtgagagcctcaggcttctaggtaatactttcgttgcattaagcgaccttagatgcaatctggcgtgtaccccgccccgacacctgcacgtggtgcggcctatgtcacattataccacgccaatggtcctgcagcaggcggcaatccctattcaaatcaatgttggaaccacggtgacgatgactggcaacggcaccagaccgccgcctacacccaacgccgaagccccccctccgggcccagggcaggcgtccagcgtggccccttcctcaacaaacgtggaatcgagcgctgaaggagccccaccgccaggaccagctccacctcccgccactagccaccctagggtgatccggatcagtcaccagagcgtcgaaccagtagttatgatgcatatgaatatacaggactctggtacacagcccggcggtgtgccctctgctccgacaggtcctctggggccccccggacatggccagacgcttggctctacgctgattcaacttccatcgcttcctccggaatttatgcatgcggtggcacaccagatcacccaccaggccatggtggctgcagtggccagctag

SEQ ID NO: 180365 - DNA, 717 bp, synthetic construct
  misc_feature 1..717: note = Description of Artificial Sequence: Synthetic coding sequence
  source 1..717: mol_type = other DNA
agcagcgccgagggcgcccccccccccggccccgcccccccccccgccacttcccatccaagagttattaggatatctcaccaaagtgtcgagccagtggttatgatgcacatgaatatacaagggcccttgtctctcagcccatgtccagattctggaacacaaccaggcggtgtacctagcgcaccaaccgggcccctgggcccccctggacacggacagacgcttggtcagcaggtaccgggtttccccaccgcacccaccagggtggtgatagcacgtcctaccccacctcaggcccgaccaagtcacccgggaggaccgcctgtgtcagggacgctgcagggtgccggcctgggaacgaacgcttcattggcccaaatggtttcgggattggtgggccagttgcttatgcagcccgttctggtggcacagggaacccctggcatggcccccccacccgctccagccacagcaagtgcatcggctggaaccaccaatacagctactactgctggccccgcccctggaggcccagcccagccacctcccacaccgcaaccaagtatggccgatctgcaattttcacaactcctgggcaatctgctgggcccagccgggccgggagctggcggcccgggagtggcctcgccaaccattaccgtggccatgcccggggtaccggcatttctacagggtatgaccgatttcctatag

SEQ ID NO: 180366 - DNA, 648 bp, synthetic construct
  misc_feature 1..648: note = Description of Artificial Sequence: Synthetic coding sequence
  source 1..648: mol_type = other DNA
atggagcccaacgacagcaccagcaccgccgtggaggagcccgactcgttagaagtcctcgtgaagacgctcgacagccagacccgcacctttattgttggagcacagatgaatgtgaaggagttcaaggagcacatagcggcaagcgtgagtataccatctgaaaagcagaggctgatctaccaagggcgggtcctccaggacgacaagaagctccaggagtataacgtcggcggtaaggtcatccacctggtggaacgggctcctcctcagacgcacctgccaagtggagcgtcaagtgggaccggttctgcctcagcgacgcatggtggcggttcacctccaggcacccgtggaccgggcgcgagcgtgcacgataggaacgctaattcctacgtgatggtaggcaccttcaacctgccatccgaacctagggtccgcctggtcatggcgcagcacatgatcagggatatccaaacattgctcagccgaatggaatgtaggggtggtccccagccacaacattcacagccaccaccacagccaccggctgtaacaccggagcccgtagcactgtcaagccagacctccgagccagtagagagcgaagcccctcctcgggaacctatggaggccgaagaggtttag

SEQ ID NO: 180367 - DNA, 477 bp, synthetic construct
  misc_feature 1..477: note = Description of Artificial Sequence: Synthetic coding sequence
  source 1..477: mol_type = other DNA
atggagcccaacgacagcaccagcaccgccgtggaggagcccgacagcttggaagttctagtgaaaaccctggactctcaaacaaggacattcatcgtgggagctcaaatgaatgtcaaggaattcaaagaacacatcgcagcttctgtctcaattccctcagagaaacagagactgatctatcagggacgggttttgcaggatgataagaagctgcaggaatacaatgttggaggcaaagtgatccacctggtggagagagcaccaccacaaacccacctccccagtggcgcttcgtccggaactggctcagccagcgcaacacacggcggaggatcaccgcctggaactagggggccgggcgctagtgttcacgatagaaacgctaactcatacgtaatggtgggcacatttaatcttccgagcgacggatccgccgtggacgttcacatcaacatggagcaggcacctatatag

SEQ ID NO: 180368 - DNA, 702 bp, synthetic construct
  misc_feature 1..702: note = Description of Artificial Sequence: Synthetic coding sequence
  source 1..702: mol_type = other DNA
atggagcccaacgacagcaccagcaccgccgtggaggagcccgactctctggaggtcctagtaaagacacttgacagccagacacggacattcattgtgggggcccaaatgaatgtcaaagagttcaaggaacacattgccgccagtgtctctataccaagcgaaaagcagcgcctcatttaccaaggacgggttctgcaggacgacaagaagctgcaagaatacaatgtgggagggaaagtgatacacctggtggagagagcgcccccacaaactcacctgccaagtggggcatcgagcgggacaggctctgcatcagccactcacggtggtggaagccctcccggaactagagggccgggagcgagcgtacacgataggaatgccaatagctatgtgatggtcggaactttcaacctaccttcagacggatctgcagttgatgtccatattaatatggagcaggccccaatccaatctgagcccagggtgcgccttgtcatggcccagcacatgatccgggatattcagactctgctgtccaggatggaaaccctgccttatctgcagtgtcggggcggccctcagccccaacactcccagccaccaccccaacccccggccgtgacaccagagcccgtggctcttagttcccagacaagcgaaccagtggagtctgaagctcctccaagagagccttag

SEQ ID NO: 180369 - DNA, 780 bp, synthetic construct
  misc_feature 1..780: note = Description of Artificial Sequence: Synthetic coding sequence
  source 1..780: mol_type = other DNA
atggagcccaacgacagcaccagcaccgccgtggaggagcccgactccctggaggtacttgtgaagacacttgatagtcagaccagaacattcatcgtgggggcccagatgaatgttaaggaatttaaagagcacatagccgcctcggtctctatcccttcagaaaagcagaggctgatttatcagggacgagtgttgcaagacgataagaagctgcaggagtataacgtaggtgggaaggtgatacacctggtggaacgggcacccccacagacccatctgccctctggcgccagcagcggcacaggatccgcaagcgccacacacggcggcgggagcccacctggtacacgtggcccgggagcaagtgtacacgaccgcaacgctaattcgtatgtgatggtaggaacatttaacctgccaagcgacgggtctgccgtagacgtgcatataaatatggagcaggcccccatacaatctgagccccgggttcgcttggtgatggcacagcacatgatacgggatatacagacattattgtccaggatggagtgtcgtggtggcccccaaccgcagcactctcagccacccccacagccgcctgcagtgactcctgagccagtggctttgtcctcacagacgagcgaacctgtggaaagtgaggccccaccacgcgaacctatggaggccgaagaggtcgaggagagggctcccgcacagaacccggagctcacgcccgggccagcgccagctggacctaccccagctccagagacctag

SEQ ID NO: 180370 - DNA, 411 bp, synthetic construct
  misc_feature 1..411: note = Description of Artificial Sequence: Synthetic coding sequence
  source 1..411: mol_type = other DNA
tgacggatgagccggggcgtgaaccccagcctggtgagctggctgaccaccatgatgggcctcagattacaggtcgttttggagcacatgcccgtgggtcctgatgcaattctgaggtatgttcgacgggtgggcgaccccccgcagccactccccgaggagcctatggaagtgcagggtgctgagcgcgcaagccccgaacctcaggagtgggtgccaatcatacagcaggacatccagagtcagcgtaaggtgaagcctcagccacccctcagcgacgcgtatctgtccgggatgccggccaagcggagaaagctgcgctcggacatccagaagcgcctgcaagaagatcctaactactccccccagcgcttcccgaatgctcagagggcatttgccgatgacccatag

SEQ ID NO: 180371 - DNA, 735 bp, synthetic construct
  misc_feature 1..735: note = Description of Artificial Sequence: Synthetic coding sequence
  source 1..735: mol_type = other DNA
atggagcccaacgacagcaccagcaccgccgtggaggagcccgactccctcgaagtccttgtgaagactctggattcccagacacgaacttttatcgtgggcgcccagatgaacgtcaaggaatttaaggaacacatagcagcctccgtgtcaataccgtccgaaaaacagagactgatttatcaaggccgcgtcctgcaggatgataaaaaactacaggagtataatgttggaggaaaggtcatccacttagtggagcgcgcacctcctcagacgcacctgccttcaggggccagtagcgggacgggctccgcttctgctacacacggggggggatccccacctggcacccgaggtccaggcgcgtccgtgcacgacaggaatgctaacagttatgtcatggtaggaacgtttaatctgcccagcgaaccacgagtgcgacttgtgatggcccagcatatgatccgcgatatacaaacactgttaagccggatggaatgtcgggggggtcctcaaccacagcatagtcagcctccacctcaacccccggcggtgaccccagagcctgtcgctctgtctagccagacatctgaacctgtggaatccgaagccccccctcgagaaccgatggaggcggaagaggtggaagaacgcgcccccgcccaaaatcccgagcttacccccgggccagcccccgccgggcctacacctgcccccgagaccaacgcgccttag

SEQ ID NO: 180372 - DNA, 3381 bp, synthetic construct
  misc_feature 1..3381: note = Description of Artificial Sequence: Synthetic coding sequence
  source 1..3381: mol_type = other DNA
atggagcccaacgacagcaccagcaccgccgtggaggagcccgactccttagaggtgctggtgaagaccctggacagccagacgcggacgttcattgtgggagcacaaatgaacgtgaaggagtttaaagaacatattgctgcatcggtttctataccgagtgagaagcaacggctgatctaccaggggcgagtgctgcaagacgacaaaaaactgcaggagtacaatgtaggaggcaaggtgatacatctggtggaacgggccccccctcaaacgcatctgccgagcggcgcatccagcgggaccggctctgcctcggctacacacggcggtgggagccccccggggaccagggggccaggagccagcgttcatgataggaacgcgaattcgtacgttatggttggtacattcaatctaccttccgatggttcagctgtagatgtgcacattaacatggagcaggctccaatccaatctgaaccgagggtacggctggtgatggcacaacacatgattagggacatccaaaccctcctgtcaagaatggagtgcagaggagggccacaaccacaacatagccagccgccgccccagccccctgccgtaacacccgaaccagtcgctctgtcttcacagacctcagagccagttgagtccgaggctccccctagagaacctatggaggccgaagaggtcgaggagcgggcgcctgcgcaaaatcctgaactaacacctggccccgcccctgccggccccacacccgcacctgaaaccaatgcccctaaccatccctcccctgcagagtatgtggaggtccttcaggagctgcagcgactagaatctcgcctgcagccctttctgcagaggtactacgaagtgctgggcgctgcggctacaaccgattataacaacaatcacgagggacgggaggaggatcaacgcttgatcaaccttgttggggagtctctccggctcttgggaaatactttcgtggccttatccgacctcaggtgcaacctggcttgcacccccccccggcatctgcatgtggtgcgtccgatgtcacactatactacaccaatggtgcttcaacaagcagccatccctatccagatcaatgtgggcaccacagtcacaatgaccggcaacgggacaaggcctcctcccacgcccaacgctgaagctcctccccccggaccaggccaggcctctagcgtggctcctagctccaccaatgttgagtcatccgccgagggggccccccctcctggcccggccccaccccctgccacttcgcaccctagggtaatccgcataagtcaccagagtgttgaaccagtggtgatgatgcatatgaacatccaagattctggcacacagccaggtggggtaccctcagctccaactgggccactcggaccacctggacatggccagaccttggggcaacaggtgcctggctttcccaccgctcccactcgtgtcgtgatagccagacccacacctcctcaggctcgacctagccatcctggaggcccaccagttagcggcaccctgcagggtgcagggctgggcacaaacgcctccctggcccagatggtgtcaggcctcgtcggacaactgttgatgcagcccgtgttagtggctcaggggacaccaggtatggctcccccaccagctccggccactgcttcagcgtccgccggcacaaccaacaccgccacaacagcgggccccgcaccagggggacctgcccagcctcccccaacccctcagccatccatggcagatctgcagtttagtcagctcttaggaaatctactgggccctgcggggcccggcgctggcggtccgggggtggcctcgccaaccatcacagttgcaatgcccggggtaccagcattcctgcagggcatgacagacttcctccaagctacccaaacagccccaccccccccaccgcctccaccgccgccgccccccgcaccagagcagcagactatgcctcctccggggagcccaagtggaggcgcagggagcccaggggggctggggcttgagtccctctcacccgaattctttactagcgtggtgcagggagtactctcctccctgctcggctccctgggagcccgtgccgggagctcagaaagcattgccgcatttatccaaagactatctggcagcagcaacatttttgagcccggagcagatggcgccttgggattctttggagccctccttagcctcttgtgccagaatttctctatggtggacgtcgtgatgctgcttcacggccatttccaaccacttcagcgtctgcagccacagcttcgttcattttttcaccagcactacctaggtggtcaggagcccacccctagcaacatcaggatggctacccatacactcatcacggggctcgaggagtatgtgagagaatcctttagcttggtacaagttcagcctggcgttgacattattagaaccaatttagagttcttgcaagaacagttcaactctattgcggctcacgtccttcactgtaccgacagtgggttcggcgcccggcttctcgagctgtgtaaccaggggctcttcgaatgtctggcattaaatctccactgcttgggaggtcagcaaatggaactggcagcagtaattaatggccgtataagaagaatgtcaaggggggtgaacccctctttggtcagttggctgaccacaatgatgggcttgcgtctgcaggtggtattggaacatatgcctgttgggcccgacgccatattacgatacgtgagaagagtgggggatcccccgcagcctctgccagaggaacccatggaggttcagggcgcagaacgggcaagccccgaaccacagagggagaatgcctctcctgcaccaggcaccaccgctgaagaagcgatgtcaagagggcctcctcccgcaccagagggagggtccagagacgagcaggacggtgcttctgcagaaactgagccatgggccgccgctgtgccaccggaatgggtgcccatcatccaacaagatatccagtcacaacgcaaggttaaaccccagccccctctttctgacgcctatttaagcggcatgcctgccaaaaggcgcaaaacaatgcagggtgagggaccccaactgctgctctccgaggctgtcagtcgcgccgccaaagcagccggagcccgcccgttgacatctccagagtctctgtcaagggatctcgaggcccccgaagttcaagagagctacagacagcagctgcggtccgacatacagaaaagactgcaggaagatccgaattacagcccacagcgcttccccaacgctcagcgtgcgttcgcagatgacccttag

SEQ ID NO: 180373 - DNA, 411 bp, synthetic construct
  misc_feature 1..411: note = Description of Artificial Sequence: Synthetic coding sequence
  source 1..411: mol_type = other DNA
tgacggatgagccggggcgtgaaccccagcctggtgagctggctgacaaccatgatgggcctgaggttgcaagtggtcttagagcacatgcccgttggtcctgatgcgattctgaggtacgtgagaagagtgggagacccgccccagccacttcccgaagaacctatggaggtgcagggcgcagagagagcatctccggaaccccaggaatgggtcccaattatccagcaggatatccagtcacagagaaaggtgaaaccccagcctcctctgagtgacgcgtatctcagcgggatgccagccaagcgtcggaaattgcgcagcgacattcagaaacgcctgcaggaagatccgaattatagtcctcaacgattcccaaacgcacaacgggcattcgccgacgatccctag

SEQ ID NO: 180374 - DNA, 648 bp, synthetic construct
  misc_feature 1..648: note = Description of Artificial Sequence: Synthetic coding sequence
  source 1..648: mol_type = other DNA
atggagcccaacgacagcaccagcaccgccgtggaggagcccgacagtctggaggtgctggtgaagaccctcgactctcagacgcgcacatttatcgtgggggcgcagatgaacgtgaaggaatttaaggaacatatcgctgcgtctgtgagcataccaagtgaaaagcagaggctcatttatcagggccgtgtgctgcaggacgacaaaaagcttcaggaatataacgtcggtggtaaggtcattcatttagtggagcgtgccccgccacagactcacctgccaagcggtgcgagcagcggtactggtagcgcgtccgcaactcatggaggagggtctcctcccggcaccagaggcccgggggcatctgtccacgatcgcaatgcgaacagctatgtcatggtaggtacttttaacctgccaagtgaacctagagttcgtctcgttatggctcaacacatgatccgagacatacaaaccctgctgtctcgaatggagtgccgcggaggcccccagcctcagcattcccagccaccccctcagcccccagccgtcacccccgagcccgtcgctttaagcagccagacaagcgagccagtggagtctgaggctcccccacgcgaacctatggaggctgaggaagtgtag

SEQ ID NO: 180375 - DNA, 594 bp, synthetic construct
  misc_feature 1..594: note = Description of Artificial Sequence: Synthetic coding sequence
  source 1..594: mol_type = other DNA
atggagcccaacgacagcaccagcaccgccgtggaggagcccgactcacttgaggtgttggttaaaactctggattcacagacgagaactttcattgtgggtgcccagatgaacgtgaaggagtttaaggaacacatagccgcctcagtatctatcccgagtgaaaagcaacggctcatttaccagggcagagtgctgcaggatgataagaaacttcaggaatataacgtagggggaaaggtgatccatctcgttgagagggcgcccccacagacccacttgccctctggtgcatcttccggaaccgggagtgcaagtgccacacatggtggcgggtctcctcccgggactcggggtcctggcgcatcagtgcacgaccgaaacgcaaacagttacgtgatggtagggacctttaacctcccttccgacggcagtgccgttgatgtccacatcaacatggagcaggcccccatccagagtgagcctcgtgtgaggcttgtgatggctcagcacatgattcgagacatacaaacactactgtctcgcatggagtgcagagggggtccacagccccagcatagtcagcctccctag

SEQ ID NO: 180376 - DNA, 1548 bp, synthetic construct
  misc_feature 1..1548: note = Description of Artificial Sequence: Synthetic coding sequence
  source 1..1548: mol_type = other DNA
atggagcccaacgacagcaccagcaccgccgtggaggagcccgacagtctggaggtgctcgtaaagaccctcgactcacagacccgaacctttatcgtgggagcccagatgaacgtaaaagagtttaaggagcacatcgctgcaagtgtctctattcctagcgagaaacagcggctgatatatcagggtcgcgtgctacaagatgacaagaagcttcaggaatacaatgttggaggtaaggtcattcatctggtggagcgtgcaccacctcagacccacctgccatctggtgctagtagtggtacaggcagcgcgtccgccactcacggagggggctccccacccggtaccagaggcccgggcgccagcgtccacgacaggaacgccaacagctacgtcatggtcgggacttttaatctgccctctgatggttcagccgttgatgtacacattaacatggaacaggccccaatacagtcagagccaagggtgaggctcgttatggctcagcacatgatcagagacattcagactttgctcagcagaatggaatgcagaggtggcccgcaaccacagcatagccagcctcctcctcagccacctgccgtcacccccgaacccgtcgcactttccagccagaccagtgagcccgttgaaagtgaggccccgccccgggagccaatggaagccgaggaagtggaggagcgcgctcctgcccagaatcctgaactgacaccaggacctgctccggccggaccgactccggcccccgagacaaatgcccccaatcatccttcgcccgcagaatatgtcgaggtactacaggagctgcaacgcctggaatcaaggcttcagccatttctgcagcggtactatgaagttttgggtgcagctgctacaacagattataacaataatcacgaaggcagagaggaagatcagagactgatcaacttggtaggtgaatctttgcggttgctgggaaacacatttgtggcactgtctgacctgcgctgtaatctggcatgcacaccacctaggcatctgcacgtagtcagacccatgtctcactacacaactcctatggtgttgcaacaggcggcgattcccattcaaataaatgttgggactaccgtaacgatgacaggaaacggcacccggccgccacccacccctaacgccgaggctccgccaccgggaccaggacaggccagctcagttgccccaagctcaacaaacgtcgaatccagtgcagaaggcgccccaccacctgggccggcgcctccgccggctacatcacatcctcgggtgatcagaattagccatcaaagcgttgaaccagtggtgatgatgcacatgaacatccaagacagcgggacccagccgggtggggtgccttcagcccccaccggacctttagggccccctggacacgggcagactttgggcagcacactgattcagttaccctctctccctcctgagttcatgcacgcagtcgcccaccagattacgcatcaggccatggtggcagctgtggccagttag

SEQ ID NO: 180377 - DNA, 738 bp, synthetic construct
  misc_feature 1..738: note = Description of Artificial Sequence: Synthetic coding sequence
  source 1..738: mol_type = other DNA
cccccccggcacctgcacgtggtgcggcccatgagccactacaccactcccatggttttacagcaagcagccattccgatccagatcaacgtaggcacaactgtgactatgaccgggccagcaccaccacccgccacgagtcacccacgggtcatccgaatcagccatcagagtgtcgagccggtggtgatgatgcacatgaatatccaggacagtgggacccaacctggcggggtgccaagcgcccctacgggcccgttgggccctcccgggcacggccaaacgttgggtcagcaggtgcccggctttccgactgcccccactcgagtggttattgcccgaccaacaccgccccaggccaggccctctcatccgggagggcccccagtgagtggaaccctgcagggtgccggactgggtaccaacgcctccttagctcagatggtgagtggtctcgtggggcagttgcttatgcaacccgtgttagtggctcagggaacaccagggatggctcctccacccgcccccgctaccgcctctgcgagcgctggtaccacaaataccgccacaaccgcaggcccagcgccagggggacctgcccagcctccccctaccccccagccttctatggctgacctgcagttttcacagctattaggtaatcttcttggccctgccggcccaggagctggagggccgggcgtcgccagtcccaccatcactgtcgccatgccctag

SEQ ID NO: 180378 - DNA, 738 bp, synthetic construct
  misc_feature 1..738: note = Description of Artificial Sequence: Synthetic coding sequence
  source 1..738: mol_type = other DNA
cccccccggcacctgcacgtggtgcggcccatgagccactacaccacaccaatggtgttgcagcaggccgcaatccccatccagattaacgtagggacgacagtcaccatgaccggccctgctcctccacccgctacctcgcatcccagggtgatcagaatttcacaccaatccgtggaaccggtcgtgatgatgcatatgaacatccaggactccggaacacaacccggcggggttcctagcgcaccgaccggaccattggggccgcctggacatggccagaccctcggccagcaggtccctggcttcccaacagctccaacccgtgtggttattgccagaccaacccctccacaggctcggccaagtcacccaggaggaccccccgtgtccggcaccctccagggggctgggctgggaaccaatgcttcccttgctcagatggtaagcggactggtgggccagttactgatgcagccggtgctggtggcacaaggtacgcctggtatggctccaccccccgctcctgctacagcctccgcctcggcgggcactactaataccgcgacaactgccggaccggctcccggaggcccggcgcagcctcctcccacaccacagccatcaatggccgacctccagttttcccagctgctggggaatctgctggggcctgcaggccctggggcaggaggcagcggggtagcctcaccgaccattaccgtagccatgccatag

SEQ ID NO: 180379 - DNA, 777 bp, synthetic construct
  misc_feature 1..777: note = Description of Artificial Sequence: Synthetic coding sequence
  source 1..777: mol_type = other DNA
atggagcccaacgacagcaccagcaccgccgtggaggagcccgacagtctcgaggtgttggtcaaaacattagattcccagacccgaacatttattgtgggagcccaaatgaacgtgaaagaattcaaggaacacatcgctgcaagtgtctcaatacccagtgagaagcagcgccttatctaccagggtcgggtccttcaggatgataagaagctgcaggagtacaacgtgggaggaaaagtcatccatctggtggagcgtgcaccgcctcagacacatctgccttccggcgctagctcagggaccggcagtgcttctgctacacatggtggcggctcgcctcctggaacaaggggacccggcgccagcgtccatgacagaaacgctaattcttatgttatggtcgggacattcaatctcccaagcgacggtagcgccgtggacgttcacattaatatggagcaggctcccatccagtctgagccaagggtgcggctagtgatggcccagcacatgataagagatatccagacgctgctttctcgcatggagtgtagaggagggccacaacctcaacattcacaacctcctccccaaccccccgcagtcactcctgagcccgtagcgctcagtagccagacctcagagccggtggaatcagaagcccctccaagggaaccgatggaggcagaggaggtggaagagcgcgcacccgcccagaacccagaactgacgcccggccccgccccggccggccctacacccgctcccgaatag

SEQ ID NO: 180380 - DNA, 789 bp, synthetic construct
  misc_feature 1..789: note = Description of Artificial Sequence: Synthetic coding sequence
  source 1..789: mol_type = other DNA
atggagcccaacgacagcaccagcaccgccgtggaggagcccgacagcctggaggtgttggtgaagacattagattcacagacaagaactttcatcgtgggggcccagatgaatgtgaaggaattcaaggagcacattgccgcttctgtgtccattccatcggagaaacagagattgatttaccaaggccgcgtgttgcaggacgataaaaaattacaggagtacaacgtgggcgggaaagttatccacctcgtggagagagcccctcctcaaactcaccttccaagtggggccagcagcggcaccggctccgctagcgccacacatgggggcgggagccctcctgggactcgcggcccaggcgcaagcgtccatgacaggaatgcaaattcttacgtaatggtggggacattcaatctgcctagcgatggttcagccgtcgatgtgcatatcaacatggagcaggcgccaattcagagcgaaccccgtgtcaggctggtaatggcccagcatatgattagggacatacagaccctgttgagcaggatggaatgtaggggcgggccccagccacagcattcccagccccctcctcagcccccagcggttactcctgaacctgtggccctgtctagccagacctctgagcctgtagagtccgaggcaccgcctcgcgaacctatggaagccgaggaagtggaggagcgggcgcctgcgcagaacccagaactcacgcctgggcctgcccctgcagggcctactccggccccagaaacaaacgctccttag

SEQ ID NO: 180381 - DNA, 2232 bp, synthetic construct
  misc_feature 1..2232: note = Description of Artificial Sequence: Synthetic coding sequence
  source 1..2232: mol_type = other DNA
atggagcccaacgacagcaccagcaccgccgtggaggagcccgactctctggaagtactcgtcaagactttggacagccagaccagaacctttatcgtgggagctcagatgaatgtcaaggaattcaaagaacatatcgccgcgtccgtgagcattccatccgagaaacagagacttatttatcaggggagagtgcttcaggacgataaaaagcttcaagaatacaacgttggcgggaaggtgatacacctcgtcgaaagggcaccacctcagacacatctgccaagtggagcctcttcaggaacgggctcagcaagcgctacccacggtggaggatcgccccccggtacccgtggtccaggggcctccgttcatgatagaaatgctaattcatacgtgatggtgggcaccttcaatctcccttccgatgggtctgcggtggacgtccatatcaatatggagcaagccccgattcagagcgagccccgggtgcgcttggtgatggcccagcacatgatccgagatatccagaccctgctgagccgaatggagtgcagaggcggcccccagcctcagcacagccagcctcctccacagccgcccgcagtcacccccgagcccgtagctctgtcttcccaaaccagtgagcctgttgaatccgaggcaccccctagggaacctatggaagctgaagaggtcgaggaacgggcccccgcacaaaacccggaacttactcctggccctgccccagccggtccaaccccagctccagagacaaatgctcctaatcatccatcaccggctgaatacgtggaggttctgcaagagcttcaaagactggaatctcgcctacagccttttctccaaaggtactacgaagtgctcggagccgcagcgaccactgattacaacaacaatcatgaagggcgcgaagaggaccagagactgattaaccttgtcggagaatcactgcgcctactcggcaatacatttgtagccctgagtgaccttcgctgcaacctggcatgtacaccccctagacacctgcacgttgtgcggccgatgagccattatacaacccctatggtgctccagcaggccgccattccaatccagataaatgtcgggacaacggtgactatgactggcaatggaacgcgacctcctcctactcccaatgccgaagctccaccgcccggccccgggcaggcctcaagcgtggccccttcaagcacaaacgttgagagcagcgctgaaggggcccccccaccagggcccgcaccacctccagctacaagtcacccaagagtgattcggatatcacaccagtcggtcgagcccgtcgtaatgatgcatatgaacattcaagactccggtacccagccaggaggggtcccgagtgcgccaacaggccccctaggcccgccggggcatggccagacactcggttcaaccctcattcagttgccgtcgctccctcccgagttcatgcacgccgtggcgcaccagatcactcaccaggcaatggtggctgctgttgctagcgccgcggccggtcaacaggtccccgggtttcccactgcccccacacgggtcgttattgctaggcctacccccccacaagctcgtccgtcccatcccggaggaccgccagtctccgggacattgcagggagccgggctgggcaccaatgcgtctctagcgcaaatggtgtccggtctggtggggcagctgctgatgcaaccagtgttggtggcccagggcactcctggtatggctcctccccctgcccctgccaccgcttccgcatccgcgggaaccacaaatactgcaacaaccgctggacctgctccaggcggccccgcccagccaccacctactccgcagcccagcatggccgacctccagttctcacagctgcttggaaatctgttaggccccgctggtcctggagctggtgggtcaggtgtggcctcacccactatcaccgtagccatgcctggggtgcccgcattcctgcaagggatgaccgactttttgcaagcaacccaaactgctccccccccccctccacccccccctccgccgccccccgcccccgaacagcagaccatgccccctccaggtagcccgtctggcggtgcagggtctccgggcgggctggggctggaaagcctgtcaccagagttctttactagtgtggtgcaaggagtcctgtccagtctgctttag

SEQ ID NO: 180382 - DNA, 777 bp, synthetic construct
  misc_feature 1..777: note = Description of Artificial Sequence: Synthetic coding sequence
  source 1..777: mol_type = other DNA
atggagcccaacgacagcaccagcaccgccgtggaggagcccgacagcctggaggtgctggtgaagaccctcgactctcagacaagaacttttatcgtgggcgcacagatgaatgtcaaggagtttaaggaacatatcgcggccagcgtgtctatcccctctgagaaacagagactgatttaccaaggcagggtgttgcaagatgataagaaactgcaggaatacaacgtgggaggtaaagttatacacttggtggagagggcaccaccccagacccacctgccctccggagcaagttctgggaccgggtcggcaagcgcgactcacggtggtggctccccacctggaactaggggacccggcgcctctgttcacgacagaaatgccaactcatacgtaatggtgggcacctttaatctgcccagcgatggttctgccgttgatgtccacattaatatggagcaagccccaatccagagcgagccaagggtgcggctggttatggcacagcacatgatcagggacatccagacactcctttcccgcatggagtgtcgcggaggtccccaaccgcagcacagtcagcctcccccacagccgccagctgtgacaccggagccggtagccctgagctcccagacgagtgagccagttgagtctgaggcgcccccccgcgaacctatggaggccgaagaggtggaggaacgcgctccggcacagaaccctgagttgacccctgggccagcccctgctggcccaacacccgcccctgagtag

SEQ ID NO: 180383 - DNA, 558 bp, synthetic construct
  misc_feature 1..558: note = Description of Artificial Sequence: Synthetic coding sequence
  source 1..558: mol_type = other DNA
tgactggcctgcacccccccccggcacctgcacgtggtgcggcccatgtcccactataccaccccgatggttctgcagcaggcagctatccctattcagatcaatgtcggtactacagtgactatgaccggcaatggaacacgacccccgccgacgccaaatgccgaggccccacccccgggacccggacaggccagcagcgtagcccctagctcaactaacgttgaaagctctgcagagggcgccccgcccccgggccctgcccctccaccagccacctctcatcctagggtgatcaggatctctcaccagtctgtggagcccgtggtgatgatgcacatgaatatccagggccagcaggtccccggcttcccaaccgccccaacccgggtcgtcatcgcacgacctacccccccccaggcccggccatcgcaccccggggggccccccgtctcaggtactctgcagggggcaggacttggtaccaacgcgtctctggctcagatggtttcagggttagtggggcagctgctgatgcagcccgtacttgtagcttag

SEQ ID NO: 180384 - DNA, 648 bp, synthetic construct
  misc_feature 1..648: note = Description of Artificial Sequence: Synthetic coding sequence
  source 1..648: mol_type = other DNA
atggagcccaacgacagcaccagcaccgccgtggaggagcccgacagcttggaggtcctggtcaagaccctcgacagccagaccaggacttttatcgtgggtgcccagatgaacgtgaaggaatttaaggagcatatcgccgctagcgtgtcaataccaagcgagaagcagcggctaatttatcaaggaagggtgctccaagacgataaaaagctccaggaatataacgtcggcggaaaagtcatacacttggtcgagcgcgcccctccccagacacacctcccctcaggcgcatcatcaggaacaggctcagcgtcagccacacacggtggcggctctccccctggaacacgaggccctggcgcctctgtccatgacagaaacgctaactcttatgtgatggtgggaaccttcaatctaccttcagaaccccgggtgagactagttatggcccaacatatgatcagagacatccaaaccttactgagtcgaatggagtgtaggggcggaccccagccacagcattctcagccccctcctcagccgccggctgtgacccctgagcctgtcgcactcagcagtcagacgtctgaacccgtcgaaagcgaggccccacctcgagagccgatggaggcggaggaagtgtag

SEQ ID NO: 180385 - DNA, 780 bp, synthetic construct
  misc_feature 1..780: note = Description of Artificial Sequence: Synthetic coding sequence
  source 1..780: mol_type = other DNA
atggagcccaacgacagcaccagcaccgccgtggaggagcccgactctctggaggttctcgtgaaaaccctggacagccagactaggactttcattgtcggggctcaaatgaacgttaaagaatttaaagaacacattgcggcttccgtgagcattccatctgagaagcagaggttaatttatcagggacgggtgctacaggatgataagaagctgcaagagtacaacgtgggcgggaaggtgattcatctcgtggaacgcgctcccccccagacacatttaccctccggtgcctctagcggcactggatcagcctcagccacccatggagggggttcacctcccggaacgcgaggtcccggcgcaagcgtgcatgaccgtaacgcaaactcctacgttatggtcgggactttcaatctgccatccgacgggtccgccgtcgatgtgcacatcaacatggaacaggccccaatccagtccgagccacgggttcgcttggtcatggctcagcacatgataagggatattcagaccctgttgagccgaatggagtgcaggggggggccacagccccagcactcccagccaccacctcagccgcctgcggtgaccccagagcctgtggctctctcaagtcaaacctctgaaccggtcgagtcagaagcgcctcctcgcgagcccatggaagctgaggaggtcgaagagagagccccagcccagaatccggaattaaccccagggcctgcacccgcgggacccacccccgctcccgagacgtag

SEQ ID NO: 180386 - DNA, 477 bp, synthetic construct
  misc_feature 1..477: note = Description of Artificial Sequence: Synthetic coding sequence
  source 1..477: mol_type = other DNA
atggagcccaacgacagcaccagcaccgccgtggaggagcccgactccctggaggtgttggtcaagactctcgattctcaaactcggacatttatcgttggcgcccagatgaatgtaaaagaattcaaagaacacatcgcagcctccgttagcataccttccgaaaaacagaggttgatataccagggaagggtcttgcaggatgataagaagttacaggagtataatgtgggcggtaaagtgatccacctggtggagcgcgcacccccccagacacatctgcccagcggcgcaagcagcggaactggttcagctagcgcgacccatgggggtggttcccctccgggaactcggggtcctggggccagcgtccacgatcgcaacgcaaatagctacgtgatggtcggaacctttaacctgccgagtgacgggtctgcggttgatgtgcacataaacatggaacaggccccaatctag

SEQ ID NO: 180387 - DNA, 621 bp, synthetic construct
  misc_feature 1..621: note = Description of Artificial Sequence: Synthetic coding sequence
  source 1..621: mol_type = other DNA
atggagcccaacgacagcaccagcaccgccgtggaggagcccgactccctggaggttttggtgaagaccctcgactcccagacccgtacctttatcgtcggagctcaaatgaacgtgaaggaatttaaggagcacatcgcagctagcgtgtctataccttccgaaaaacagcggctaatttaccagggcagagtattgcaagacgataaaaagttgcaggagtacaacgtaggagggaaggtgatacaccttgttgaacgggcaccacctcagacgcatctcccctccggcgctagctctggcacaggtagtgccagcgccactcatgggggcgggagtccacctggcactcgtggcccaggcgcttctgttcatgacagaaatgcaaattcttacgtcatggttggaaccttcaatctgcctagcgagccgagggtgaggctggtgatggcgcagcacatgatcagggatatccagacattactctctagaatggagtgcagagggggaccacaacctcaacatagccagcccccccctcagccgcccgcggtgactcccgagccggtggcactgagttcacaaacaagtgagcccgtggaatcagaagcccctccttag

SEQ ID NO: 180388 - DNA, 2232 bp, synthetic construct
  misc_feature 1..2232: note = Description of Artificial Sequence: Synthetic coding sequence
  source 1..2232: mol_type = other DNA
atggagcccaacgacagcaccagcaccgccgtggaggagcccgactcactggaggtgctggtgaaaactctggactcacaaacacgaacttttattgtgggggcacagatgaacgtgaaagaatttaaggaacatatcgccgcatctgtcagtattcccagtgagaaacagcggctcatctatcagggaagggtcctgcaagatgacaaaaagcttcaagagtacaatgtcggtggcaaagtgatccatctggtagagcgcgctcctcctcagacccacctgccttccggggcgagctcagggactggttccgcaagcgccacacacggtggtggcagccctcctggcaccaggggtcctggagcaagtgtgcacgaccgtaacgccaattcttacgtcatggtgggtactttcaatttgccttccgatgggagcgccgtagacgtccacatcaacatggaacaggcccctattcaaagtgagccccgcgtccgcctcgtcatggcccagcatatgatcagagatatccagactcttctatcgaggatggagtgtaggggaggaccacagccccagcactcacagcctccgccacagccacccgccgtgactccggagcctgttgctctgagttcacagacatctgagcctgtggaaagtgaggctcctccccgggagccaatggaggctgaggaggttgaggaaagggcccccgcccaaaatccagaactcaccccaggaccagccccggctggcccgacccccgcgcctgagaccaacgcccccaaccacccatcacccgctgaatacgtggaggtgttgcaagaactacaacgattggaaagcaggctacagccatttctgcaacgctactacgaggtcttaggcgccgccgcaacaaccgactataataacaaccacgagggcagggaggaggatcagcgtctcatcaacttagttggtgaatctctgcgcctgctggggaacactttcgtcgcattatctgaccttaggtgcaacttggcttgcaccccacctcggcatctccacgtggtaagacccatgtcacactatacaacacccatggtgctgcagcaagccgccattccgattcaaattaacgtgggaacaactgtgaccatgacaggaaacgggacccggccccccccaacccctaacgccgaagcacctcccccaggccctggtcaagcctcttcggtggcccccagttccactaacgtagagagctctgccgaaggcgctccgccgccggggcccgctccgcctccagctacaagtcaccccagggtgattaggatctctcaccagtctgttgagcccgtagtaatgatgcacatgaatattcaagatagtggaacacaacctggcggggtccctagcgccccaaccggcccgctgggacccccgggccatggtcagaccctgggaagcacactgattcagttgccttctttgccacctgagttcatgcacgctgtggctcaccagattacccatcaggccatggtggccgcagtggcctcagccgccgctggccaacaggtgcccgggtttccaactgcacccaccagggtcgtcatcgctcgaccaacccctccccaggcccgcccttcccatcctggcggaccccctgtgagcggtactctccagggtgccggcctggggaccaacgccagtctcgcccagatggtttcaggccttgttggacagctgctgatgcaacctgtcctcgtggcccagggtacccctggaatggctcccccccctgcccccgcgacggcctctgcctcggcaggtactaccaatactgccactactgccggccccgctccgggaggaccagcgcagcctcctcccacaccccagccttcgatggcagacctgcagttttctcagcttctgggcaacctcctgggacccgccggtcccggcgccggtggaagcggcgttgcgagtcctacaataactgtcgcaatgccaggcgtgccagccttcttgcaggggatgactgacttcctgcaggccacacagaccgctcccccccccccaccacctccacctcccccacctccagccccagagcagcagactatgccaccacccggatctccctccggaggggcagggtctcccggcggactgggattggagagcctgtctcccgagttctttacctcggtggtgcaaggcgtgttgtcaagtctgctgtag

SEQ ID NO: 180389 - DNA, 681 bp, synthetic construct
  misc_feature 1..681: note = Description of Artificial Sequence: Synthetic coding sequence
  source 1..681: mol_type = other DNA
tgaagcggcttcggcgcccggctgctggagctgtgcaaccagggcctctttgagtgtcttgccctgaacctacattgcctgggtgggcagcagatggagctcgcagctgtcatcaatggccggatacgccgcatgtctaggggagtcaacccatcccttgtgtcttggctgacaactatgatgggattacgcctccaggttgtgctcgaacatatgccagtcggacctgacgcaatcttgcggtacgtgaggcgcgttggggatccaccccagccactccctgaagagccgatggaggttcagggagctgaacgagctagtccagaaccccagcgcgaaaatgcctcaccggcacccgggaccaccgccgaagaggcgatgtctcggggtccacctcccgccccagagggcgggtccagggatgagcaagatggggccagcgcggagacggaaccgtgggctgccgctgttccacccgagtgggtacccatcattcagcaggatatacaaagccagagaaaggttaagccccagccccctctgtcagatgcttaccttagcggtatgcccgctaagcgccgtaagttgcgaagtgacatccagaagcgcctccaggaggacccaaattattcaccgcagcgtttccccaacgcccagcgggcttttgctgacgacccgtag

SEQ ID NO: 180390 - DNA, 594 bp, synthetic construct
  misc_feature 1..594: note = Description of Artificial Sequence: Synthetic coding sequence
  source 1..594: mol_type = other DNA
atggagcccaacgacagcaccagcaccgccgtggaggagcccgactcccttgaggtgttggtgaagacactcgacagccaaacacgcactttcattgtgggagctcagatgaacgtcaaggagtttaaagaacatatcgcagcttctgtgtccatcccgtcagaaaaacaaagactgatttatcagggtagggttttgcaggacgacaagaaactgcaagaatacaacgtcgggggaaaggtgattcacttggtggagagggcacccccccaaactcacctccccagtggagcaagctcaggaacgggctccgctagtgctacacacggcggcggctctccaccaggcactagggggcctggcgcctcggtgcatgaccgaaatgcaaattcctatgttatggttggcacattcaatctcccctccgatggttcagccgtggatgttcacattaacatggagcaggcccctatccagtctgaacccagagtccgtttagtgatggctcagcatatgattcgggatattcagaccctgctttccagaatggagtgcaggggcggcccccaacctcagcattctcaaccaccctag

SEQ ID NO: 180391 - DNA, 717 bp, synthetic construct
  misc_feature 1..717: note = Description of Artificial Sequence: Synthetic coding sequence
  source 1..717: mol_type = other DNA
agcagcgccgagggcgcccccccccccggccccgcccccccccccgctactagtcacccccgcgtaattaggattagccatcagagtgttgagcctgttgtcatgatgcatatgaacatccaaggaccactgtctctctccccttgtccagactccggcacacaacctggcggtgttccttccgcccccaccggacctctcggcccaccagggcatggccagaccctggggcagcaagttccgggattcccaacggcccccactagggtcgtcatcgctcgtcccacccccccccaggccagaccctcccatccaggtggcccaccagtctccggtacattgcagggcgctggactgggtacaaatgcttccctggcccagatggtgtctgggctggttggccagctgctcatgcagccggttctcgtggcccagggtacaccgggcatggcgccccctccagctccagctacggcctcagcgtcagcaggcacaaccaacacagctaccacggccgggcctgccccggggggacctgcgcaacctccacccacgccccaaccctcaatggctgacctgcagttctcgcagcttctggggaacctgctcggcccggcagggcccggggctggcggtagtggcgttgctagcccaactataactgtggcgatgccaggagtgccggcctttctgcagggcatgacagactttctgtag

SEQ ID NO: 180392 - DNA, 735 bp, synthetic construct
  misc_feature 1..735: note = Description of Artificial Sequence: Synthetic coding sequence
  source 1..735: mol_type = other DNA
atggagcccaacgacagcaccagcaccgccgtggaggagcccgactcgctcgaggtacttgtcaaaacacttgactcccagactcgaaccttcatcgtcggagctcagatgaacgtgaaagaattcaaggagcatatcgccgcctccgtgtctatcccaagcgagaagcagcggttgatatatcaaggacgagttttacaggatgataagaagctgcaggaatacaatgtggggggcaaggtaatccacctggtagagagggctccgccccagactcacctccccagcggggcctcatctggtacgggctccgcttctgcaactcacggggggggcagtccccctgggactagaggccctggggcttccgtacacgaccgcaacgccaattcctatgtcatggtgggcaccttcaatctgccatccgaacctagggtcaggctcgtcatggcccagcacatgatacgtgatatccagaccctgctctctaggatggagtgcagaggaggacctcagccacagcattcacagcctcctccacagcctcctgcggtgacacctgaacccgttgcgctctcttcccaaacaagtgaacctgtagaaagcgaagcccctccaagggagcccatggaagcagaagaagtggaggagcgcgccccggctcagaaccctgagttgacgcctggaccagctcccgccgggccaactccagctcctgagaccaacgcaccttag

SEQ ID NO: 180393 - DNA, 789 bp, synthetic construct
  misc_feature 1..789: note = Description of Artificial Sequence: Synthetic coding sequence
  source 1..789: mol_type = other DNA
atggagcccaacgacagcaccagcaccgccgtggaggagcccgacagtctggaagttttggtcaaaacgctggacagccagacccgcacctttatagtcggcgcccagatgaatgtgaaagaattcaaggagcacatcgcagcatcagtgtccataccatcagaaaaacagaggttgatttaccagggccgggttctgcaagatgataagaaactgcaggaatataatgtgggagggaaagttatccatctggtcgagcgagccccgcctcagacccatctgccttctggtgcatcttcaggtaccggcagtgcttccgctacccacggcggtggatctcccccaggcaccagagggcctggtgctagcgtacacgacagaaacgcaaattcatatgtgatggtgggaacttttaatctcccttctgacggcagcgctgtggacgtgcatatcaacatggaacaggcaccaatccaatctgagccaagggtgcgcctggtgatggcccaacatatgatcagagatatccagactctgttgtcacgcatggaatgtaggggcggaccccagcctcaacactcccagccccccccacagcctcccgcagtgacgcctgaaccagtcgcactgtcctcccagacatccgagcctgttgaatctgaggctccgcccagagaaccaatggaagccgaagaagtggaggagagggcccccgcgcagaatccggagcttactcccggccctgccccggctggccctacgcctgcccccgaaacaaatgcgccatag

SEQ ID NO: 180394 - DNA, 2232 bp, synthetic construct
  misc_feature 1..2232: note = Description of Artificial Sequence: Synthetic coding sequence
  source 1..2232: mol_type = other DNA
atggagcccaacgacagcaccagcaccgccgtggaggagcccgacagcctggaggtgcttgtgaagaccctggatagtcagaccaggacatttattgttggggctcaaatgaatgtcaaggagttcaaagagcacatcgccgcatcagtgtctatcccaagtgagaagcaaagactgatctaccaaggtagagtgctgcaggatgacaaaaaactgcaggaatacaatgtgggtggcaaggtcattcatttggtggagagggcccctcctcagacccatctgccttcaggtgcgagtagcggcacgggatccgcaagtgcaactcacggcggagggtcacccccaggcaccagaggacctggagcctctgtgcacgacagaaacgcaaatagctatgtcatggtcggcacttttaatttgccgtccgacggcagcgccgtcgatgtacatattaatatggaacaggctcccattcaatctgagccaagagttcgtcttgttatggcacaacacatgataagagacattcaaactctgctgagtcgaatggagtgcaggggcgggcctcagcctcagcactctcagcctccaccacaacctcccgcggtgacacctgagcccgttgccctgagctcacagactagcgaaccagtggaatctgaagctcctccccgagagcctatggaagcagaggaagttgaggagcgtgcaccggctcaaaatccagaacttactcccgggccagcacctgcaggccctacccctgcccccgagacgaacgctccgaaccatccttcgccagctgaatatgtggaggtcttgcaggaactccaacgtttggaatctcggctccagcctttcctgcagcgctactacgaggttttgggtgccgcagcgaccacggactataacaataaccacgaagggcgcgaagaggatcagcgcctgatcaatctcgtgggggagtcactaaggctgctcggaaatacgttcgtggccctctctgacctccgctgcaatctggcttgtacccccccaagacacttacacgtggtgcgccctatgtcacactacaccactccaatggttcttcagcaggctgcaattccaatccagatcaacgtgggcactacagtgactatgaccggaaatggaacacggcctccccctactccaaatgctgaagcccccccccctgggcccggacaggccagctccgtcgctccgtcttcaactaacgtagagtcctccgcagaaggcgcacctccccctgggccggctcctcctccagccacaagccacccacgagtaatcaggatcagccaccagagcgtggagccggtcgtcatgatgcatatgaacatacaggacagcggcacacaacctgggggagttccctccgcaccaaccgggcccctcgggccacccggacacggacagacacttgggagcaccctgatccagcttccttctctgcccccggagtttatgcacgctgttgcccaccagatcacgcaccaggccatggtagccgcagtggcctccgcggcggcagggcagcaagttccgggctttcctacggcccctaccagggtcgttatcgcccgtccaactcctccgcaggcaagaccttcccacccagggggaccgccagtgagtggaacccttcagggagccggactcggtaccaacgcgagtctagcccaaatggtcagtggactggtgggccagctgctgatgcaacccgtgctggtcgcgcagggcactccaggcatggccccaccgcctgctcccgcgactgcctcagcttctgccggcacgaccaataccgccacgacagccggacctgctcccggtggaccagcccagcctccccccactcctcagccaagcatggctgatttgcagttctctcagctgctcggcaacctcctcggccctgctggaccgggagcaggcggcccgggagtggcctccccgacaattaccgtcgctatgcctggcgtccccgccttcctgcagggaatgaccgatttcctccaggctacacaaacagccccacccccacctccaccacctcctccaccgcctcctgcccccgagcagcagacaatgcctccgcctggttcaccttccggtggggcgggttctccgggaggattgggacttgaaagtcttagccccgagttctttacttctgttgttcagggggtgttaagcagtttgttgtag

SEQ ID NO: 180395 - DNA, 735 bp, synthetic construct
  misc_feature 1..735: note = Description of Artificial Sequence: Synthetic coding sequence
  source 1..735: mol_type = other DNA
atggagcccaacgacagcaccagcaccgccgtggaggagcccgactccctggaggtgctggttaaaacattggactctcaaacccgtacattcatcgtgggcgctcaaatgaatgttaaggagttcaaagagcacatcgccgctagcgttagtattccatccgagaaacaacgcctcatttaccagggcagggtcctgcaagacgacaagaaattgcaggagtacaacgtgggcgggaaagttatccatcttgtggagagggcgcccccacaaacccacctcccatcaggtgccagtagcgggaccggcagcgccagcgccactcacggaggagggtcaccacctggcacacgtggaccgggggcaagcgtgcacgatcggaatgccaattcctatgtgatggtggggacttttaacctgccctcagagcctcgcgtaagactggtgatggcacaacacatgattagggatattcaaacattactgagccggatggaatgccgaggaggtccgcagccgcagcatagccagcctccgccacagccgccagccgttacacctgagcccgtcgctctgagctcccaaaccagcgagccagtcgagtctgaagcccctccccgggaacctatggaagctgaggaagttgaggaacgcgccccagcacagaacccagagctgacccccggaccggcccctgccgggccaacccctgcccccgagacaaacgccccgtag

SEQ ID NO: 180396 - DNA, 789 bp, synthetic construct
  misc_feature 1..789: note = Description of Artificial Sequence: Synthetic coding sequence
  source 1..789: mol_type = other DNA
atggagcccaacgacagcaccagcaccgccgtggaggagcccgactctctcgaagtgttggtcaaaaccctggatagtcagacccgcacgttcattgtcggtgctcagatgaacgtcaaggaattcaaggagcatatagcagcatcggtgtccatccctagtgagaaacagcgtttgatctaccagggaagggtgctgcaggacgacaaaaaacttcaggagtataacgtcgggggcaaggtgattcacctggtggagcgggcaccaccccagacccatctgccctccggtgcctcctctgggacggggtcagcttcagccactcatggagggggatcacccccaggcaccaggggccccggagccagcgtgcatgataggaatgcgaactcatatgtgatggttggcacatttaacctaccgtctgatggaagcgccgtggacgttcatataaacatggagcaggcgccaattcagtcagagcctcgagttaggctcgtgatggctcagcatatgattcgcgatatccagactctgcttagcaggatggaatgccgcggggggccgcaacctcagcatagccagccccccccgcagccacctgctgtaactcccgaacctgtagccctgagttcccagacgagcgagcctgtggagagcgaggcacccccaagagagcctatggaggcggaggaggtcgaggaaagggccccagctcagaatcccgagctgactccaggtccagctcccgccggtcctacgccagcaccggagaccaacgcgccctag

SEQ ID NO: 180397 - DNA, 2712 bp, synthetic construct
  misc_feature 1..2712: note = Description of Artificial Sequence: Synthetic coding sequence
  source 1..2712: mol_type = other DNA
atggagcccaacgacagcaccagcaccgccgtggaggagcccgacagtcttgaggtgttagttaagacccttgactctcagacacgaacttttattgtcggagcacagatgaacgtgaaggagttcaaagaacacattgcagcttctgtgtccatcccttcagagaagcaacggcttatctaccagggcagggtcttgcaggacgataagaaactccaggaatacaacgttggcggaaaagtcatccacctagtggagagagcacctcctcagacccatttgccgtctggagcctctagcggcacaggttccgctagcgctacgcatggtggggggtcaccgcctggtacaaggggccctggagcgtcggtgcacgatcgaaacgctaattcctacgttatggtgggcaccttcaacctgccgtcagatggctccgctgtggacgtgcacatcaatatggagcaggctcctattcagtccgagcctagagtgagattagtgatggcccagcacatgatacgagacattcagacgttgcttagtcggatggaatgtcgcggcggcccacaacctcagcatagccagcctccgccccaaccccccgcagtgacacccgagccagtagcactgtcatcccaaacgagcgaacctgttgaatctgaggcgccacctcgagagccaatggaggcagaggaggtggaagaacgagcccctgcgcagaatccagagctgaccccagggcccgccccagctggcccaacacctgctcccgagactaacgctcctaatcacccttcaccagccgaatacgtggaggtattacaggaattacagcgattggaatcaaggttgcagccgtttctccagcgatactacgaggtcttgggcgctgccgcaaccaccgattacaacaacaatcatgaggggcgtgaagaagaccaacgcctgatcaatctcgttggggaaagcctgaggctcctgggcaatactttcgtcgctctcagcgatttgaggtgcaatctggcctgtaccccccccaggcatctgcacgttgtgagacctatgagccactatacaacgcctatggttctgcaacaggctgccattcccattcagatcaatgtgggaaccacagttacaatgactggaaatgggactcggccaccacccacccccaatgccgaggcgcccccccccggcccgggtcaggccagttctgtcgcgccaagctccactaacgtggagtccagtgcagaaggcgctcctccacccgggcctgctcctcctccagctacatcccacccaagggttataaggatctcccaccagtctgtggagcctgtagttatgatgcatatgaacattcaggactctggcacacagcccgggggcgtgccctctgctcctaccggaccgctgggacctcctggtcacggccagacacttgggcagcaggtacctggattccccactgccccaaccagggttgttatcgcaagaccaactccaccccaggcacggccaagccaccccggaggtccccccgtttccgggacactcggggccggccttggcaccaacgcttctttggctcaaatggtgtctggcctggttggtcagctcttgatgcaacccgtgttggtcgcccaggggacacccggctcccccggcggattagggctggagtcactgtctcctgagttcttcacttccgtggtgcagggcgtgctatcctcccttttggggtcactaggtgctcgtgccggctccagcgagtccatcgcggcttttattcagaggttatcaggcagtagtaatatctttgaaccgggagctgatggagccctgggcttttttggagccctcctctccttactgtgccaaaatttttctatggtggacgtggttatgctgttgcatggccacttccagcctctgcaacggctccaaccacagttgcgaagtttcttccaccaacattaccttggagggcaggagccaacaccctctaacatccgcatggccacacacaccctgattactggtctagaggaatacgtcagggagagcttttccttagtgcaagtgcagcctggcgtggatattatacggacgaacctggagtttctgcaggagcaattcaatagcattgccgcacacgtgctccactgtaccgattccggattcggcgctaggcttcttgagctctgcaatcagggtctcttcgagtgcctagccctgaacctgcattgcctggggggtcagcagatggagctggctgccgttatcaatggaaggattcgccggatgtcacgcggagtgaatccttccttggtgagttggctgacaactatgatgggcctgaggcttcaagtagtactcgagcacatgcccgttgggcccgatgccatcctacgctacgtgagaagggtgggcgatccacctcagccgcttcccgaggaaccgatggaggtgcagggggctgaacgggcgtctcccgaacctcaggagtgggtgccgattattcagcaagacatacagagtcagcggaaggttaaaccacagccccccctgtctgatgcatacctgtctggcatgccggccaaaaggaggaagctcagatcggacatccagaaacgcttgcaagaggatcccaattattcacctcaacggtttccaaacgcacagcgcgccttcgccgacgatccatag

SEQ ID NO: 180398 - DNA, 558 bp, synthetic construct
  misc_feature 1..558: note = Description of Artificial Sequence: Synthetic coding sequence
  source 1..558: mol_type = other DNA
tgactggcctgcacccccccccggcacctgcacgtggtgcggcccatgagccattataccacccctatggtgcttcagcaggctgccatcccgattcaaattaatgtgggtaccacagtgaccatgacaggcaatgggacccggccgccacccaccccaaacgcggaagctcctccacctggtcctggacaggcatcctctgttgcgccatcaagcacgaatgttgagagcagcgcagaaggtgctcctcctcctgggcctgccccacctccagctaccagccacccacgggtgattagaataagtcaccagtctgtcgaaccggtggtaatgatgcacatgaatatccaaggccagcaagtcccagggttccccacggcacccacccgggtcgtgatagcaaggccgaccccccctcaggctcggccgagccacccagggggtcctcctgtgtcgggtacgctccaaggagctggactgggcaccaacgcaagtctggcacagatggttagcggtttggtgggccagctgctcatgcagccggttctggtggcttag

SEQ ID NO: 180399 - DNA, 789 bp, synthetic construct
  misc_feature 1..789: note = Description of Artificial Sequence: Synthetic coding sequence
  source 1..789: mol_type = other DNA
atggagcccaacgacagcaccagcaccgccgtggaggagcccgacagcctcgaagtgctggtgaaaactctggactctcagacacgcactttcatcgttggcgctcaaatgaacgtgaaggagttcaaagagcacatcgccgcctcggttagcattccttcagagaagcagcgcttaatttaccaggggcgcgtcctgcaagacgataagaaactgcaggaatacaatgtggggggcaaagtgattcatctggttgagcgagctcccccccaaacccacctgccatctggagcaagctccggaacaggaagcgcctccgctactcatggagggggatccccgccaggcactagaggccccggggcatccgtgcatgatagaaatgcaaacagctatgtaatggtggggacatttaacctgccctccgatggatcggcagtggacgttcatattaacatggagcaggcacctatccagtcggagccacgcgtgcgcttagttatggctcagcacatgatccgcgatattcagaccctgctaagtaggatggagtgtcggggcgggccccaaccacagcatagccagcctccacctcagccccccgctgttacacccgagcctgtagcacttagctctcagacaagcgaacccgtcgaatccgaggctcctcctagagagccaatggaggcagaggaggtagaagaacgggctccagcccagaatcctgaattaacccctggacctgccccagctggaccaactcctgcccccgagaccaatgccccctag

SEQ ID NO: 180400 - DNA, 621 bp, synthetic construct
  misc_feature 1..621: note = Description of Artificial Sequence: Synthetic coding sequence
  source 1..621: mol_type = other DNA
atggagcccaacgacagcaccagcaccgccgtggaggagcccgacagccttgaagtcttggtcaagactctggatagccagactcggacgttcattgtcggcgcccagatgaacgtcaaagagttcaaagagcatatagctgcctccgtgagcattccctccgagaaacagagactcatctatcagggtcgcgtgctccaagatgataagaaactgcaggagtacaatgtgggcgggaaggtcattcatctcgttgagagagcaccaccacagacgcacctgcccagcggcgcgtcttccggaactggttccgcttctgcaacccacggcggggggtctccaccggggacacgtgggccaggggcgtccgtgcatgacaggaacgcgaactcgtacgtgatggttggaacctttaatttgccctccgagcctagagttaggctggtaatggctcaacatatgatccgggacattcagactctcctgtcaagaatggaatgccggggtggcccccaaccacagcacagccaaccaccccctcagcctccggccgtcactccggagccagtcgcccttagtagccaaactagtgagcctgtggaatccgaggcccccccatag

SEQ ID NO: 180401 - DNA, 681 bp, synthetic construct
  misc_feature 1..681: note = Description of Artificial Sequence: Synthetic coding sequence
  source 1..681: mol_type = other DNA
tgaagcggcttcggcgcccggctgctggagctgtgcaaccagggccttttcgagtgtcttgctctcaatctccattgccttggcgggcagcagatggaattggcagccgtgattaacggaagaatccggcggatgtccagaggcgtgaatccctcactggtcagctggctcactaccatgatgggcctgaggctgcaagtagtgttggagcacatgcctgtagggcctgacgctattttgcggtatgtacgccgagttggtgacccgccccagccgctgccagaagagccaatggaagttcaaggcgcagaacgggcttcacctgagcctcaaagagagaatgccagccccgctcccggaaccactgccgaggaggccatgtctcgcggccctccccccgcccccgagggcgggtctcgggatgaacaggacggcgcttccgccgagaccgagccctgggctgctgctgtgccgcctgaatgggtgccaatcatccagcaggacatccagagtcagcgaaaggtcaagcctcagcctcccctgtctgacgcctacctgtccggcatgcccgcgaagcgacgtaagttaagatcggatatccaaaagcgcctgcaggaggatccgaactattcacctcaacgattccccaacgcccaacgtgcctttgccgacgatccttag

SEQ ID NO: 180402 - DNA, 780 bp, synthetic construct
  misc_feature 1..780: note = Description of Artificial Sequence: Synthetic coding sequence
  source 1..780: mol_type = other DNA
atggagcccaacgacagcaccagcaccgccgtggaggagcccgacagcctggaagtcctggtcaagaccctagactcccagactcgtacttttattgtgggggcacaaatgaatgtgaaagaatttaaagagcacattgccgccagtgtttcaatcccttccgagaagcagcgcctcatctaccagggcagggtgcttcaggacgataagaagctgcaagaatataatgttggaggcaaggttatacatttagtagagcgggccccacctcagacccatctgccatccggcgcgagtagcggtaccgggtccgcctcagccacccatggcggggggtccccacccggtacgcgcgggccaggggccagtgttcacgataggaacgctaacagctatgtaatggtcggaacattcaatctgccatccgatgggtcggccgtggacgtgcacatcaatatggaacaagccccaattcagtccgaaccacgagttagactggtcatggcgcaacacatgattcgtgacatacagactcttttatctcgtatggagtgtagaggagggcctcagccacagcatagtcagccgccccctcagccaccggcggttaccccagagcctgtagctctgtctagtcagacctccgaaccggtggagagcgaggcccctccaagggagcccatggaagccgaagaggttgaagagagggcccctgctcaaaacccggagctgaccccaggccctgccccagctggcccgacgcccgcaccagagacctag

SEQ ID NO: 180403 - DNA, 777 bp, synthetic construct
  misc_feature 1..777: note = Description of Artificial Sequence: Synthetic coding sequence
  source 1..777: mol_type = other DNA
atggagcccaacgacagcaccagcaccgccgtggaggagcccgacagtctagaagttctagtgaagactctagacagtcagacacgtacctttatcgtgggcgcccaaatgaacgtcaaggagtttaaagaacacatcgcggcttccgtctccataccatccgaaaaacagagattaatctatcagggtagggttctacaggacgacaagaagttgcaggaatataatgtcggcgggaaggtgatccacctggtggaacgtgccccaccacaaacccacttgcctagcggggccagctccggaaccggttctgcgtctgctacacatggaggaggctcccccccaggaacaagaggccctggcgccagtgttcatgaccggaatgccaactcctatgtcatggtcggcacctttaatctgccaagtgatgggtccgctgtggatgtgcatattaatatggagcaggcgcctatccagtccgagcccagagttcggcttgtgatggctcagcacatgatacgtgatattcaaacattactcagtcgaatggaatgtcggggggggcctcagccacagcacagtcaacctccacctcagcccccagctgttacgcccgagcccgtcgctctctcgagtcagacctcggagccagtggagagtgaggcgccaccacgggagcccatggaggcagaagaggtggaggaacgtgcccctgcccaaaatccagagctaacaccgggtcctgctccggccggaccaacgccggcgccagagtag

SEQ ID NO: 180404 - DNA, 477 bp, synthetic construct
  misc_feature 1..477: note = Description of Artificial Sequence: Synthetic coding sequence
  source 1..477: mol_type = other DNA
atggagcccaacgacagcaccagcaccgccgtggaggagcccgacagcctggaggtgctcgttaagactcttgattcccagactagaacttttatcgtgggggcccagatgaatgttaaagagttcaaagagcacatcgctgcctctgtgagcatacctagtgaaaaacagaggctcatctaccaaggtagggtgctccaggatgataaaaagctgcaagaatacaacgtcgggggtaaggtgatccatctcgtggagcgtgctcctccccagactcatctgccctccggtgcgagctccggaacagggagtgcctctgcaacgcatggtggcgggtcaccgccaggtacccgggggccgggggccagcgtgcacgatcggaacgctaattcctacgtgatggtcggcacctttaacctccctagcgatgggtctgcagtggacgttcacatcaacatggaacaggcgccaatatag

SEQ ID NO: 180405 - DNA, 735 bp, synthetic construct
  misc_feature 1..735: note = Description of Artificial Sequence: Synthetic coding sequence
  source 1..735: mol_type = other DNA
atggagcccaacgacagcaccagcaccgccgtggaggagcccgactcactggaggttctggttaagacactagattcccagacaaggacatttatcgtgggcgcccagatgaacgtcaaagaatttaaagagcacatcgcggcctcggtaagcattccttcggagaaacagcgacttatatatcagggtagagtcctgcaagatgataaaaagctccaggagtacaacgtcggaggtaaggtgattcatctcgtagagcgggctcccccccagacgcacctgccaagcggggcatcatccggaactgggagcgcctccgccacgcatggtgggggttctccacccggaacccggggcccaggagcaagtgtacacgacaggaacgccaattcttacgtgatggtgggcacatttaacctgccttctgagcctagggtgaggctcgtgatggcacagcacatgattcgagacattcaaacacttttgtctcgaatggagtgcagaggcgggccacaaccacagcactcacagccaccacctcagcctcccgcggttacccctgaaccggtggctctctctagccagacaagtgagcccgtggagtctgaggcacccccaagagagcccatggaggctgaggaagtcgaagagcgcgctcctgcacagaatccagaactgacaccagggcctgccccggccggcccaacaccagctcccgaaacaaacgccccgtag

SEQ ID NO: 180406 - DNA, 3381 bp, synthetic construct
  misc_feature 1..3381: note = Description of Artificial Sequence: Synthetic coding sequence
  source 1..3381: mol_type = other DNA
atggagcccaacgacagcaccagcaccgccgtggaggagcccgacagcctagaggtgctcgtcaagacgctggactctcagacccgtactttcatcgtcggcgcgcaaatgaacgtgaaggaatttaaggagcacatagcggctagtgtaagtattccctctgagaagcagaggctaatatatcaaggccgggtcctccaagacgacaagaaacttcaggagtacaatgtgggaggaaaagtaatacacctagtggaacgggctcctccccaaactcatctgccaagtggcgcgagttccggaacaggatcagccagtgcgacccacgggggtggcagtcctccaggcaccaggggcccaggggcttcagtacacgacaggaatgccaatagctatgtgatggtgggcacctttaacctgccttccgacggatctgcggttgatgtgcacataaacatggagcaagcacccatccagagcgagccaagggttcgattggtaatggcccagcatatgattagggacatacagaccctcctcagtcgtatggagtgcaggggagggccccagcctcaacactcccagcccccaccacagcctcctgcagtaactccagagccagtcgccctcagcagtcagacctctgaacccgtggaatccgaagctccgccacgggagcccatggaggctgaggaggtggaggagagggctcccgcacagaaccccgagcttacccctggcccagctccagccggtcccacccctgcccccgagaccaacgcaccgaaccacccttcacccgccgagtatgttgaggtactacaggagcttcaaagactggaatcgcgactgcagccatttctacagagatactatgaagtgctgggtgccgcagccaccactgattacaacaacaaccatgaaggcagggaagaggaccagcggttgatcaacctcgtaggggagagtctgaggcttctgggaaatacctttgtcgcgctgtcagatctgcgatgtaatctggcttgcactcccccccgtcatcttcacgtcgtgcgccctatgtctcattacacaacacccatggtactgcaacaagctgccattccaattcagatcaatgtgggcaccactgtcaccatgacgggaaacgggacacgcccccccccaactccaaatgcagaggcacccccccctggcccaggtcaggcatcttccgtagctcccagcagcactaatgtcgaaagctccgctgaaggcgccccacccccggggcctgcaccaccacccgcaactagtcaccctcgggtaatccgcatcagccaccagagcgtggaacccgttgtcatgatgcatatgaacattcaagacagcgggacccagccaggaggggtgccttctgctcctacgggtcctctcgggccgcccgggcatggccagactctcggtcaacaggtccccgggtttcctaccgcaccaactagagtcgttatcgccagaccaacacccccacaggctaggccatcccacccagggggcccccctgtctccggcacactccagggtgccggattaggcactaatgccagtcttgcccagatggttagtggcctcgtgggccaactgctcatgcagcccgtgctcgtcgcacagggaacccccggaatggcacccccaccagcgcctgcgacggcaagcgcgtccgcaggaaccaccaacaccgcgactacggccggccccgccccaggagggcccgcgcagccaccacctacccctcagcccagcatggctgatttacagttcagtcagctgctgggcaacttgctgggccctgctgggccaggagctgggggctctggtgtggcgagtccgacaattaccgtggccatgcccggcgtccccgccttcctgcaggggatgaccgatttcttgcaggccacacagactgcacctcccccaccgccgccccccccacccccacctcctgcaccggagcagcaaacgatgccacctcccggctcaccatccggcggagcagggtctcccggcggtctggggctggagagtctgtccccggagttttttaccagtgtggtacagggagtccttagtagcttacttgggagcttaggcgcgagagcaggcagtagcgagtcaatagctgcctttattcagcgtctgtctggatcaagcaatatatttgaacctggcgctgatggggcgctaggcttctttggagccctcttgagtctgctatgccaaaacttttctatggtagacgtggtgatgcttctccatggccattttcagccattgcaaaggctgcagccacagctacggtcttttttccaccagcattacctgggaggtcaggaacccacacccagcaatatacggatggcgacacataccctgatcacaggcctagaggagtacgtcagggagagtttctccctcgtgcaggtgcagccgggggtcgatataatccgcactaatctggaattcctccaggagcagttcaacagtatagcagctcacgtcttgcattgcactgattcaggattcggcgctcggctgcttgagctatgtaaccagggtctttttgaatgcttagccctaaacttacactgtctgggaggccagcagatggaactggccgctgtgattaatggccggataagacggatgagcaggggcgtgaacccgtcactggtgtcctggctgaccaccatgatgggccttcggctacaggtcgttttggagcatatgccagtcggaccagacgccatcctcaggtacgttagaagagtgggcgacccgcctcagccactgcctgaggaaccaatggaagtgcagggggccgagcgagcatccccggaaccccagagagaaaacgcttcacctgcacctggcactacagccgaggaagctatgagtcggggtcctccacccgccccggagggcggctccagggatgagcaagacggtgcatctgctgagacagaaccctgggcggctgccgtcccacccgagtgggtgcctatcattcagcaggacattcagagccagcgcaaagtgaaaccacagcctcctttgagcgatgcctacctgtccggcatgcccgctaagcgccgcaagaccatgcagggcgagggacctcagctgctcctgtccgaggctgtctcaagagctgctaaggcagctggggcccgaccactgactagtcctgagtctctgagtcgcgacctggaggcccccgaagttcaagagtcgtatcgtcagcagttgaggtccgatatacaaaagcggctgcaggaggatccaaactactcaccccagcgctttccaaacgcgcagagagccttcgccgacgacccctag

SEQ ID NO: 180407 - DNA, 735 bp, synthetic construct
  misc_feature 1..735: note = Description of Artificial Sequence: Synthetic coding sequence
  source 1..735: mol_type = other DNA
atggagcccaacgacagcaccagcaccgccgtggaggagcccgactccctggaagttttggtgaaaaccctggattcccaaaccaggactttcattgtgggcgcccagatgaacgtgaaagaatttaaggaacatattgccgcaagcgtttctattccttcagaaaaacagcgtctgatataccagggtcgcgttcttcaggacgataagaagctgcaggagtacaatgtaggaggcaaagtgattcacttggtcgagcgtgcgcccccacagactcatctgccctctggagccagcagtggaacaggctcagctagcgcaacacacggaggtgggagcccccccggcaccaggggtcctggagcgtctgtgcacgatcgcaatgcaaacagttacgtcatggtaggcacctttaatctccccagcgaacctcgcgtccgactcgttatggcccaacatatgatccgcgatatacagacactcttgagccgcatggaatgccgcggggggccccagcctcagcactctcagccgccaccacagcccccggcagtcacccctgagcctgtcgctctgtctagccaaacaagtgagcctgtcgagtctgaagctccaccccgggaaccaatggaagccgaggaagttgaggaacgtgcaccagcccagaatcccgagctgacacccggaccagccccagccggcccaacacctgccccggaaactaacgctccttag

SEQ ID NO: 180408 - DNA, 1548 bp, synthetic construct
  misc_feature 1..1548: note = Description of Artificial Sequence: Synthetic coding sequence
  source 1..1548: mol_type = other DNA
atggagcccaacgacagcaccagcaccgccgtggaggagcccgacagcctcgaagtgctcgtaaaaacgttggacagccagactcgcacattcatcgttggtgcacagatgaatgtcaaagagttcaaggaacatatcgccgcgagcgtgtccataccctctgagaagcagcgtcttatctatcaggggcgagtgctgcaggatgataagaagcttcaagaatacaatgtgggcggcaaagtcattcacctggtggaaagagcccctccacagactcacctgccttccggcgccagttccggaacggggagcgccagcgccacacacggtggaggcagtcccccagggacccgaggacctggcgcttccgtgcacgaccgcaatgccaacagctatgtgatggtcggtacgttcaacctgccctctgatggcagcgcagtggacgtgcatataaacatggagcaagctcccattcagtccgaacctcgcgtgcgactcgtcatggcccaacacatgatccgtgacatccaaacattgcttagccggatggaatgccgaggtggtccacagccacagcactcacagccacctccgcaacctcctgctgtgacacctgaacctgtcgcactgagcagccaaacctctgagccggtggaatccgaagcacccccccgtgagcccatggaggccgaggaagtggaggagcgagcaccagcgcagaatccggagctcaccccaggccccgcccctgctgggcccacacccgcgcccgagacaaatgctcccaatcatccgtctcccgccgagtacgtggaagttctccaggagttgcagcgtttggagtcccggttgcagcctttcttgcagcgctactatgaagtgctaggggctgccgccaccaccgattacaataacaatcacgagggccgtgaggaggaccaacgcttgatcaatctggtgggcgaaagcttacgtctactgggcaacacttttgtcgctctttctgatctcagatgtaatctagcctgcacccctccacgccacttacacgtagtgcggccaatgagccactacactacacccatggtcctgcagcaggctgctatcccaatccagattaatgtgggaaccaccgtgaccatgacaggcaacggcactcgccctccccccacaccaaacgcagaagccccccccccaggtccaggacaagcttcctctgtcgccccttcaagcacaaatgtggaaagctctgcagagggcgctcccccccctggccctgcacctcctcctgccacctcacatcccagggtaatccgtataagccaccagtccgtcgagccagttgtgatgatgcacatgaatatccaggactctggaactcagcctgggggcgtcccatctgcaccaacgggaccactgggccctcctggacacggccagacactcggctctaccctgattcagctgcctagcctcccaccagagttcatgcacgccgtggctcatcaaatcacccaccaggcaatggtggccgcagtagcgtcctag

SEQ ID NO: 180409 - DNA, 3381 bp, synthetic construct
  misc_feature 1..3381: note = Description of Artificial Sequence: Synthetic coding sequence
  source 1..3381: mol_type = other DNA
atggagcccaacgacagcaccagcaccgccgtggaggagcccgactcactggaagtgctagtgaaaacactagactcccagacaagaacatttattgtgggggcgcagatgaacgtgaaggagtttaaggaacacattgctgcctccgtttcaattcccagcgagaagcagaggttgatttaccaaggacgggtcctccaggatgacaaaaagctgcaggaatataacgtaggaggtaaggtgatacatctcgtggagcgagcacccccacaaacacatctaccgagtggcgccagtagtggcaccggctcagccagcgcgacgcacggggggggatctccgcctggcactcgcgggcccggcgcttcagttcatgacagaaatgctaattcctatgtcatggtcggcacctttaatctacctagcgatgggtccgcagtcgacgtacatatcaatatggagcaggcacctattcagagcgagcccagggtgaggctcgtcatggcccagcacatgataagagacatccagaccctactatccagaatggaatgtcgaggtggccctcagcctcaacattctcagcctcccccacaacccccagctgtgaccccggagcccgtggcattatcatctcagaccagtgagccggtcgagtctgaggcccctccaagagagcccatggaagctgaggaggtggaggagagagcccctgcgcagaaccctgagttgacaccgggaccagccccagccggtcctactcccgcccccgaaactaacgctcctaaccaccctagtccagcagaatatgtggaagtcctgcaggagctgcagaggcttgagtccaggctacaaccctttctgcagcgttactatgaggtacttggggctgcagcaactacagattacaataataatcacgagggccgggaggaagaccagaggttgatcaatctggtcggcgagtctctccgactgctgggcaacaccttcgtggcactatccgacctgcggtgtaacctggcctgtaccccgccacgccaccttcacgtggttcgccccatgtcccactacactacccctatggttttgcagcaggctgctattcccattcagatcaacgtgggaaccacggtgactatgaccggcaacggaactcgccctccacccactccaaacgcagaggccccacccccgggcccaggccaggcaagttctgttgcacctagctccactaacgtcgagagctcagccgagggggcaccacccccggggccagcccccccccccgcgacatctcaccccagagtcattcggattagccaccagtcggtagagcctgtggtgatgatgcacatgaacatccaggactcggggacccagccaggaggagtcccttcagcccctactggccccctgggccccccaggtcacgggcaaactctcggacaacaggttccagggttccccactgctcctaccagagttgtgatcgctcgaccgaccccaccccaagcacggcctagccacccaggtggacctccggtgagcgggacgctccagggcgcaggtctcggaactaacgccagcctcgctcagatggtgtctggtctggtagggcagctgctgatgcagcccgtgctcgtggcccaaggcacgccaggtatggcgcctcccccagccccagccactgctagcgccagcgctggaaccaccaacacggcaaccaccgccgggcccgcccccggcggtcccgcacagccgcctcccactccccagcccagcatggctgacctgcagttctcccaactcctggggaatctcctgggccccgctggtcctggggcaggaggatctggagtggcgagccccacaatcaccgtggctatgcccggagtgccagcttttttacaaggcatgacagatttcctccaggccacacagacggccccgccacccccccccccccctcccccccccccccccgcaccagagcaacagactatgccgcccccgggtagcccaagtgggggggccggatcacctggaggtttggggctggagtctttgagtcccgagttcttcacatcagtcgtgcaaggcgtcctcagcagtctcttagggagtctgggcgctagggctgggagtagtgagtctatcgccgctttcatccagagactgagcggcagttctaatatttttgaacccggcgccgatggcgctcttgggttctttggagccctgctcagcctgctgtgccaaaatttctcgatggtggatgtcgtgatgctgctccacgggcactttcagcctctgcagaggctgcagccccagttgagatccttttttcaccagcattatctcggagggcaagagcccacccccagtaacattagaatggccacgcataccctcatcacaggactcgaagagtatgtgcgagagagtttttctcttgtccaggtgcagccaggagtggacatcattagaacaaatttagaattcctacaggagcagtttaattccattgcagcacatgttctacattgcaccgacagcggctttggggcccgtttactggagttatgcaatcaggggctgttcgaatgtctggccttgaaccttcactgcctgggcggccagcagatggaactggccgcggtcattaacggtcggataagacggatgtccaggggtgtgaaccccagcttagtttcttggttaactactatgatggggctgagacttcaggtagttctcgaacacatgccagtgggcccggatgccatactgaggtacgtccggagggtgggggaccccccccagcctcttccggaggaaccgatggaagtgcagggcgctgaacgggcgtctcccgagcctcagagagaaaacgcttctccggcaccaggcacaactgccgaagaggccatgtcgagggggcccccccctgcccctgaaggtggatccagagacgaacaggatggggcctctgcagaaactgaaccctgggcagccgccgttcccccagagtgggttcccataatccagcaagatatccaatcacagcggaaggtgaaaccgcaaccacctttgagcgatgcctacctatctggcatgccggccaagagacgaaagactatgcaaggggaggggccccagctcctgttgtccgaagctgtttccagagctgcaaaggcagctggggccagaccacttaccagtcctgagtccctctcacgggacctagaagcacctgaagtgcaggagtcctaccgccagcaactccgctccgatatacagaaaagattgcaggaggacccaaactatagtccgcaaagattcccaaatgcacagagggccttcgctgacgatccatag

SEQ ID NO: 180410 - DNA, 411 bp, synthetic construct
  misc_feature 1..411: note = Description of Artificial Sequence: Synthetic coding sequence
  source 1..411: mol_type = other DNA
tgacggatgagccggggcgtgaaccccagcctggtgagctggctgaccaccatgatgggtctcagacttcaggtcgtgctggagcatatgcctgtaggacccgatgctatcctgcggtatgtacgacgcgtgggtgacccaccgcagcccctgcccgaggagcctatggaggtacagggcgccgagcgggcttcgcctgagcctcaagagtgggtgcccatcatccaacaggacatacagagtcagagaaaagtgaaacctcagccccccctgtcggacgcttatctgtctgggatgcccgcgaagaggcggaaactccgtagcgatattcagaaaagactgcaggaagaccctaactacagccctcagaggttcccaaatgctcagcgcgcttttgcagacgacccctag

SEQ ID NO: 180411 - DNA, 3399 bp, synthetic construct
  misc_feature 1..3399: note = Description of Artificial Sequence: Synthetic coding sequence
  source 1..3399: mol_type = other DNA
atggagcccaacgacagcaccagcaccgccgtggaggagcccgactcactggaggtgctggtgaagactctggattcccagacgaggaccttcattgtgggagctcagatgaatgtgaaggagtttaaggagcacatagctgccagcgtctctattcccagtgaaaaacagcgactcatttaccaggggcgggttctacaggacgacaaaaaactccaggaatacaacgttgggggtaaagtgattcacttagtggaacgcgctccccctcagacacacctccccagtggtgcatcatccggaacagggtccgcttcagccactcatggaggcggctcaccacccgggacacgtggccctggcgccagcgtgcatgataggaacgcaaacagttacgtcatggtagggaccttcaacctgccatcagatggctcagcggtggatgtacacatcaatatggagcaggctccaatccaatctgaacccagagtccgactagtgatggctcagcatatgattcgcgatattcaaactcttctgtccagaatggagacccttccctacctgcaatgcagagggggtccacagccccagcactctcagccccctccccagccccccgccgtcacacccgagcctgttgcattgtcatcgcagacatctgagcccgtggagtccgaggctccccccagggagccaatggaggctgaagaggtagaggaacgcgcccctgctcaaaatcccgaactgacacccggtcccgccccagccggaccaacacctgcacctgaaaccaatgcccctaaccatcctagcccagccgagtacgtcgaagtgttgcaggagctgcaaagacttgagagtagactccagcccttcctgcagcgatactacgaggtcctgggagccgctgcaaccacggattacaataacaatcatgaaggccgcgaggaagaccaacgactaatcaacctcgtgggcgaaagtctgcgattgctcggtaataccttcgtggctttaagcgatctgaggtgtaacctggcttgcaccccacctcggcatctacatgtcgtgcggccaatgtctcattatacgaccccaatggtgctgcagcaagctgccatccctatacagattaacgtcgggacaacagtgacaatgaccgggaacggtacccgacccccacctactcctaatgctgaagcacctccccccggtccaggacaagcctcttctgttgccccttccagcacaaacgtcgaaagctctgcagagggagcacccccacctggacctgctcctccccccgcaacaagccaccctagagtgataaggattagtcatcagagcgttgagccagttgtaatgatgcatatgaatattcaggatagtggaacccagccaggcggggttcccagcgccccgacaggccccctgggccccccaggccacggccagactctgggccaacaggtccccggatttcccaccgcacctaccagggttgttattgcccggcctacccctcctcaagcccgacctagccaccccggggggccaccagtctccggtaccctgcagggcgcagggctcggcacaaatgcatcactggcccaaatggtttccgggctggtgggccagctgttgatgcagcccgtgctggtggcccaaggaactccagggatggcccctccaccggcccccgcgaccgcctccgcttctgcgggaaccacgaatactgccaccactgccgggccggctcccgggggcccagcccaacccccacccacaccgcagcccagtatggccgacctacagttctctcagttactgggaaacctgttgggccccgctggcccaggagccgggggcccgggtgttgcctctcccacaatcacagtggcgatgcccggcgttcctgcgtttctgcaaggaatgacagactttttacaggctacacagaccgctcctcctccccctcctccccccccacctcccccccctgcccccgaacagcagaccatgccacccccaggatcccccagtgggggcgcaggaagccccgggggcctgggccttgaatccctgtcccccgaattttttacaagcgtggtgcagggtgtgctaagttctctgcttggttccctcggagccagggcgggaagctctgagagcattgcagcatttattcagaggctttctgggagctctaacatcttcgagccaggagcggatggggctctggggttttttggggccctgctgtctctcctgtgccagaacttctccatggtggatgttgtgatgctgctgcatgggcatttccaacctttgcagcgcctgcaaccacagctgcgctccttctttcaccagcactatctgggagggcaggagcctaccccgagtaatatcagaatggctacccatactcttattactggcctggaagagtacgtacgggaatcttttagtctggtgcaagtccagccaggcgtggacatcataagaaccaatttggaattcctccaggaacagttcaactcaattgcagcacatgtcctccattgcacagatagtgggttcggcgctagactcctagagctgtgtaaccaaggcctgttcgaatgtttggcccttaacctccactgcctcgggggccagcaaatggagctggctgccgtcatcaacggaagaattagaaggatgtcacggggcgtgaatcctagtctggtcagctggcttacaacaatgatggggttacgccttcaagtggttttggaacacatgccagtgggacccgacgccattctgaggtatgttaggcgagtaggcgatcctccgcagccccttccagaggaacctatggaggtccaaggcgcagaacgggcatcccctgaaccacagcgtgaaaatgcttcaccagctccggggacaacggccgaagaggccatgtctcggggacctccacctgcgcccgaggggggttcacgggacgagcaggatggtgcctcagcagagaccgaaccctgggcagcagcggtgccacctgaatgggttcctattatccagcaagacatccaatcacagcggaaagtcaagccacagcctcccctgtcagatgcttatctgtccggaatgccggccaagcggaggaaaaccatgcagggagaaggtcctcagctgctgctgagcgaggccgtgtcccgagctgccaaagccgccggcgctaggccactcactagtccagaaagcctgtcaagagatttggaagctcccgaagtgcaggagtcctatagacagcagcttcgatccgatatccagaagagactgcaagaggacccaaattactccccacaaagattccccaatgctcagagagctttcgccgatgacccctag

SEQ ID NO: 180412 - DNA, 702 bp, synthetic construct
  misc_feature 1..702: note = Description of Artificial Sequence: Synthetic coding sequence
  source 1..702: mol_type = other DNA
atggagcccaacgacagcaccagcaccgccgtggaggagcccgacagcctggaagtcctcgtcaaaacactggacagccagacaaggacctttatagtgggggcccagatgaacgtcaaagagttcaaagaacacattgccgctagtgtttctatcccgtctgagaaacaaagactgatttatcagggacgggtgctgcaagacgacaagaaattacaggagtacaacgtcggcggaaaggttatacatctggtggaaagagcacctccccagactcatcttccctccggcgcttctagcggcaccggctctgctagtgcaactcatggcggcggtagcccacctggtactcgcggccccggggcatccgtccacgaccggaacgcgaactcttacgtgatggtgggcaccttcaatttgccgtccgatggtagtgccgtcgatgtgcacattaatatggagcaggcccctattcagtcagaaccgagggttcgcctggtgatggcacaacacatgatcagagatatccagacactgctgagccgaatggagaccctcccgtaccttcaatgtagggggggtcctcagccgcagcattcccagcctcctccacaaccacccgccgtgacacctgaacccgtggccctcagttcacaaacctctgagccagtggaaagcgaagcaccccctagggagccctag

SEQ ID NO: 180413 - DNA, 558 bp, synthetic construct
  misc_feature 1..558: note = Description of Artificial Sequence: Synthetic coding sequence
  source 1..558: mol_type = other DNA
tgactggcctgcacccccccccggcacctgcacgtggtgcggcccatgtcacactataccactcctatggtgctgcagcaggcggccataccgattcaaattaacgtcgggacaacggtgaccatgaccgggaatggcactagaccgccgccaactccaaacgcagaggctcctcctcctggcccagggcaggcgtcatccgtggcgccctcgtctaccaacgttgaaagttctgccgaaggagccccccctcccggccctgccccgccccctgcaacctcacatcctagagtgattcgcatcagccatcaatcagttgagccagttgtcatgatgcacatgaacatacagggtcagcaggtgcccggattccctaccgccccaaccagagttgttatcgccagacctaccccgcctcaagcgaggccatcccacccaggtgggccacctgtgtctggcactctgcaaggcgccggcctcggcacaaatgccagtctggcgcagatggtctccggactggtggggcagttgcttatgcagcctgtcctggtggcatag

SEQ ID NO: 180414 - DNA, 738 bp, synthetic construct
  misc_feature 1..738: note = Description of Artificial Sequence: Synthetic coding sequence
  source 1..738: mol_type = other DNA
cccccccggcacctgcacgtggtgcggcccatgagccactacaccactccaatggttctgcagcaggccgccatcccgatacagattaacgtcgggacaaccgtgacaatgacaggcccagctccccctcctgctacaagtcaccccagagtgatccggatctcccatcagtcggtggaacctgtcgttatgatgcatatgaacatccaggactccggcacccagccggggggagtgccttctgcccctacaggacctctcgggcccccaggccatgggcaaactctcggccagcaggtgcccggcttccccaccgcccccactcgcgtggtcatcgctcggcccacgccgcctcaggccagacccagccatccaggaggaccccccgtcagcggcaccctgcaaggcgctggcctaggtaccaacgcatccctggcccagatggtgtcaggactggtggggcaattgctcatgcagcccgttctcgtagcccagggcacgccaggaatggcgccacctcccgccccagctactgcctctgccagcgccggcactaccaatactgcgaccacagcagggccagcccccggggggcctgcacagcctccccctacgccacagccttcaatggccgatcttcaattcagtcagttactgggaaatctgctgggcccggccggacctggggccggcggtccaggagtggcctctcccaccattaccgttgcaatgccctag

SEQ ID NO: 180415 - DNA, 702 bp, synthetic construct
  misc_feature 1..702: note = Description of Artificial Sequence: Synthetic coding sequence
  source 1..702: mol_type = other DNA
atggagcccaacgacagcaccagcaccgccgtggaggagcccgactcccttgaggtcttggtgaagacactggattctcagacccgcacctttatagtcggcgcacagatgaatgtcaaggaatttaaagaacacatcgctgcctcagttagcattccatccgaaaagcaacgtctgatctatcagggaagggtgctacaggatgataaaaagctgcaggagtacaatgttggagggaaggtaattcatctggttgaacgagcccctccccagacacaccttccatctggagcctcttctgggaccggaagtgcatcagcaacccacgggggtggatcaccccccggcacccggggacccggcgcaagcgttcatgaccgtaacgcgaattcctatgtcatggtgggcacttttaacctgccctcggatggaagcgcagtagatgtccacataaacatggagcaggcaccgattcagagcgaaccccgagttaggttggtgatggcccagcacatgatcagagacatacagactttgctctctcgcatggagaccctgccctatctgcaatgtcgaggcggcccacagcctcagcattcccaaccccccccccagcctcctgcggtgacccccgagcccgtcgcgctgagtagtcaaacaagtgagcccgtagaaagcgaggcccccccacgggaaccctag

SEQ ID NO: 180416 - DNA, 780 bp, synthetic construct
  misc_feature 1..780: note = Description of Artificial Sequence: Synthetic coding sequence
  source 1..780: mol_type = other DNA
atggagcccaacgacagcaccagcaccgccgtggaggagcccgactcactggaagtgttagttaaaactctggacagccagacgcgaacatttatcgtcggagctcagatgaacgtcaaagaattcaaagaacacattgcagcttccgtctccataccctctgaaaaacaacgcctcatctatcagggaagggtcttacaggatgataagaaactgcaggaatacaatgtagggggaaaggtgatccacctggtcgagcgggctcctccacaaacccaccttccctcgggcgcttcatccggtacaggaagtgctagcgccacacatggaggtggatcccccccaggaactcgcggccccggagccagcgtccatgaccgcaacgctaacagctacgtcatggtgggaacctttaaccttcctagtgacggttctgcagtggacgtgcacattaacatggagcaagcacccatccagtcggaacctagggtgcgactggtcatggcccaacatatgatccgagacattcaaaccttactgagtaggatggaatgccggggggggcctcagccccagcacagccagccccccccccaacctcccgctgttacaccagaaccagtcgccttatcttcccagaccagcgagcccgtcgagtcggaagccccccctcgcgaaccaatggaagcggaggaagtggaggaaagggcacccgctcagaaccccgaactgacacctggccccgccccggccggcccaacaccagctccggagacgtag

SEQ ID NO: 180417 - DNA, 702 bp, synthetic construct
  misc_feature 1..702: note = Description of Artificial Sequence: Synthetic coding sequence
  source 1..702: mol_type = other DNA
atggagcccaacgacagcaccagcaccgccgtggaggagcccgacagccttgaggtattggtgaaaacccttgatagccagacccggacctttattgtgggggcccagatgaatgttaaagagttcaaggaacacattgcggcctccgttagtattccaagtgaaaagcagagactgatttaccagggtcgagtattgcaagacgataagaagctgcaggagtacaatgtgggcgggaaggtcattcatctagtggagcgcgcgccacctcagacgcatctgcctagcggggcaagcagcggaacaggctctgccagtgctactcatggagggggctccccccccggtactcgtgggcccggagcatctgtccatgaccgaaatgccaacagttacgtcatggtcggaacattcaatctaccatcggatgggtccgccgtagatgttcacattaacatggagcaggccccaatccagagcgagccaagagtgcggttagtgatggcccagcatatgatcagggatattcagacgctgctttctcggatggaaacactcccatatctgcaatgtcgcggcggcccccagcctcagcatagtcagcccccgccccagcctcctgctgtgacgcccgagccggtggcgctatcaagtcagacaagtgaacctgtcgaatcagaagctcccccgagagagccatag

SEQ ID NO: 180418 - DNA, 1548 bp, synthetic construct
  misc_feature 1..1548: note = Description of Artificial Sequence: Synthetic coding sequence
  source 1..1548: mol_type = other DNA
atggagcccaacgacagcaccagcaccgccgtggaggagcccgactccctcgaagtcttggttaaaactcttgattctcagactcgaaccttcatcgtcggcgcacagatgaatgtcaaggagttcaaagagcatattgccgccagcgtgagtattccaagtgagaagcaaagactgatctatcaagggcgagtcctgcaggatgacaaaaagttacaggagtacaacgtgggaggaaaagtcatacatttagttgaacgcgcccctccgcagacccacctaccctctggcgcgagcagtggcactggatctgctagtgccacccatggcggggggtcacctcccggaacgcgagggcccggcgcttccgtgcacgataggaacgccaatagctatgtcatggttggaacttttaaccttcctagcgacgggtcagctgtcgatgtccacatcaacatggaacaagctcccatccaaagcgagccaagggtgagacttgttatggcacagcacatgatcagagatatccagacactgctgtcaaggatggaatgccggggaggaccgcaacctcagcatagccagcctcctcctcagcctcctgccgtcacgcccgaacctgtggcgctgtctagccagacctccgagcccgtggagtcagaagccccacctcgggaacccatggaggcagaggaggtcgaggaacgcgctcccgcccaaaacccagagctgactcctgggcccgcgccagcaggccctactcctgcccctgagacaaatgcccccaaccacccatccccagccgagtatgtggaggttctgcaggagttgcagagactcgagagccggctccaacccttccttcagcggtattacgaggtgcttggggccgctgctactaccgattacaacaacaatcatgaggggagagaggaggatcagagactaatcaacttagttggtgaatctctgagacttctcgggaatacattcgtagctttatcagatctgagatgtaatctcgcttgtacacccccccggcatcttcacgtcgtccgacccatgagtcactatacaactcccatggtactgcagcaggctgccattccaattcaaatcaacgtaggaactaccgtgaccatgacaggaaacggaacgcgcccacctcctacgccaaacgcggaggcccctccacctgggccaggtcaggctagcagcgtagctccttcttccacaaatgtggaaagtagcgccgagggggcacccccccccggcccagcccctcccccagctacctcccaccctcgcgtgattcggattagccaccagagtgtggagcccgtggttatgatgcacatgaatattcaggacagcggcacacaaccaggcggggttccctctgctccaacaggaccactcggcccacctggccatggccagacgctggggtccaccctgattcagctgccctcactgccccctgagttcatgcatgcagttgcccatcagattacacatcaagccatggtcgcggccgttgcctcctag

SEQ ID NO: 180419 - DNA, 477 bp, synthetic construct
  misc_feature 1..477: note = Description of Artificial Sequence: Synthetic coding sequence
  source 1..477: mol_type = other DNA
atggagcccaacgacagcaccagcaccgccgtggaggagcccgacagtttggaagtgctagtcaagacgctcgatagtcagacacgtacatttatcgtcggcgcccagatgaatgtcaaagaattcaaagaacatatcgccgcatctgtttctattcctagtgaaaaacagcgccttatttaccaaggaagggtgcttcaggacgacaaaaagctccaagagtataacgtcggtgggaaggtgattcacctggttgagcgagccccaccccaaacccacctgccaagtggagcctccagtggtaccggctcagcttctgccacccatggcggcggcagtcctccgggcacacgcggaccaggagcttccgttcacgatcgaaacgctaactcttatgtgatggtagggaccttcaacctgccctctgatggtagtgccgtggatgtgcatatcaacatggagcaagcgcctatttag

SEQ ID NO: 180420 - DNA, 702 bp, synthetic construct
  misc_feature 1..702: note = Description of Artificial Sequence: Synthetic coding sequence
  source 1..702: mol_type = other DNA
atggagcccaacgacagcaccagcaccgccgtggaggagcccgacagcctggaagtccttgtgaagaccctggatagtcagacccgtacgtttatagtgggcgcccagatgaacgtcaaagagtttaaagagcatattgcagcctctgtgagtatccccagtgagaagcagaggctgatctatcagggaagggtccttcaggacgacaagaaactccaggagtacaacgtaggcggtaaggttattcatcttgttgaaagagctcccccccagacccacctaccatctggagcttcatcaggcacgggaagtgctagtgccactcacggtggcggaagcccgccgggaacccgcggccccggcgcctcggtgcacgaccgcaacgctaacagttatgtgatggttgggacgttcaacctcccgtcagatggttcagcagtggacgtccatatcaatatggagcaagcacccatacagtcagaaccccgagttcggctcgtaatggcacagcatatgattcgggatattcagactctgctgagcagaatggaaactctaccttatctacagtgtagaggaggcccacaacctcagcatagccagccacccccccaacccccagccgtcacgccagaacctgtggctttgtcctcccaaacaagtgaacccgtggaatccgaagcccccccacgggaaccctag

SEQ ID NO: 180421 - DNA, 735 bp, synthetic construct
  misc_feature 1..735: note = Description of Artificial Sequence: Synthetic coding sequence
  source 1..735: mol_type = other DNA
atggagcccaacgacagcaccagcaccgccgtggaggagcccgactccctggaggtactggtgaaaactttagacagtcagacaaggacattcatcgtgggagctcagatgaacgtcaaagagtttaaggagcatatcgcagcatcagtgtccatcccctctgagaaacagcggttaatctaccaagggcgggtgctgcaggatgataaaaagctgcaggagtataatgtaggtgggaaagtgatacatctggtagaacgggctccaccccaaacgcatctaccatctggcgcctcaagcggcacagggagcgcctcagctacacatggtggaggcagtcccccaggtacccggggccctggtgctagcgtgcacgaccgaaacgccaattcctacgtaatggtgggcaccttcaatcttccatcggaaccaagggtcagactcgtgatggctcagcacatgattagagatattcagaccctcctgtcaagaatggagtgtcgtggcgggcctcaaccacaacacagtcagcccccaccccaacccccggcagtgacacccgaacctgtcgctctttcatcacagacatccgagcctgtggagagcgaagccccaccccgtgaacctatggaggcggaggaggttgaggagcgagctccggcccagaaccccgagctgacaccaggcccagcgcctgccggccccacgccggccccggaaacaaacgctccgtag

SEQ ID NO: 180422 - DNA, 3399 bp, synthetic construct
  misc_feature 1..3399: note = Description of Artificial Sequence: Synthetic coding sequence
  source 1..3399: mol_type = other DNA
atggagcccaacgacagcaccagcaccgccgtggaggagcccgacagccttgaggtgctggttaagacgctagattcacaaacacgaaccttcatcgttggcgcacagatgaacgttaaagagttcaaagaacacatcgctgcttctgtgagcattccttcggaaaaacagaggcttatataccaaggcagagtgttacaggacgataagaagctccaggagtataatgtgggtggaaaggtcatccacctcgtagaacgtgccccgcctcagacacatttgccctctggggcctcaagcggcacgggatccgcgtctgctactcacggaggtgggtctccccctggcacacgcggaccaggggcctcagtgcacgatcgcaacgcaaacagctacgtgatggtcggaaccttcaatctgcccagcgacggatctgccgtcgacgttcacatcaacatggaacaggctcctattcagtccgaacctcgggttagactagttatggcccagcatatgattcgggacattcaaacactgctgtcccggatggaaactttaccgtatctccagtgtcggggtgggcctcagccccaacattcccaaccgcctcctcaaccgccagcggtcacacccgaaccagtggcgctgtcctctcagacgtccgagcctgtcgagtccgaggctcctccacgggagcccatggaggcagaagaagttgaagaaagggcccccgcacagaacccggagttgacaccagggcccgccccggcaggtcccacgcccgcccccgagacaaatgccccaaaccatccctcgcccgcggaatacgtggaggtgttacaggagttgcaaagactggagagccgtctccagcccttcctccagaggtattacgaggttctcggagctgccgcaaccaccgactacaacaataaccacgaggggagagaagaggaccagcgcttgatcaatctagtcggcgaaagtctccgtttactaggcaataccttcgtagctttgagcgatctacgatgcaacttggcctgcactccaccacggcaccttcatgtcgtgcgccctatgtcccactacacgactccaatggtactacagcaggcagctatacccattcagatcaacgtcggcaccaccgtgaccatgactgggaatggcacccgaccaccccccacgcctaatgccgaagcccccccaccaggacccggacaggcatcatcagtggcgccaagcagcacaaacgtggagagctcagccgagggcgccccaccgcctggtccagcaccgccaccagccacgtcccatccacgcgtgattcggatttcccaccaatctgttgaaccagtggtcatgatgcatatgaacatccaagatagtgggacgcaacctggcggggtcccatccgccccaacgggccccctaggcccacccggtcatgggcaaacactgggccagcaagtgccagggttcccaactgcccctacgagggtcgtgatcgcacgccccacacctcctcaggcccgaccgtcccacccaggtggtcctccagtctctggtacgctgcagggcgcgggtttaggcaccaacgcttccctggctcagatggtatcaggactcgtgggtcaactgcttatgcagcctgttctggtggcacaggggactccaggaatggccccaccccccgcccccgctaccgccagcgcctccgcaggcacaacaaacacagcaactactgcaggcccggcccccggcgggccagcccaacctccacctactccacagcccagtatggccgacttgcagttttcccagcttctggggaatctgctggggccagcagggcccggggctggggggtcaggagtggcctctcctacaatcacagtggctatgccaggcgtcccagcctttcttcaaggtatgaccgatttcctgcaggccacccaaacagccccaccccctcccccacctccccctccacctccccccgccccggagcagcagactatgcccccgccgggatctccttctgggggtgcgggaagtcctggcgggcttggactagaatcgcttagtcctgaattttttacttccgtcgtacaaggggttctcagtagcctgctgggtagcctgggggcaagggccgggtcaagtgaatctatcgccgcttttatccagcgactctccgggtctagcaacatctttgagcccggcgcagacggggccctgggattcttcggagcactgctgagtttactatgccaaaacttctcaatggtggacgtcgtaatgctcctacacggccacttccaacctttacagcgcctgcagcctcaactccgcagctttttccaccagcattacctgggcggtcaagaaccaaccccctcaaatatacggatggccactcacaccttgatcaccggattagaggagtacgttagagaaagcttctccctcgtgcaggttcaacctggagtagacataatccggactaatcttgagttcctgcaagagcagtttaattctattgcggctcatgtgctccactgtactgacagtggatttggggctaggttgctggagctttgcaaccagggcttgtttgaatgtttggcccttaatttgcattgtctggggggccaacagatggagctggccgccgttattaatgggaggatccgtaggatgtctcggggcgtaaacccctcccttgtgagttggcttaccactatgatgggactgagactccaagtggtgctggagcatatgccggttgggccagatgctattcttaggtatgtcaggagagtcggcgatcccccccagcctctgcccgaggagcctatggaggttcagggggccgaaagggccagccctgaaccacagcgcgagaatgcttccccagctcctggcacgaccgccgaggaagctatgagccgaggccctcctcccgcccccgaaggagggtcccgcgatgaacaggatggggccagcgccgagacggagccctgggctgctgctgtcccccctgagtgggtacctattatccaacaggacatccagagtcagcgcaaggtgaagccgcagccgcccctgagcgacgcatacctctcgggtatgccggcgaagcgccgtaagaccatgcaaggggaaggaccgcagctgctgctgagtgaagctgtgagcagggccgccaaagccgctggggccaggccattgactagccccgagtcactgtcccgcgatctcgaagccccagaggttcaggaaagctaccgacagcagctcaggtccgacatccagaaacgcctccaggaggacccgaattatagtccacagcgctttccaaatgctcaacgagccttcgctgacgatccatag

SEQ ID NO: 180423 - DNA, 1548 bp, synthetic construct
  misc_feature 1..1548: note = Description of Artificial Sequence: Synthetic coding sequence
  source 1..1548: mol_type = other DNA
atggagcccaacgacagcaccagcaccgccgtggaggagcccgactccctcgaggtgttggtaaaaacattggacagccagacacgcacattcattgtgggggcacagatgaacgtgaaggaattcaaagaacacattgcagcatctgtgtcaatcccatccgagaaacagcgcctgatctatcagggccgggtcctccaggatgacaagaaactgcaggagtataatgtgggcggaaaggtgatccatttggtggaaagagcgcctccccagacccatctgccctccggcgccagctcaggaacaggaagtgccagtgcgacccacggcggcggttcacccccaggtacccgcgggccaggagcatcagtgcacgacaggaatgcaaattcttatgttatggtcggtacttttaacctgccatcagacgggtccgcagttgatgtccatatcaacatggaacaggctccaatccagagcgaaccaagggtccgcctggttatggcccagcacatgatcagagatattcaaaccctgctgtctcgaatggagtgccgcggtgggccacagccacagcactcacagccacctccacaacctcccgccgtcacaccggaacccgtagccctgtctagccagacatccgagcctgtcgagagcgaagcaccgcctcgtgaacctatggaagcggaagaggtggaggagcgagcacccgcgcaaaatccggagttgacacccggccctgcacctgccgggccaacccccgccccagagacgaacgctcctaatcatccctctccggctgagtacgtagaggtcttgcaggaacttcagcggctggaatccaggctccagcctttcctccagcgatactacgaggttctgggagctgccgcaacaactgattacaacaacaatcacgagggcagagaggaagatcagaggctcatcaatttggtgggggaaagtctgagattgttgggcaacactttcgttgcactcagcgaccttcgttgtaatttggcgtgcactccaccaaggcaccttcatgtcgtgcgacccatgtctcattataccactcctatggtactgcaacaagcagcaattcctattcagatcaatgtgggtaccacagttactatgacagggaatggaacaagaccaccgccaactccaaatgctgaagctccccctccaggccccggccaggcttcaagcgtggcccctagttccaccaatgtggagtccagcgccgagggagctccgccacctggccctgcacccccccccgctactagtcacccaagggtgatccggatctcacaccaaagtgtggagccagtcgtcatgatgcacatgaatatccaggactcaggtacgcaaccggggggggtgcccagcgctccaacagggccactgggcccacctggacacggccagaccttagggagcactctgatacaactgccttctcttccaccagagttcatgcacgctgtcgcccaccagattacccatcaagccatggtcgccgccgtggcaagctag

SEQ ID NO: 180424 - DNA, 735 bp, synthetic construct
  misc_feature 1..735: note = Description of Artificial Sequence: Synthetic coding sequence
  source 1..735: mol_type = other DNA
atggagcccaacgacagcaccagcaccgccgtggaggagcccgactcgctcgaagttttggtcaaaaccttggactctcaaacacgaacgttcatcgtaggtgcgcaaatgaacgtgaaagagtttaaggagcatatcgccgccagcgtctccattccctccgaaaagcagagactaatttaccaaggacgtgtcctccaggacgataagaaacttcaggagtataatgtcggaggcaaggtgatccatctggtagaacgagcaccaccacagactcatctcccgtctggggcctcctcaggaacaggcagcgccagcgctacacatggcggtgggagccctcccggtacacgcggccctggggcgtcggtccacgatagaaacgctaattcgtatgtgatggtcggcacctttaatttacctagtgaaccacgtgtgcgcctagtaatggcccagcacatgattcgcgatattcagactctgctgtcacgcatggagtgccgagggggccctcaaccccagcatagtcaaccaccgccccagcccccagcagttactcctgaaccagtggcactctcttctcagacgtcagaacccgtggaatcagaagctccccccagggaacccatggaagccgaggaggtggaagagagagcacccgctcaaaatcccgaactgacaccaggccctgctcccgccggacctactccagcaccagaaacgaatgctccatag

SEQ ID NO: 180425 - DNA, 2232 bp, synthetic construct
  misc_feature 1..2232: note = Description of Artificial Sequence: Synthetic coding sequence
  source 1..2232: mol_type = other DNA
atggagcccaacgacagcaccagcaccgccgtggaggagcccgactctctggaagtgctcgtgaaaactcttgactctcagactcgaacctttatagttggcgcgcaaatgaacgtcaaagagtttaaggaacacatcgccgcgtctgtgagcatacccagcgagaaacagcggctgatctaccagggcagggtgttgcaggatgataaaaagctccaggagtacaatgttggcggcaaggtgatacatctggtggagcgagctcctccccagacacatctcccatccggcgcttctagtggtaccggatcagccagtgccacacacggcgggggcagtccacctggtacaaggggccctggtgccagcgtgcacgaccgcaacgcgaactcgtatgtcatggtgggaacctttaacctcccgagcgatggttctgccgtcgatgtgcacattaacatggagcaagccccgattcagtcagagcctagggtccgtttggttatggcacaacatatgattagggatattcaaaccctactatccaggatggaatgccggggtggtccacagccacagcatagccagccacccccacagccaccagccgtaacgccagagccggtcgcactgagttctcagaccagcgaacccgtcgagtccgaggctcctcccagggagccaatggaggcagaggaagtggaagagagagctcctgcacagaaccctgagctaacaccggggccggcaccagctgggcctactcccgctcctgagacaaacgctcccaatcatcctagcccggccgaatatgtggaggtcctccaagagttgcagaggctcgaaagtagactacaacccttcttgcagcgatactatgaggtgctaggggctgctgccaccactgactataacaacaaccacgagggccgagaggaggaccagcggctcattaatctggtgggcgaatctttaagactgttggggaacaccttcgtggcgctaagtgaccttaggtgtaacctggcatgcacaccaccacggcacctgcatgttgttcgacctatgagccattacaccacgcccatggtgttacagcaggccgccatccccatccagataaatgtgggaaccacagtcaccatgacgggcaacggtacgcgtcctcctcctaccccaaacgctgaagcacctcctccaggccccggccaggcatcctccgtcgccccctcttctactaatgtggaaagcagtgccgaaggggctccccctcctggccccgctccaccacccgccactagccacccacgcgtgattcgaatctcccaccagtctgttgagcccgtagttatgatgcacatgaatattcaggattcaggtactcagccaggtggcgttccttcagcccccaccggcccactcggccctccaggccatggtcagacccttggatcaacactgatccagttgccatccctgcccccagaatttatgcacgctgtcgcccatcaaattacacaccaggctatggtcgccgccgtcgcaagtgcagcagcaggccagcaagtgcctggatttcctaccgccccaacgcgcgtggtgatcgccaggcccacaccaccccaagccaggccgagtcatccgggtggtcctccagtgtcaggtaccctgcagggagccggtctggggactaacgcctcgctcgctcaaatggtaagcggtctggtggggcagctgctgatgcagcctgtcctagttgcgcagggtacaccaggcatggcccctccacctgctccagctaccgccagtgcgagcgcaggcaccacaaatactgccacaaccgccgggcccgcccccggcggcccagcccagccccccccaacccctcaaccttcaatggccgacctgcagttcagtcagctgctaggcaatctactggggcctgccggcccgggggctgggggtccaggtgtggctagcccaaccataaccgtagccatgcctggcgtaccagcgttccttcaggggatgaccgacttcttacaggcgactcagaccgccccacctcctcccccacctccgccaccacctccgccggccccagagcaacagacgatgccaccccctggcagtccctcaggaggtgcaggctcacctggcggcttggggctcgaatcactgtcccccgagttttttacctccgtcgtgcagggagtgttgtctagccttctgtag

SEQ ID NO: 180426 - DNA, 735 bp, synthetic construct
  misc_feature 1..735: note = Description of Artificial Sequence: Synthetic coding sequence
  source 1..735: mol_type = other DNA
atggagcccaacgacagcaccagcaccgccgtggaggagcccgactctttggaggtgctcgtgaaaacactggactcgcaaacccgtacttttatcgtgggggctcagatgaatgtcaaagagttcaaagagcatattgcagcctccgtgtccattccctctgagaagcagcgactgatctatcagggtcgcgtcctgcaggacgataaaaagctccaagagtacaatgtgggggggaaagttatccacctagtcgagagagctccgcctcagactcatctcccctctggggccagcagtgggacaggcagcgcgtccgctacccacggaggaggcagcccccccggaacacggggccctggtgcaagcgtccatgaccgcaacgccaactcatatgtaatggtggggaccttcaacctcccatcagaaccccgagtcagactggtgatggcccagcacatgattagggacatccaaaccctactttctaggatggaatgccgcggcgggcctcagcctcagcacagtcagcccccaccccagccccctgctgtcacgcccgaaccagtggccttatcttcccagactagcgagcctgtggaatcagaagccccccctcgcgagcccatggaggcggaagaggtcgaagagagagcccccgctcagaaccctgagctgacccccggacctgctcctgccgggccaacccctgcccctgagactaacgccccatag

SEQ ID NO: 180427 - DNA, 735 bp, synthetic construct
  misc_feature 1..735: note = Description of Artificial Sequence: Synthetic coding sequence
  source 1..735: mol_type = other DNA
atggagcccaacgacagcaccagcaccgccgtggaggagcccgactctctcgaagtcctagtgaaaacgctcgacagtcagactagaacctttatcgtgggtgctcaaatgaatgttaaggaatttaaggagcacatcgctgcatctgtcagcatccccagcgaaaagcagcggctgatttaccagggccgggtgttacaggacgataaaaagcttcaggagtacaacgtcggcgggaaagtcatccatttggtcgagcgagctccccctcagacccacctcccctcaggggccagcagcggtacgggcagtgcctctgcgacacacggtggaggcagtcctcccgggactcgcggacctggcgcctcagtgcacgatcgaaacgccaatagctatgtcatggtgggtacttttaacctcccctccgagccaagagtgagactggttatggcccagcatatgattcgggacatacagacgttactctctcgaatggaatgtcggggaggaccccagcctcagcattcacagccgcctccacagccccctgctgtgactcctgagcctgtggctttatcatcacagacctcggaaccagtcgagtcagaggctcccccaagagaaccaatggaggccgaggaggtagaggaacgggctcccgctcagaaccctgaactgacaccaggcccggctccagcaggacctactccggcacctgagacaaacgccccatag

SEQ ID NO: 180428 - DNA, 3399 bp, synthetic construct
  misc_feature 1..3399: note = Description of Artificial Sequence: Synthetic coding sequence
  source 1..3399: mol_type = other DNA
atggagcccaacgacagcaccagcaccgccgtggaggagcccgacagcctagaggtcttagtcaaaactctggacagtcagacgcgcactttcatcgtcggcgcccagatgaacgtgaaggaattcaaggagcacattgctgccagcgtgtcaatcccgagtgaaaagcagaggctgatctaccagggccgagtgctgcaggatgataagaaacttcaggaatacaatgtgggcggaaaggtcatccatttggtcgagagagcccccccccagacccacctccccagcggcgcaagttcgggtaccgggagtgctagcgctacacacgggggaggatcccctcccgggacccgaggacccggcgcttctgtccacgatcgaaacgccaattcttacgtaatggtcggaacgtttaacctaccatccgacggaagcgccgttgacgtccatatcaatatggaacaggcacctatccagagcgaacctcgcgtgcggctagtaatggcgcagcatatgatacgagacatccagactttgctgagcagaatggagactctgccttatctgcaatgcagaggtgggccacagccacagcattctcagccacctcctcagccgcctgccgtaacgccggaaccagtggccctaagctcgcagacctcagagcctgtagaaagcgaggcccctcctagagagcccatggaggctgaggaggtcgaagagagggcccctgcacagaatccagagttgactcctggtcccgctcctgctgggccgaccccagctccagagaccaacgcaccaaaccaccccagcccagctgaatatgttgaagtgctacaggagttgcaaaggctagagagtcggttacagcccttcctccagcgctactatgaagtcctgggagccgctgcgacaacagactacaacaacaatcacgaaggccgtgaagaagaccagagactcatcaacctggttggcgagtccctgagactgctgggcaacacttttgtcgcgctgagcgacttgcggtgcaatttggcttgcacacccccgcggcacctccacgtggtccggccgatgagccactatactactccaatggtgctgcagcaggctgccatcccaattcaaatcaacgtgggtactaccgtgaccatgactggaaatggaacaaggccacctcccacccccaatgcagaggcacccccaccagggccaggtcaagccagttctgtggctcctagctcaaccaatgttgaatcttcggctgagggtgcgccacctcccggcccagccccccctccagctaccagccaccctagggtgatccgtattagccaccaaagcgtagagcctgtggtgatgatgcatatgaatatccaggatagcggcacccagcccgggggagtgcctagcgcaccaacaggacccctcgggcccccgggacatggtcagacactgggccaacaggtgccaggcttccctactgcccctacacgcgtggtaatagccagaccaacacccccccaagctaggcctagccatccaggaggcccccctgtaagcgggaccctgcagggagccggattgggcacaaacgcatccctggctcaaatggttagcggtctggttggacaactcctgatgcagccagtgctggtagcgcagggcacaccgggaatggcgccgcccccggcacctgccacagccagcgcaagtgctgggaccaccaacacggcgactactgccggccccgcccctggaggacccgcgcagccacctcccacccctcaacctagcatggccgatctccagttttcacaacttctcgggaacctcctggggcccgcaggccccggtgccggcggaagcggtgtcgctagtcccacgatcacggtggccatgccaggcgttcccgcgttccttcaggggatgaccgatttcctgcaagccacacaaactgccccgcctcccccgccaccccctccaccacctcctcccgcacccgaacaacagaccatgcctccccctggctcaccgagtggcggagctggcagccccggtggcctagggttggagtccctttcaccggaattttttaccagcgtggtccagggcgtgctgtccagcctgcttggctcgctcggagctcgtgctgggtcatccgagtcaatagcagcgttcattcaaaggctaagtggatctagcaacatctttgaaccaggcgctgacggtgcactgggctttttcggcgctctgctcagcttgctctgtcagaatttctcaatggtggatgtggtgatgcttctccatggtcacttccagccccttcagaggctacaaccacaactacgctccttctttcaccagcattatttaggaggccaagaacccaccccttcaaacatcaggatggccacacataccctcattacaggtttggaggagtatgtgcgggaatcattctctctcgtccaagtgcaacccggggtagatataattagaacaaaccttgaattcctgcaggaacaatttaattccattgccgcccatgtgcttcattgcaccgactctgggtttggcgccaggctgctagagctgtgcaatcagggcctcttcgagtgtctggctctgaacctccattgcttaggcggccagcaaatggaattagcggcggttatcaatggaagaatcaggcggatgtcacgtggggtgaacccctccctggtgagttggctaaccaccatgatgggattgcgactgcaggtcgtactggagcatatgccagtgggtcctgatgccatcctgagatacgtgagacgagttggcgatcctccgcagccgctgccagaagaacccatggaagtgcagggcgccgagcgcgccagccctgagccccagcgggagaacgccagcccagcccccgggaccaccgcggaagaagccatgagtaggggcccacccccagcgcccgaagggggatcccgtgatgagcaggatggtgcatctgccgaaaccgaaccatgggcagccgccgtccctcccgaatgggtgccaatcatccagcaggatattcagtcccagcgaaaggtcaagccccagcctcctctaagcgatgcctatctgtctggtatgccggctaagcgtagaaaaacaatgcagggcgaaggcccccagctactgctgtctgaggccgtgagtcgcgccgctaaagctgctggcgcgaggcccctgacatcaccagagtccctttccagagatctggaggcccccgaagtgcaggagagttatcggcaacagctccgaagcgatatacagaagaggctgcaggaggatccaaactattccccacaacgatttccaaacgcacagcgtgcttttgctgatgatccatag

SEQ ID NO: 180429 - DNA, 738 bp, synthetic construct
  misc_feature 1..738: note = Description of Artificial Sequence: Synthetic coding sequence
  source 1..738: mol_type = other DNA
cccccccggcacctgcacgtggtgcggcccatgagccactacaccactcccatggtcctgcaacaagctgctatcccaatccagatcaacgtgggaaccaccgtgacaatgaccggcccggctcctcctcccgctacatcacatcctagagtgataagaatatcccaccagagcgtcgaacctgttgtcatgatgcacatgaacattcaggattccggcacccaaccaggtggggtcccctccgccccaacgggtcctttgggacccccaggccatgggcaaactctgggtcagcaggtgcctggcttccctactgcacctacgagagttgtcattgctcgacctaccccaccacaggcaagaccctctcatcccggaggacctcccgtgtccggcaccttacagggggccggtttgggcaccaacgccagcctggcgcaaatggtaagcggcctggttggacagctgctgatgcagcccgtacttgtggctcagggcactcctggcatggccccacctcccgcgccagctactgcatcagccagcgcaggaacaaccaacacagctaccaccgcaggtcccgcacctggagggcctgctcagccacccccgaccccacagccctccatggctgacttgcagtttagccaactgttaggcaacctgcttggcccagcggggccgggagctggcgggcctggagtggccagccctactatcactgtggcgatgccttag

SEQ ID NO: 180430 - DNA, 777 bp, synthetic construct
  misc_feature 1..777: note = Description of Artificial Sequence: Synthetic coding sequence
  source 1..777: mol_type = other DNA
atggagcccaacgacagcaccagcaccgccgtggaggagcccgactctttagaggttttagtgaagactctcgattcacagacacgtaccttcattgtgggtgcgcagatgaacgttaaagagttcaaagagcacattgcggccagcgtgtccatcccaagcgagaagcaacgcctgatctatcaggggagggtgctgcaggacgataagaagctgcaggagtataatgtcggtggcaaggtgatccacctagttgagcgagctccccctcagactcatctgccctccggcgcgagcagtggcactggctctgctagcgcgacccacggggggggttcacctccaggaactcgtgggccaggcgcatccgtccacgaccgaaatgccaactcttatgtcatggtgggtacatttaacctcccttctgacggatcagccgtcgacgtgcatattaacatggagcaggctcccattcagagcgagcccagagtccggctggttatggctcaacacatgatcagggatattcagactctactgtccaggatggaatgtagaggcggccctcagccacagcattcacaacctcccccacaacctccagcagtgacccctgaaccggtggcccttagttcacagacctctgagcccgtggagagcgaggcaccaccaagagagccgatggaggctgaagaagtcgaagaaagggctccggcccagaatccagagctaaccccaggtcccgcacctgctgggcctacacctgctccagaatag

SEQ ID NO: 180431 - DNA, 789 bp, synthetic construct
  misc_feature 1..789: note = Description of Artificial Sequence: Synthetic coding sequence
  source 1..789: mol_type = other DNA
atggagcccaacgacagcaccagcaccgccgtggaggagcccgactccctggaggtgctcgtaaagacactcgatagccagacacgtaccttcatcgtcggggcacagatgaacgtgaaagagttcaaggagcacatcgccgccagtgtgagcattcccagcgagaagcagcgcctcatctaccaaggtcgggtccttcaggacgataaaaaacttcaggaatataacgtagggggtaaagtcatccatttagtggagagagctcccccccaaacacatctcccttcgggcgctagcagtggcaccggcagcgcttccgctacgcacggcggaggttccccccctggcaccaggggccccggcgctagcgtgcatgataggaacgccaactcctatgtgatggtgggcactttcaatctgccatcggacgggagtgcagttgatgtccacattaacatggagcaggcacccatccagagtgagcctcgagttcggctggtgatggcacagcacatgatccgcgacatacagacactgctctcacgaatggagtgcagaggcggtccacagcctcaacacagccagccacctcctcagccccctgcagtgacccctgagccggtcgctcttagcagccagacaagcgaaccggtggagtcggaggccccccctcgagagcccatggaggcggaggaagttgaagagcgggcacccgcgcaaaatcctgagttaaccccaggccccgccccagcaggtcccacgccagctcctgaaaccaatgccccctag

SEQ ID NO: 180432 - DNA, 789 bp, synthetic construct
  misc_feature 1..789: note = Description of Artificial Sequence: Synthetic coding sequence
  source 1..789: mol_type = other DNA
atggagcccaacgacagcaccagcaccgccgtggaggagcccgactcattggaggtgctggtgaaaactctggattctcagacccgcacatttatcgtgggcgctcagatgaatgttaaagaatttaaggagcacatagccgcttccgtttccataccctctgaaaagcagagattaatctatcagggccgggtcctccaagatgataagaagctgcaggagtacaatgtgggcgggaaggtgattcacttggtagaacgggctcctccccagactcacttacccagcggagccagttccggcactggctctgcgtctgcaacccacggaggcggaagtccaccaggaaccaggggtcccggggctagcgtacacgatcgcaacgctaacagttacgttatggttggcacctttaatctcccaagtgatggaagcgcagttgatgtccacattaatatggaacaggcccctattcagtccgagccgagagtccgtctggtgatggcccaacacatgatacgcgacatacaaaccttactgagtaggatggagtgcaggggcggcccacagccacaacatagtcagccacctcctcaacctcccgctgttacccccgaaccagttgcactctcctcccagaccagtgaacccgtcgagtcagaggcacctcctagggaacccatggaggctgaggaggtagaagaaagagcccctgctcaaaaccctgagctcacacctgggcctgcccctgctggaccaactcccgccccagagactaacgccccctag

SEQ ID NO: 180433 - DNA, 738 bp, synthetic construct
  misc_feature 1..738: note = Description of Artificial Sequence: Synthetic coding sequence
  source 1..738: mol_type = other DNA
cccccccggcacctgcacgtggtgcggcccatgagccactacaccactcctatggtcctgcagcaagctgccatacctatccagatcaacgtcggcactactgtcacaatgactgggccagccccaccgcccgctacaagccatcctcgcgtgatccgcatcagtcaccagagcgtggaaccagttgtcatgatgcacatgaatattcaggatagcggaacgcagccaggcggagtaccctccgctcctacaggcccccttgggccgcccggccatgggcagaccttgggccagcaagtgcccggctttcctacagcccccactagggtagtgatcgcacgccccaccccaccgcaggcccgcccatcccacccgggcggacccccagtgtccgggactctccagggcgcaggcttgggtaccaacgccagccttgcacagatggtttcaggattggtgggccagctactaatgcaacctgtgctcgtggcgcagggcacgcctggtatggcgcccccacccgctcccgcaacggcctccgcgtcagccggaaccacaaatacagccactacagctggacccgccccgggcggaccggcccagcctcctccgactccacagccctccatggccgacctccaatttagccaattgctgggcaatcttctgggccctgctggacctggagcaggaggatctggagtggcttccccgactatcactgtcgcaatgccatag

SEQ ID NO: 180434 - DNA, 648 bp, synthetic construct
  misc_feature 1..648: note = Description of Artificial Sequence: Synthetic coding sequence
  source 1..648: mol_type = other DNA
atggagcccaacgacagcaccagcaccgccgtggaggagcccgactcattggaggtcctcgtgaagacactggattctcagacccgtaccttcatagtcggagctcaaatgaatgtgaaagagtttaaggagcatatagctgcgagcgtatccatccctagcgagaaacagcgattgatataccaaggaagagttctacaagatgacaaaaagttacaggaatataatgtgggcggaaaggtgatccatctagttgaacgggcacccccccagactcatctcccgtctggggcatcatctgggaccgggagcgcctccgccactcatgggggaggctccccaccaggtactcggggccccggagcatccgtgcacgataggaatgctaacagctatgtgatggtggggaccttcaatctgccctcagaacctagagttcgactagttatggcccagcacatgatcagagatattcagaccttactatcccgcatggaatgcagaggcgggcctcaacctcagcattcccagcctccaccccagcctcctgccgtcacccctgagccagtggctctatccagccagacctctgagcccgtcgaaagcgaggcccccccccgggaacctatggaggccgaagaggtgtag

SEQ ID NO: 180435 - DNA, 735 bp, synthetic construct
  misc_feature 1..735: note = Description of Artificial Sequence: Synthetic coding sequence
  source 1..735: mol_type = other DNA
atggagcccaacgacagcaccagcaccgccgtggaggagcccgacagccttgaggtgcttgtcaagacgttggactcacagactcgcacattcatagttggcgctcagatgaacgttaaggaattcaaagagcacattgcagcctctgtatccatccctagtgagaaacagcgtctcatctatcagggtcgggtcctccaggacgacaagaagctgcaggaatataatgtgggagggaaggttattcatttagtggagcgtgcacctccacagactcacctcccctcaggagctagttccggcacggggagcgccagtgccacacacggtgggggttctccccccggaactagaggtcccggagccagcgtacatgaccggaacgcaaacagctatgtcatggtaggaactttcaaccttcccagcgagccgcgtgtccggctcgtgatggcacagcacatgataagagacattcagacactgttgtcacggatggagtgcaggggcggaccccagccacaacattcccagcccccaccccagccccccgcagtaacacccgaaccggtggctctatcgagccagacttctgaaccagtcgagtctgaggcgccacctagggagcccatggaagccgaagaggtggaagagcgggcccctgcacagaatcctgaactgactcctggtccagctcctgcgggaccaaccccagcaccggaaaccaacgctccttag

SEQ ID NO: 180436 - DNA, 558 bp, synthetic construct
  misc_feature 1..558: note = Description of Artificial Sequence: Synthetic coding sequence
  source 1..558: mol_type = other DNA
tgactggcctgcacccccccccggcacctgcacgtggtgcggcccatgtcacattatactacgcctatggtactccagcaggctgccatcccaattcaaattaatgtgggcactacagtgaccatgacaggaaacgggacccgtcccccacctactcctaacgctgaggcgcctcctcccggcccaggacaggctagtagcgtggctccgtcaagtacaaacgtagaatcctccgccgaaggggcacctccccccggcccagcgcctccacccgcgacgtcccaccccagagtcatccgcatttcacaccaaagcgttgagcccgttgtcatgatgcacatgaatattcagggccaacaggttcccggtttcccaacagcccccaccagagtggtgatcgctagaccaacgcctccacaggcacgtcctagtcacccaggaggaccacctgtttcaggcacactgcagggggcaggactgggcacgaatgccagcctggcgcaaatggtgagcggcctcgtggggcagctgcttatgcagccagtactggtggcttag

SEQ ID NO: 180437 - DNA, 780 bp, synthetic construct
  misc_feature 1..780: note = Description of Artificial Sequence: Synthetic coding sequence
  source 1..780: mol_type = other DNA
atggagcccaacgacagcaccagcaccgccgtggaggagcccgacagtctggaggtactcgtcaaaactctggacagccagactagaaccttcatagtgggcgcgcagatgaacgtgaaggagtttaaagagcacattgccgcgagcgtttccattccatctgaaaagcagcgattgatatatcaagggcgcgtgctccaggacgacaaaaaactgcaggaatacaacgtaggaggaaaggtcattcacctcgtggagcgagctcccccacagacccatttgccttccggggcttctagcggaaccggatctgctagcgctacccatggaggcggatcgccgccaggcacaaggggtccaggggccagtgtccacgaccgcaacgccaacagctacgtcatggtgggtacttttaatctgccatcagacgggagtgccgtcgacgtgcacatcaacatggaacaggccccaattcagagtgaaccaagggtgaggctggtgatggctcagcatatgatccgtgacattcagactctcctgtcacgaatggaatgtcggggcggtccgcagccccagcatagccagccaccaccacagccccctgccgtcacccccgagccagtggccttaagcagccagacctctgagcctgtggagtccgaggcccccccaagggagccaatggaggctgaagaggttgaagagcgcgcccctgctcagaaccccgaattgaccccgggcccagctcccgctggacccactccagcccctgaaacatag

SEQ ID NO: 180438 - DNA, 477 bp, synthetic construct
  misc_feature 1..477: note = Description of Artificial Sequence: Synthetic coding sequence
  source 1..477: mol_type = other DNA
atggagcccaacgacagcaccagcaccgccgtggaggagcccgactcgttggaggtgttggttaaaaccctcgatagtcagacaagaacatttattgtgggcgcgcagatgaatgtgaaggaatttaaggagcatatagcagcttccgtgagtatcccctccgaaaaacagaggctgatctaccagggccgcgtgctgcaggatgataagaagctgcaggagtataacgtcggggggaaggtgatacatctagtggaacgcgcgcccccccagacccacctaccatccggcgcgtcgtccgggactgggtccgccagtgcaacccacgggggggggagtcccccaggcacaaggggcccaggggcctccgttcatgatcgtaacgctaattcatatgtgatggtgggaaccttcaaccttcccagcgatggttcagctgtggatgttcacattaacatggagcaggcccctatttag

SEQ ID NO: 180439 - DNA, 621 bp, synthetic construct
  misc_feature 1..621: note = Description of Artificial Sequence: Synthetic coding sequence
  source 1..621: mol_type = other DNA
atggagcccaacgacagcaccagcaccgccgtggaggagcccgactctctggaagtgctggtaaaaacgctggatagtcaaacgcgtactttcatcgtgggagcccaaatgaatgttaaagagtttaaggaacatattgcagctagcgtctctatcccttctgagaaacagcgtctgatttaccagggccgggtcttgcaggacgacaagaagctgcaggaatacaacgttggggggaaagtgattcacctggttgagagagctcctccccaaacacacctcccttccggcgcatcgagtggaactgggtcagccagtgcaactcacggcggaggttctccccccggaacccgggggcctggcgcttccgtccacgatcgaaacgctaattcctacgttatggttggtacatttaaccttccctccgaaccacgagtgagactcgtgatggcacagcacatgatccgagacatacagacgctcttatcccggatggagtgccgcgggggaccccagccccaacattcccagccaccaccccagccccccgccgttacccctgaaccggtggccctcagctcccagaccagtgaacccgtggagtcagaggctccaccttag

SEQ ID NO: 180440 - DNA, 3399 bp, synthetic construct
  misc_feature 1..3399: note = Description of Artificial Sequence: Synthetic coding sequence
  source 1..3399: mol_type = other DNA
atggagcccaacgacagcaccagcaccgccgtggaggagcccgactcactggaagtgctggtgaaaacactagactcacaaacgagaacattcatcgttggtgctcaaatgaacgtcaaggagttcaaggagcatattgcagctagcgtctctatccctagcgagaaacagaggctgatttaccagggtagggtgttacaggatgacaaaaagcttcaggaatacaatgtgggtggaaaagttattcatctggtcgagcgagcaccaccgcaaactcatctgccatccggagcttcctccggtactggcagcgccagcgccactcatggtgggggcagtccccccggtacacgaggaccaggcgcttctgttcatgatcgaaacgccaactcttacgtcatggtcggcactttcaatctccctagcgacggatcagctgttgatgtgcatattaatatggagcaggcacctatccaatccgagccacgcgtccggctggttatggcccagcacatgatccgggacatccagacacttctgagtaggatggagacgctgccctaccttcagtgccgcggaggaccacagccgcagcactcacagccaccaccccaaccgccagccgtgacgcctgagcctgttgctctctcttcccagacatcagagcccgtggagtctgaggccccgccccgagaaccaatggaggccgaggaagtcgaggaacgtgcgccggctcagaacccggagctcactccaggccctgccccagctggtcctacacctgccccagaaacaaatgctcctaatcacccttcgcctgcagaatatgtggaggtactccaggaattacaaaggcttgagtctagattgcaaccttttctgcagcggtactacgaggtgctcggagctgctgccaccaccgattacaataataaccatgaaggcagggaggaggaccaacggctaatcaacctggttggtgagtctcttcggttactgggaaacacttttgtggcactctccgatttgaggtgtaacctggcatgtacaccgcctcgtcatctgcatgtagtgcggcctatgagccactatacgactccgatggtgcttcagcaggccgcgattcctattcagataaacgtgggaactacagtgaccatgacaggaaacggaactagacccccccccacccctaacgctgaggcccctcctccagggcccggacaggccagcagtgtggcaccgtccagcacaaatgtggaatcctctgctgaaggtgcgccgcctccaggacccgcacccccccccgctacaagtcacccacgagttataagaattagccaccaatcagtagaaccggttgttatgatgcacatgaacattcaggattccggcactcaaccagggggcgtgccttccgcacccactggacctctcggccctcccggacacggccagacgttaggacagcaggtgcctggattccccaccgcacccacgagggtcgttatcgcacggcctacccccccgcaagctcgaccttcccaccccggcgggccccccgtgtccggcacgttgcagggagccggactgggcacgaatgcctccctggcacagatggtgtccggacttgtgggacagcttctcatgcagcccgtactcgtggcacaagggacgccagggatggcccctccccctgctccggccaccgcttccgcatctgccggaaccactaacactgctacaacggctggtcctgcccccggtgggcccgcacagcctccacctactcctcagccttctatggctgacctgcagttcagtcagctccttggaaacctacttgggcctgctggacccggcgccggggggccaggcgtggccagccccactatcacggtagccatgccgggcgtcccggcatttctgcaggggatgacagacttcctccaggcaacacagacggctccaccacctccacccccccccccacccccacccccggcaccagagcagcagactatgccaccgccagggagcccttccggtggcgcaggatctcccggggggctcgggctggagtcactcagcccagagttctttacctccgtcgtacaaggcgtcctgtcctcgttgttgggcagtcttggggcacgtgctggatctagtgagtcaatagccgcctttatacagaggttgagcggatcgagtaatatctttgaacctggagctgacggcgcattaggcttctttggggcactactctctctactttgtcagaacttctctatggtggacgtggtgatgctcttgcacgggcacttccagcctctccagcgactccagcctcagctgagaagctttttccatcagcactatctgggcggccaggagcctaccccttccaacatacgaatggcgactcatactctgattactggccttgaggaatatgtgcgagagtccttctccttggtacaggtacaacctggcgtggatattatccgcacgaacctggagttcctgcaggagcagttcaattctatagctgctcacgtattgcactgtactgactccgggttcggcgccagactgttggagctgtgtaaccaggggctctttgaatgccttgcgctgaacctgcactgtctcggaggccagcaaatggaactggcggctgtgatcaacggaagaatcaggagaatgtcccgcggtgtaaaccctagccttgtgtcctggttgaccaccatgatgggattgcggctgcaagtcgtgctggagcacatgcctgtcggccctgacgcaatcctgcggtacgtgagaagagttggggacccacctcagccgctccccgaggagccaatggaagtacagggggctgaaagagcatcaccagagccacagcgtgagaacgcatcgcccgctcccggcactactgcagaggaggccatgtctcggggcccccctcccgcccctgagggcgggtcccgcgacgagcaggatggcgcttctgcagaaacagagccctgggcagcagccgtcccgcctgagtgggtacctataatccagcaggatattcaatcccaacggaaggtcaaaccgcagcctcctctgtctgacgcttatctgagtggcatgcctgcaaaaaggcgcaagaccatgcagggcgaaggccctcaactcctcctgtccgaagcggtgtcacgcgcggccaaagctgcaggggcaaggccactcactagtccagagagtctgagtcgggacctggaagcccccgaggtgcaggagagttacaggcagcagctgcggagcgacatccagaaacgtctacaggaagatcccaactattcccctcaacgcttccctaatgctcagagagccttcgcagacgacccttag

SEQ ID NO: 180441 - DNA, 717 bp, synthetic construct
  misc_feature 1..717: note = Description of Artificial Sequence: Synthetic coding sequence
  source 1..717: mol_type = other DNA
agcagcgccgagggcgcccccccccccggccccgcccccccccccgcgactagtcatcctcgcgtgatcagaattagccaccaatcagtagaaccagtcgttatgatgcatatgaacatccagggccccctgtccctctccccctgcccagatagcggaacacagcccggcggagttcccagcgcgcccaccgggcccctaggacccccaggacacgggcagaccctgggtcagcaggtgccaggatttcctaccgctcctaccagggtggtcattgctcggccaactccccctcaggctcgcccaagtcacccgggcggccccccagtgtccgggaccctccagggtgccggtctgggaactaatgcatcattagcccagatggttagcggcctggtggggcagctgctgatgcagcctgttttagtggcccagggaactccaggcatggccccacctcctgctccagccaccgcctcagccagcgccggtactaccaacaccgccacaacagctggtcctgcacccggcgggcctgcccagccacctccaaccccccagccttccatggctgacctgcagttcagtcagctgcttggcaaccttttaggtccagctggcccaggagccggtggcagtggggtggcctcaccaactattactgtcgccatgccaggagtgcccgcttttctccagggtatgaccgatttcctatag

SEQ ID NO: 180442 - DNA, 621 bp, synthetic construct
  misc_feature 1..621: note = Description of Artificial Sequence: Synthetic coding sequence
  source 1..621: mol_type = other DNA
atggagcccaacgacagcaccagcaccgccgtggaggagcccgacagtttggaagttctggttaaaacactggatagccagacacggacattcatcgtgggcgcccagatgaacgtcaaagagttcaaagaacacatcgccgcatctgtgtccatccctagcgaaaaacagagactgatttaccaagggcgcgtgttacaggatgacaagaagctacaggagtataatgttggagggaaagtcatacatctagtggagcgagccccgccccaaactcacttgccttccggggcctcgtcagggaccggatcagccagcgccacgcacggaggaggctccccacccgggacccgaggtccaggcgccagtgtgcatgatcgaaacgccaactcctacgtgatggttgggacgtttaatctccccagtgagccgagggtcaggcttgttatggcacagcacatgattcgggacattcagacgcttctcagccgcatggaatgtagggggggaccacagccacagcatagccagccacctcctcagcctcctgccgtgaccccagaaccggtggctctcagctcccagacctcagagcctgtggagagcgaggcccctccctag

SEQ ID NO: 180443 - DNA, 558 bp, synthetic construct
  misc_feature 1..558: note = Description of Artificial Sequence: Synthetic coding sequence
  source 1..558: mol_type = other DNA
tgactggcctgcacccccccccggcacctgcacgtggtgcggcccatgtcgcattatacaacccccatggtgctgcagcaggccgctatccctattcagattaacgtcggcaccaccgtcacaatgacaggcaacggtactcggcccccccccacacccaacgctgaggccccgcctcctggaccgggccaagcttccagcgtcgcgccttcctcaacgaacgtggagagtagtgcagagggtgcccctccgccagggcctgccccacctccagccacaagccaccctcgagttatcaggatatcacatcagtcagttgagccggtggtgatgatgcacatgaatatacagggccagcaggttccgggattcccaacagcacccacgagggttgtgatagctagacctacaccaccccaggctagaccctctcaccccggcggtccacccgtgagtggaacactgcagggggctggcctggggacaaacgcttctctggctcaaatggtttccggccttgtgggacagctcctgatgcagcctgtccttgtggcttag

SEQ ID NO: 180444 - DNA, 648 bp, synthetic construct
  misc_feature 1..648: note = Description of Artificial Sequence: Synthetic coding sequence
  source 1..648: mol_type = other DNA
atggagcccaacgacagcaccagcaccgccgtggaggagcccgactctctggaagtgctcgtgaagaccctcgacagccagactaggaccttcatcgttggcgcacagatgaacgtgaaagagttcaaagagcacattgcagcttccgtgtccataccttcagaaaaacagcgactgatctaccagggcagggtactgcaggacgacaagaagctgcaggagtacaacgtagggggcaaagtgatccatctggtcgaacgcgctcccccccagacacacttgccgtccggcgcctcttctgggaccggaagcgcgtctgccacacacgggggaggttccccacccgggacccgaggtccaggcgccagcgtgcatgacaggaatgccaattcctacgtgatggtgggaacatttaatctgccaagtgaacccagggtgagactggtaatggcgcagcatatgatccgagacatccagacgttgttgtccaggatggagtgtaggggcggcccgcagccccaacacagtcagcccccccctcagcctcccgctgtgactcccgagccagtcgcactgagtagccagacaagcgaaccagttgagagtgaagcccccccacgcgagccaatggaagccgaggaggtctag

SEQ ID NO: 180445 - DNA, 789 bp, synthetic construct
  misc_feature 1..789: note = Description of Artificial Sequence: Synthetic coding sequence
  source 1..789: mol_type = other DNA
atggagcccaacgacagcaccagcaccgccgtggaggagcccgacagcctggaagtccttgttaaaaccctagactctcagacccggactttcattgtgggagctcagatgaacgttaaggaatttaaggaacacattgccgcttccgtgtccataccatctgagaaacaaagactcatctatcaagggagagtgctgcaggacgacaagaaactgcaggaatataacgtggggggcaaggtgattcacctggtggaacgggcccctcctcagactcacctcccatctggggcttctagtggcactggctctgccagcgctacacacggcggcgggtccccacctgggacccgaggccccggtgcttctgtccacgaccggaacgctaacagttacgtcatggtcgggacctttaacctgcccagcgatggatcggcggtagacgtgcacattaatatggagcaggcccctatacagtctgaaccgagagtgcggctggtcatggctcagcacatgatccgcgatatacagactcttcttagcagaatggagtgccgcggtggtccccaaccccaacatagtcagcctccgccccagccccctgcagtcacgcctgaacccgtcgcattgagctcccagacgagcgagcccgtggaatctgaagcaccccctagggagcccatggaggccgaggaagtggaggaaagggcaccggcccaaaacccggagctgacacccggacctgcccccgccggtccaacgcccgccccagaaactaatgccccatag

SEQ ID NO: 180446 - DNA, 594 bp, synthetic construct
  misc_feature 1..594: note = Description of Artificial Sequence: Synthetic coding sequence
  source 1..594: mol_type = other DNA
atggagcccaacgacagcaccagcaccgccgtggaggagcccgactcactggaagttctcgtgaagactctggacagccaaactaggacttttatagtgggcgctcagatgaatgtgaaggaattcaaggaacacatcgctgccagtgtctctattccgagcgagaagcagcgactgatctaccaggggagagtactgcaggacgataaaaagttgcaggaatataatgtggggggcaaagttattcacctcgtcgaacgggccccccctcagacacaccttccctccggggcctcgtcagggacaggaagcgcctccgcaacgcacggtggaggctctcctccaggtacaaggggccctggagcttccgtccacgacagaaatgcgaacagctatgtcatggtgggcacttttaatttgccatctgacgggtcggctgtggacgtgcatataaatatggaacaagccccaatccagtcagaaccgcgagtccgactcgtgatggcccaacacatgatcagagacattcagacactcttatcgcggatggaatgtcgaggggggccccaaccgcagcattcccagcctccctag

SEQ ID NO: 180447 - DNA, 735 bp, synthetic construct
  misc_feature 1..735: note = Description of Artificial Sequence: Synthetic coding sequence
  source 1..735: mol_type = other DNA
atggagcccaacgacagcaccagcaccgccgtggaggagcccgactcattggaagttctcgtgaagactttagacagccagacacgtacttttatcgtgggtgcccaaatgaacgtgaaggagttcaaagaacacatcgccgccagtgtgtccatcccctctgagaaacagcgactaatataccaggggagagtgctgcaggatgacaagaagctacaggagtacaatgtcggagggaaagttatacatctggtggaacgcgccccccctcagactcacctgccctcgggtgctagttccgggacagggtctgctagcgctacacatggtgggggatccccaccaggcactagagggcctggagcctccgtacatgatagaaatgccaacagctacgtcatggtgggcactttcaatttgccatcggaacccagagtaaggctagttatggctcaacacatgatccgcgacattcagacactgctgtcccgaatggagtgccggggcggaccacaacctcagcacagccagccacccccacagccacccgccgtaacaccagaaccagtggcactgagcagtcagacatccgaacctgtcgaaagcgaggccccaccacgcgagccaatggaagccgaagaggtcgaagagagagcgccagcccagaaccccgagctcacgccgggacctgccccagccggacctacaccagctcccgaaacgaacgccccctag

SEQ ID NO: 180448 - DNA, 681 bp, synthetic construct
  misc_feature 1..681: note = Description of Artificial Sequence: Synthetic coding sequence
  source 1..681: mol_type = other DNA
tgaagcggcttcggcgcccggctgctggagctgtgcaaccagggcctgtttgagtgccttgcactcaatctacactgcttgggaggccagcaaatggagctggccgctgttataaacgggaggatccggcgaatgagccgcggagtgaacccaagtctagtatcctggctcaccacaatgatgggtctgcgtctgcaagtggtcctcgagcacatgccagtggggccagatgctattctccgttatgtccgtagggtaggcgacccaccccagcccctacctgaggagccaatggaggtacagggggccgagcgtgccagccctgaacctcagcgcgaaaatgcgtcccctgctccagggacgactgctgaggaggcaatgagtaggggccccccccctgcccccgaaggcggttcacgcgatgagcaggacggagcaagcgcagaaactgaaccatgggcagctgctgtcccacccgagtgggtccctatcattcagcaagacatacagagccaacggaaagtgaaacctcagcctcctctgtcggacgcctatttgtctggtatgcctgcaaaaaggcgaaagttgagaagcgacatccagaagagactccaagaggatccgaattactctccccaaaggttcccaaacgctcagcgggcttttgccgacgatccctag

SEQ ID NO: 180449 - DNA, 738 bp, synthetic construct
  misc_feature 1..738: note = Description of Artificial Sequence: Synthetic coding sequence
  source 1..738: mol_type = other DNA
cccccccggcacctgcacgtggtgcggcccatgagccactacaccacccccatggtcctgcagcaggcagctattccaatccagatcaatgtaggcaccacagtcacgatgaccggacccgcaccgccccccgccaccagtcacccacgcgtcattaggatctcgcatcaatcagtggagcctgtcgtgatgatgcacatgaacatccaggactctggcacacagcccggtggcgtgccctcagctcccacagggcctctgggtccgcccgggcacggccagacgctggggcagcaggtgcccggcttccccaccgctcccacgcgcgtggttatcgccaggccaactcccccccaggcccgcccgtcccacccggggggcccgcctgtgtcaggtacactgcaaggagccggcctcggaacaaacgccagcctagctcagatggtgagcggactcgtgggccagttgctgatgcaacctgtgcttgtggcacagggaacccccgggatggccccgcctccagctcccgctacggctagcgcttcagccggtactaccaatacggctacaacagctgggccagcacccggaggtccggctcagccccctcctacgccgcaaccctcaatggctgatctccagttctctcagctactggggaatctgctgggacccgccgggcctggtgcagggggcagtggagtggcttctccaaccattactgtggcaatgccatag

SEQ ID NO: 180450 - DNA, 681 bp, synthetic construct
  misc_feature 1..681: note = Description of Artificial Sequence: Synthetic coding sequence
  source 1..681: mol_type = other DNA
tgaagcggcttcggcgcccggctgctggagctgtgcaaccagggcctcttcgagtgcttggccctgaacttgcattgcttgggtgggcagcagatggagctagcagctgtcatcaatggtagaatcagaaggatgagcagaggagtgaatccatccctggtcagctggctgacgaccatgatgggcttgaggctgcaggtcgtattggagcacatgcctgtcggacctgacgctattctgagatatgtgcgcagagtgggcgatccccctcaacccttgcctgaagagcccatggaggttcagggtgcagagcgcgcatcacccgaacctcagagagaaaatgctagccctgcgccggggacaaccgctgaggaagccatgtctaggggtcccccgcctgcacccgagggtggctctagagacgagcaagacggagcatccgccgagactgaaccttgggcagcagccgttcctcccgagtgggtcccgattatccagcaagatattcaatcacagcgaaaagtcaaacctcagcccccactatctgatgcttatctgtcaggtatgcccgctaagcggcgcaagctcagatctgacattcaaaaaagacttcaggaagacccaaattattcaccacaacgattccccaatgctcagagggcgtttgcggacgacccatag

SEQ ID NO: 180451 - DNA, 681 bp, synthetic construct
  misc_feature 1..681: note = Description of Artificial Sequence: Synthetic coding sequence
  source 1..681: mol_type = other DNA
tgaagcggcttcggcgcccggctgctggagctgtgcaaccagggccttttcgaatgcctggctctcaatctccactgtctgggcggacagcagatggaactggctgccgtgattaacgggaggattcggcgaatgagccggggagtcaacccttctctggtgtcatggctgacaaccatgatgggcttgagactgcaggtcgtgctcgaacacatgcctgtcggaccggacgccattttgcgctacgtgcgtcgagttggcgacccgccacagcctctacccgaagaaccaatggaggtccagggtgccgaacgagccagtcctgagccacaacgtgagaacgcatcccctgcacctgggaccaccgcagaggaggctatgagccgtggacctcctcctgcacctgaaggtggcagtcgagacgagcaggatggagccagcgctgaaacagagccttgggccgccgctgtaccgcccgagtgggtgcctattatacagcaggacattcagagccagagaaaggttaagcctcaacctcccctgtcagacgcatacctgtcagggatgcccgccaagcggaggaagcttagatcggatatacagaaaagacttcaggaggaccccaattacagcccccagaggttcccaaacgcccagagagccttcgcagacgacccgtag

SEQ ID NO: 180452 - DNA, 777 bp, synthetic construct
  misc_feature 1..777: note = Description of Artificial Sequence: Synthetic coding sequence
  source 1..777: mol_type = other DNA
atggagcccaacgacagcaccagcaccgccgtggaggagcccgactcactggaggtcctggtgaagactctggattcccagactcggacgttcatagtgggagcccaaatgaacgtgaaagaattcaaggaacatattgctgccagtgtgtctataccctctgagaaacagaggttaatttaccagggtcgggtcctccaagacgacaagaaactccaggagtataatgtagggggaaaagtgatccatctggtagaaagggccccacctcagacacatctgcctagtggcgctagtagtggcacaggttctgcctccgccacacacggaggtggatctcctccgggaacccgcgggcccggtgcttccgtacatgaccgcaatgctaactcctacgttatggtggggaccttcaacctgcccagcgacggctccgccgtagacgttcacatcaatatggagcaggctccaatccagagcgaaccgcgggtgcgactcgtgatggcccaacacatgatcagagatatacagactctgctgtcccggatggagtgccggggagggcctcagcctcaacactcccaaccacccccccagccacccgctgtgacaccggagcccgtggctctgagtagccaaacttcagagccagtcgaaagtgaagcgccacctcgcgagccaatggaggcggaggaagttgaggagcgcgccccagcccagaacccagaactcactcccggccctgcacctgcagggccgactccagcgccagagtag

SEQ ID NO: 180453 - DNA, 411 bp, synthetic construct
  misc_feature 1..411: note = Description of Artificial Sequence: Synthetic coding sequence
  source 1..411: mol_type = other DNA
tgacggatgagccggggcgtgaaccccagcctggtgagctggctgactaccatgatgggcctacgcctgcaagtagttctggaacacatgccggtcggccctgacgccattctgaggtacgtgagacgcgtgggggatccaccccagccgctcccggaagaaccaatggaggtgcagggtgctgagcgcgccagtcccgagccccaggagtgggtgccaattatccagcaggatatccaatcgcagagaaaggtcaaaccgcagccccctctcagtgatgcctatctgagcggcatgccggccaaacgcagaaagttacgttcagatatccagaagaggctacaggaagacccaaattattcacctcaacgattcccaaatgcgcaacgcgcgtttgccgatgacccgtag

SEQ ID NO: 180454 - DNA, 3489 bp, synthetic construct
  misc_feature 1..3489: note = Description of Artificial Sequence: Synthetic coding sequence
  source 1..3489: mol_type = other DNA
atggagcccaacgacagcaccagcaccgccgtggaggagcccgactctcttgaagtgctcgttaagacattagactctcagactcgaacctttatcgttggtgcccagatgaatgtaaaggagttcaaggagcatattgccgcgagcgtctcaatcccttccgagaaacagcgcctcatatatcaggggcgggttctgcaggacgacaagaagctgcaagaatataatgtgggagggaaagtgattcatctggtcgagcgcgctcctcctcaaacccacctgccgtccggagctagttcaggaacaggaagtgcttcagccacgcacggaggaggatccccgcctgggacaaggggtccaggcgcttccgtgcacgaccgaaacgccaatagctatgtgatggtgggcacatttaaccttccatccgatggctcagccgtggacgtgcatattaatatggagcaggcccccatccagtcagagccccgggtacgccttgttatggctcagcacatgatacgggatatccagaccctgctatccagaatggagtgtaggggcgggccccagcctcagcactcccagccacccccccagccccccgccgtgacccccgagcctgtagccctatcctcgcagacctcagaaccagtggagtccgaagctccaccccgcgaaccaatggaggccgaggaagtggaagagagagcccccgcccagaaccctgagctgacaccagggcccgcaccggctggtccgaccccagctccagaaacaaatgccccaaatcacccctctcccgctgaatacgtggaggtcttacaggagctgcagcgcctcgagtctaggctgcaaccattcctccaaagatactacgaagtcctgggcgctgccgcgactactgattacaacaacaaccacgagggcagagaggaagatcaacgtctgattaacctggtgggcgagtcacttagactcctcggcaacacctttgtggctctgagtgacctgcgctgcaacctcgcctgcaccccccccagacacctgcacgtggtgagaccaatgtctcattacacgacgcccatggtcttgcagcaggctgcaatacctattcagataaatgttgggaccacagtgacaatgaccggaaacggcacgcgacctcccccaactccaaacgctgaagcccccccgccgggccccgggcaggcgtctagtgtggctccctccagcacgaacgtggagtcttccgctgagggagcccctccaccaggacctgctcctccaccagctacgagccacccaagggttattaggattagccatcagagtgtcgagcctgtggtgatgatgcacatgaatatacaggattctggcactcagccagggggtgtaccgtctgctcctacaggccctttggggccaccaggtcacggccagacactcggctcaaccctgattcagcttccatcactgcctccagaatttatgcatgctgtggctcaccagatcacccatcaggcgatggtcgcagcagtagcctccgctgctgctgggcagcaggtaccaggatttcctaccgcccctaccagagtggtaatagctcgaccaacccccccccaagccagaccttctcaccctgggggccctccagtgtccggcaccctgcagggcgccggcctgggtacgaacgcaagcttggcccagatggttagcggcttggtcgggcagctgctgatgcagcccgtcctagtcgcccagggcacccctgggatggcgccacctcccgccccagctactgcctctgccagtgcgggtaccaccaacactgccacaaccgccgggccagccccaggcggaccagctcagcctccgcccactccgcaaccctccatggctgacttgcagttcagccaactcctggggaaccttctcggccccgcaggacctggggctgggggacccggagtggccagccccaccatcaccgtggcgatgcctggtgtccccgcatttcttcaaggcatgaccgactttcttcaggcgacccaaactgcccccccaccacccccccctcccccaccccccccccctgcgcccgagcaacagacaatgccccctccgggttccccctcgggtggcgccgggagccctggagggctgggcttagagtcactcagccctgaattttttacatccgtggtgcagggcgtcttgtcatccctccttggctctcttggtgccagggccggcagcagcgagtcaatagctgcgttcatacagagactgtccggatcatccaatattttcgagcccggcgctgatggggcgctgggttttttcggggccctgttatccctcttgtgtcagaacttctcaatggtcgatgttgtaatgctgctccacggccatttccagcctctgcaacgcctgcagccccagctgcgttccttctttcaccagcattacctgggtggacaggaaccaacgccgagcaacattcgcatggctacccacaccctgatcaccggactggaggagtacgtgcgtgaatccttctcactcgttcaggtacagccaggtgtggatatcatccggacgaacctcgagtttttacaagaacagttcaactctatcgccgcccacgtgctgcactgtactgattccgggttcggcgcccgactactggaactttgcaaccagggcttattcgagtgcttggctctgaatcttcattgtctgggcggtcagcagatggagctggctgcagtcatcaatggccgaatcagaagaatgagtcggggggtaaatccctctttggtctcttggctgaccactatgatgggactaagacttcaagttgtgcttgagcatatgcccgttgggcctgacgctatactgcggtatgtgcgtcgggtgggcgaccctccccagcctctgccggaagaacccatggaggtgcagggcgcagaaagggcttcaccggaaccccagagggagaatgcaagtcccgcccctggtacaactgcagaggaagcaatgagccggggcccaccgccggcccccgaaggcggaagcagggatgagcaggatggggcaagtgccgaaacagaaccatgggccgcagcggtaccacctgagtgggtgccgatcatccaacaggatattcagagtcaacgtaaggtaaagccccagcctcccctgtcggatgcatatctaagcggaatgcccgctaaaaggaggaagactatgcaaggcgagggtcctcagctgcttctttccgaggccgtgagtcgggctgcaaaggccgctggcgcaagaccgttgacctccccggagtcactttcacgcgatctcgaggcccctgaagttcaagagagttaccggcagcagttgcggtctgatattcaaaagcggctgcaagaagatccaaattactctccacagcgatttccgaatgcccagagagcctttgccgacgacccctag

SEQ ID NO: 180455 - DNA, 2712 bp, synthetic construct
  misc_feature 1..2712: note = Description of Artificial Sequence: Synthetic coding sequence
  source 1..2712: mol_type = other DNA
atggagcccaacgacagcaccagcaccgccgtggaggagcccgactccctagaagtgctggtgaagaccctagactcccagactcgaacattcatcgtgggcgcacagatgaacgtcaaggagttcaaagagcacattgctgcctcggtcagcatcccctctgagaagcagcgactcatctatcagggccgtgtgctccaggacgataaaaaactgcaagaatacaacgtcggtggcaaggtgatacatctagttgagcgagcaccgccacagactcacctgccgtctggagcctcctctggcactgggtctgccagcgctacacacgggggagggtcaccaccgggcactaggggacccggagcatcagtgcatgaccgcaacgccaatagctatgtgatggtaggtactttcaacctccccagcgatgggtcagccgtcgacgttcatatcaacatggagcaggcccccattcaatctgagcctcgcgtgagattagttatggcacaacacatgatccgagacattcagaccctcctgtcgagaatggaatgcaggggcgggccacagccacaacattcccagccacctccacagccccccgctgttactcctgaacccgtggcactctcttctcagactagtgaaccggtggagagtgaagcccctccccgagagccaatggaagcggaggaggttgaagagagggctcctgctcagaatccagaactgacccccgggccagcgccagccggacctacacccgcccccgagactaacgcccctaatcacccttcaccagcggagtacgtggaggtgctgcaggagctccagcgtctagaatctcggcttcaaccattcctacagaggtactatgaggtgctcggagctgccgccaccacggactataataacaatcatgaaggccgtgaggaggatcagcggctgatcaatttggtcggggagagtcttagactcttgggcaacacttttgtcgccctatccgatctacgctgtaacctggcctgtacccccccacggcatcttcacgttgttcgtcccatgtctcactatacaacgcccatggttttacagcaggcagccatccctatccaaattaacgtggggacaacggtcactatgactggaaatggcacgagaccgccccccacacccaatgctgaggcccctccaccaggtcctggccaggctagctctgtagctccgagttccaccaatgtggagtcgagcgccgaaggcgccccaccgcccggccctgctccacctcctgccacttcccacccccgggtgatcaggatctcccaccagtcagtggagccagtggttatgatgcacatgaacatccaggactccgggacccagcctggcggcgttccaagcgcccctaccgggcccctgggcccacctggacacggccagacacttgggcagcaggtcccaggttttcctaccgcccctactagggtcgtgatagcaaggcccacacctccccaggcacgtccatcccatcccgggggccctccagtatctgggacacttggcgccggtcttgggacaaacgcgagcctggctcagatggtttccggcctcgtgggtcagctcctgatgcagcccgtgctggtcgcgcagggcaccccaggtagcccagggggattggggctggaaagtctgtcaccggagtttttcaccagcgtggttcagggagtcctgtccagtctgctgggttctctcggagctagagcaggcagctcagagtcaattgctgcttttatccagaggctgtctggaagctcaaacatctttgagcccggggccgacggagcacttggtttcttcggggccctcctgtcattactgtgtcagaacttcagcatggtagacgtggttatgctgctgcacggccacttccaaccacttcagcgcctacagccgcagctgaggagcttctttcaccagcactatcttgggggtcaagaacccacaccctcaaacatcaggatggcaactcacaccctcattacaggactggaagagtacgttagggaaagctttagtctggtccaagtccagcccggcgtggacataatcagaacaaacttggagtttctccaggagcagttcaactctatcgctgctcacgtactgcactgtacagatagcggttttggcgcacgcttacttgaactctgcaatcagggactgttcgagtgcctggccttgaatttgcattgcctgggagggcagcagatggaactcgccgcagtgatcaatgggcgtatcaggcgcatgtcgagaggtgtcaacccctcgctcgtctcctggctaacgacaatgatgggacttagactccaagtagtgctggaacacatgccggtcggccctgatgccattttgcggtacgtgcggcgcgtaggcgacccaccacaaccattacccgaagagccaatggaagtgcagggggccgaacgtgcatcaccagaaccccaggaatgggtgcccattattcaacaagacatccagtcgcagcgcaaggtgaaacctcagccccctctgtcggacgcctacctttcaggcatgcctgccaaaaggcgaaaattacggtccgacatacagaagcgcttgcaggaagatcctaactactctccccagcgcttccccaacgcacaaagggcgttcgccgacgatccttag

SEQ ID NO: 180456 - DNA, 2712 bp, synthetic construct
  misc_feature 1..2712: note = Description of Artificial Sequence: Synthetic coding sequence
  source 1..2712: mol_type = other DNA
atggagcccaacgacagcaccagcaccgccgtggaggagcccgacagcctcgaggtcctcgtaaaaaccctcgactcacagacaaggactttcattgtcggagcccagatgaacgtcaaagaatttaaggaacatatcgcggcttctgtctctattccatctgaaaaacagcgcttaatctatcagggccgggtgctgcaggatgataaaaagctgcaggagtataatgttggtggaaaagtgatccatttggtggagagagctccaccacagacccacctaccgtctggcgccagctctgggacaggatcagcttccgccacgcacggcgggggctccccaccagggacccgcggccctggagcctccgtgcatgatcgcaatgctaatagctacgtgatggtgggaaccttcaacttgccttcagatgggagtgccgtcgacgtccatattaatatggaacaagcccctattcagtcagagccaagggttcgcctggttatggcccaacacatgatccgagacatacaaacattattatcgcgtatggagtgtagggggggtccacagccccagcactcccagcccccacctcagccaccagccgtgacacctgagcccgtggccctgagttctcagacgtccgagccagtagagagcgaggcccctccccgggagccgatggaggccgaagaggttgaagagcgcgccccagcccagaaccctgagctcaccccaggccccgcacctgccggtcccacaccagcccccgagaccaacgcccccaatcaccccagcccagcggaatacgtggaggtcttacaagagctgcaaagattggaatcgagactgcagccctttcttcagagatactatgaggtgctcggcgctgccgccactacagattataataacaatcacgaaggacgagaggaggaccagaggctcattaatcttgttggcgaatcattacggttgcttgggaatacctttgtggctctgagcgacctaaggtgtaaccttgcttgtacacctcctcggcacctgcacgtggttaggcccatgagccattacaccactcctatggtgctgcagcaggccgcgattccaatccagattaacgtgggcacaacagttacaatgacagggaacggtaccaggcctccaccaacacctaacgcagaggcaccacccccaggcccgggtcaggcttcttctgtcgcccctagcagcaccaacgtggagagctctgcagaaggcgctcccccaccagggccagccccaccgcctgctacctcccatcctcgcgtcatccgtattagccatcagtcagtggagcccgtggtaatgatgcatatgaatattcaggattccggtacccagcctggaggagtgcccagtgctcctacgggaccacttgggccaccaggtcacggtcagacactagggcagcaggtgcccggcttcccaactgccccgactcgcgtggtcatcgcaaggccgacaccaccccaggcccggccaagtcaccctggcggccctccggtgtccggaacactaggggctgggttaggtaccaatgcgtctctcgcccagatggtttcaggcctcgtcggacaactgctcatgcaacccgttctcgtggcacaggggacccctggctcccccggcggactagggctcgagtccctttcccccgagttcttcacatctgtggtccaaggcgtgcttagttcactcctgggctctctcggtgccagagcagggtccagtgagtccatcgctgcatttatccagcggctgtccgggtcttccaatatttttgaaccgggtgcagatggtgctctgggattttttggggccctgttgtctttgctctgccagaattttagcatggtggacgtagtaatgctgctccatggccatttccagccacttcagcgtctgcagcctcagctgaggtccttctttcaccagcactacctgggagggcaggaaccaacgccaagcaatatccgcatggccacccataccctgattactggcttggaagaatacgtccgagaaagcttttctcttgtccaggtgcagcccggggttgatattatacgtacaaacctggagtttctgcaggaacagttcaattccattgcagcacatgtcctgcattgtacagattccggatttggtgctaggctcctggagctctgcaaccaaggactcttcgaatgtcttgctttgaatcttcactgcctcggcgggcagcagatggaactggcggcagtgattaatggacggatacggaggatgtcaaggggggtgaatcccagtctcgtgtcctggctcaccaccatgatgggtcttaggctgcaagtggtcctggagcatatgcctgttggtccagacgcaatcctgcgatatgtgcgccgggtgggagatccacctcaaccattgccggaggagccgatggaggttcagggagccgagagggcctctccagagccacaggaatgggtgcctatcatccagcaggacatccaatctcagcgaaaagtcaagccccagcctcctttgtccgatgcatatctgtccggcatgccagctaagaggaggaaactccggtcggatattcagaagcggctccaggaagacccgaactatagccctcagcgattccccaatgctcagagggccttcgcagatgatccctag

SEQ ID NO: 180457 - DNA, 3234 bp, synthetic construct
  misc_feature 1..3234: note = Description of Artificial Sequence: Synthetic coding sequence
  source 1..3234: mol_type = other DNA
atggagcccaacgacagcaccagcaccgccgtggaggagcccgactccctggaagtactggtcaagacattggattcccagacccggacgtttatagtgggcgctcagatgaacgtgaaagaattcaaggagcatattgccgcatcagtgtcaattccttcggaaaagcagagattgatctaccagggacgcgtgctgcaggacgacaaaaagctgcaagagtacaatgtggggggcaaagtgatacacctcgtggaaagggctcctccacagactcacctgccttctggcgcttcctcaggcacgggttcagcttctgccacacatggcggcggctcccccccaggtacccgcggccctggcgcatccgtccacgacaggaatgccaattcttatgtgatggttggaacattcaacttgccctccgacggctcagccgttgacgtgcacattaatatggagcaggctcccattcagtcggagccaagagttcgcctggttatggcccagcatatgataagagatatccagacactgctatcacggatggagtgtcggggggggcctcagcctcagcattcccagcctcctccacaaccccctgctgtgacaccagaaccggtcgctctctctagccagacgagcgagcccgtggaatccgaggctccgcccagggaacctatggaggccgaagaggtagaggagcgggccccggctcagaatccagagcttacacccggtcccgcccctgcaggaccaacgccagcccctgagaccaatgcgccaaaccatccgagtcctgccgagtatgtggaggtgctccaggagctgcagcgactcgagagtcgtctccagccatttttgcagcgctattatgaagttttgggagctgcagccacaactgactataacaataaccatgaaggacgcgaagaagaccagcgactgatcaacctggttggagagagtctgagactactgggcaatacgtttgttgccctttccgatttaaggtgtaatttggcatgtacgcctcctagacacctgcacgtggtgcgacctatgtcccactacacgacaccgatggtactccagcaggctgcaattcccatccagataaatgtgggaactactgttactatgaccggaaacggcaccagaccacctccaacccctaacgccgaggcaccgccccccggaccggggcaggcttccagtgtggcccccagttccacgaatgtggagtcttctgccgagggtgcccccccacccggaccagccccaccccccgccacaagccacccccgcgtaatcagaattagtcaccagtctgttgagcctgtggtgatgatgcatatgaatatacaggattctggcacgcagcccgggggtgtccccagtgcccctacaggtcccctaggcccaccgggccatggccagacactggggcaacaggtgcctggattcccaacagctcccacccgagtggttatagctagacctaccccacctcaggctaggccatctcaccccggagggccacccgtctctgggacacttcagggggctggcctaggaaccaacgcctccctggcacaaatggtgtcagggctcgtgggacaacttctaatgcaaccagtcctcgtcgcccaggggacccctggaatggcaccaccgcccgctccggcaacggcctcagcctctgcaggaaccacgaacaccgcaaccactgctggacctgctcctggggggccagcacaaccccctcctaccccgcagccatctatggccgatctgcaattctcacaactgctgggaaacctgctcggccctgcaggcccaggcgccggaggctccggagttgctagcccgacgatcacagtggcgatgcctggtgtgcccgcctttctgcaagggatgactgacttcctgcaggcaacccagaccgcccccccccctccacccccccccccacccccaccacccgcgcccgaacagcaaaccatgcctccaccaggaagcccatccggcggtgctggctcacctggcggtctcgggctcgagtctctgtcacccgagttttttacatctgtggtgcaaggggttctctcctcacttctgggcagcctcggagccagagcaggcagttctgagtccattgcagcttttattcagagactttcaggttcaagtaatatctttgagccgggggccgatggggccctgggtttcttcggtgctctcctcagcttgttatgtcagaacttctccatggtggacgtagtgatgttactgcacggccattttcagccacttcagagattacagccacagcttagatctttctttcatcagcattatctcggggggcaggaacctactcccagcaatattcgtatggccacccataccctgataacaggactggaagagtatgtgagagagagcttcagtttggtccaagtacagcccggcgtggatatcatccgtactaatctggagttcctccaggagcagtttaactctatcgcggcccacgttcttcattgtactgacagcggctttggtgctcgcttactcgagctgtgcaatcagggcctcttcgagtgtctggccttgaatctgcactgtctgggcggccagcaaatggaactcgccgcggttattaacggccggatccgtaggatgagccgaggcgttaatcctagcctcgtatcctggctgactaccatgatgggcttgcgtctgcaggttgtcctggaacatatgcccgttggaccggacgctatcctacggtatgtgcgacgcgtcggtgaccctccccagcctctccccgaggagccaatggaagttcaaggggccgaacgggcgtctccggagccccagcgggaaaacgcttcccccgctcccggcactacagccgaggaggcaatgagtcgaggaccaccaccagctcctgagggagggtctagagacgaacaggatggtgctagcgcagaaacagagccctgggctgctgccgtgccccccgagtgggtacccattatccaacaagatattcagagccagcgaaaggtgaaacctcagccccctttatctgatgcctatctctctggcatgcctgccaaaaggcgaaaactgcgctctgatatccagaagcggcttcaagaagacccaaactactcccctcagagatttccaaacgcacagcgagctttcgctgacgatccgtag

SEQ ID NO: 180458 - DNA, 3234 bp, synthetic construct
  misc_feature 1..3234: note = Description of Artificial Sequence: Synthetic coding sequence
  source 1..3234: mol_type = other DNA
atggagcccaacgacagcaccagcaccgccgtggaggagcccgactccttggaagttctggtgaagactctcgactcacaaacaagaactttcatcgtgggagcccagatgaatgtgaaggagtttaaggaacacattgccgcctccgtatcgataccgtcagaaaaacagcggctgatataccagggccgggtcctgcaggacgacaagaaactacaggaatacaatgtcggaggcaaagtcatacacctcgttgagagggcccctccgcagacccatcttccctcgggggcgagctctgggactgggagcgcctctgcaacacatggaggtggttctccaccaggcactaggggacctggggccagcgtccacgatcggaatgcgaattcctacgtcatggtcgggacattcaatttaccttccgatgggtccgccgtcgatgtgcatatcaatatggagcaagccccaatacaatccgagccaagagtgagactggtgatggctcagcatatgattcgggacatccagactctactgtcacgcatggagtgtcgtggaggaccacagccgcagcatagccagcctccgcctcaaccccctgcggtgacacctgagccggtcgcactatcttcccagacgtctgaaccggtggagagcgaggcccctcccagggaacccatggaagcagaggaggttgaagaaagggcgccggcccagaatccagagctaactccagggcctgccccggccggacccacaccagctcctgagacaaatgctcccaaccatccttcacccgccgagtacgtggaagtgttgcaagagctccagcggctggagtccagattacaacccttccttcaacgctactatgaggtcctcggcgccgcggcaacgaccgactataacaataaccacgagggccgtgaagaggaccagcgtctgattaatttggtgggtgaatctcttagactgttgggcaatacattcgtagctctctcggatctcagatgcaatctcgcttgcactccacctagacatctgcatgtggtgagacccatgtcacactacaccacacctatggtgcttcagcaggccgcgatacccatccagataaatgttgggacaacggtgacaatgaccggtaatggaaccagacctcctcccactcccaatgcagaagcgcccccccccggcccaggacaggcatcttcagtggctccttccagcacaaatgtggaatcctcggctgaaggcgcacctccccccggccccgccccaccacctgcgaccagccatccacgggttattcgcatctcccatcagtccgtggaacccgtggttatgatgcacatgaacatacaggacagtggcacccagccgggaggggtgccttccgcccctaccggcccactggggccgcccgggcacggacagacccttggacaacaagtgcccggctttccgacagctcctacgcgtgtagtgatcgcccgtcccacaccacctcaggctagaccaagccaccccggcggcccaccagtatcaggcactcttcagggcgcaggtctcggaaccaacgcctcccttgctcagatggtcagcggtttggtcggccagctgctaatgcagccagtgctggttgcccagggtactcccggaatggcaccaccaccggctccagcaactgcctccgcctccgccggtactacgaataccgctaccacggccggccctgcccctggaggaccagctcagccccctcctacccctcagccatccatggccgacctccagttttctcagcttcttggtaatctcttggggcctgctggccctggcgctggaggtcctggcgtggcctcacctacaattactgtcgccatgcccggcgtcccagcttttctgcagggcatgacagacttcctccaggccacccaaaccgcccctccacctcccccccctccaccgccgcctccaccggcgcccgagcagcagacaatgcctccacccggctcccccagtgggggcgccggatccccgggaggcttgggtttagagagcctgagtcctgagttttttacgagcgtcgttcagggagtgctgtcaagcctgctgggctctttgggggccagggccgggtcctccgaatcaatcgcggcctttatacagagactttcaggctcatccaatatcttcgagccaggggctgatggcgcattggggttcttcggcgctctgctgtcgctgttgtgtcagaattttagtatggtggatgtggttatgctcctccacggccacttccagccactgcaaagactccagcctcagctcaggtctttcttccatcagcattatctcggcgggcaggagccaactccgtctaacatcaggatggcaacccatacactcataacaggtcttgaggagtacgtgcgggagtccttctcactggttcaggttcagcctggcgtggatatcataagaacaaatctggagttcctacaggagcagttcaacagtattgcagcccatgtgcttcactgcactgatagcggatttggcgccagactgctggaactgtgcaatcaggggctgttcgagtgccttgcactgaacctccactgcctgggcggccaacaaatggaactggccgctgtgatcaatggcagaatccgcaggatgagcagaggagtcaacccgagccttgtcagttggttgaccactatgatgggtctcaggctccaggtggtgctggaacacatgccagtgggtcccgatgctatcttgcggtacgttcgacgagtgggcgaccccccacagcccctgcctgaagagccaatggaggtgcagggtgccgagcgagcctcgccagagccccagcgggaaaatgccagcccagcccctggaaccaccgccgaggaggcaatgagccgtgggcctccacctgccccagaaggtggatcacgtgacgagcaggacggcgcaagtgccgagactgaaccttgggctgccgccgttccacctgagtgggtgcccatcattcagcaagatatccagagtcagagaaaggtgaagcctcagcctcctcttagtgacgcttatctgtctgggatgcctgctaaacgcagaaaactccgttcggatatccagaaacgcttgcaagaagatcccaactactctccacagcgctttcctaatgcacagcgggcctttgcagatgacccctag

SEQ ID NO: 180459 - DNA, 3489 bp, synthetic construct
  misc_feature 1..3489: note = Description of Artificial Sequence: Synthetic coding sequence
  source 1..3489: mol_type = other DNA
atggagcccaacgacagcaccagcaccgccgtggaggagcccgactcactcgaggtgctcgtcaaaactctcgattcccaaacaagaacgtttattgtgggcgcgcagatgaatgtcaaggagttcaaggagcatatcgccgctagtgtttccatcccttcagagaaacagcgcctgatctatcaggggcgggtgcttcaggatgataagaaattgcaggagtacaatgtcggcggtaaagtgattcaccttgtagaacgggccccacctcaaacacacctcccctccggggcttcaagcggaacaggttctgctagtgccacacatggaggcggaagtcctcccggcactcggggacccggggcctccgtccatgatcgcaacgccaacagttacgtgatggtgggaaccttcaatttacccagcgatggctctgcagttgacgttcacattaacatggagcaggctccaatccagtcggaaccgagagtcaggctggtgatggcacagcatatgatccgggatatccagaccctgctgtcgcgcatggaatgtcgcggaggtccacagccccaacattcgcagccacctccccaacctccagctgtcacacccgaacctgttgcactgtcgagccagacaagtgagcccgtggagagcgaggccccccctcgcgagccaatggaagcagaggaggtagaggagagggcgccggcccagaatcccgagctgacacccggcccagctccagccggtcccactccggcccccgagaccaatgcaccgaatcacccctcacctgcagagtacgtcgaagtgctgcaggagctccaacggcttgaatcccgcctccagcccttcctacagagatattacgaagtgctaggggccgcagcaacaacagattataataacaaccacgagggtagggaggaagaccagcgcctcattaatctggtcggcgaaagcctgagattacttgggaatactttcgtggccctgtctgatcttagatgtaacctggcatgcacccctccaaggcacttgcacgtggttcgcccgatgtcccattataccactcctatggtattgcagcaggcagccatccccattcaaattaatgtgggaacaactgttaccatgaccgggaacggtacgagacctccacctacgcccaatgcggaggccccacccccagggcccggacaagctagctctgtggctccatcttccactaacgtggaatcaagcgccgaaggcgctccaccccccgggcctgcccctcctccagctaccagtcaccctcgcgtaataaggataagccatcaaagcgtcgagcctgtcgttatgatgcacatgaatatacaggattcgggtacacagccgggcggggtgccctccgctccaaccgggccccttggtcctcctggccacggccaaactctgggcagcacacttatacaactgcctagcctgcccccagagtttatgcacgccgtggcccaccagatcacgcaccaggctatggtggcagctgtggctagtgccgctgccgggcaacaggtcccgggcttccctaccgcgccgacccgggtggtgattgcccgcccaactccgcctcaggcgcggccatctcatcctggaggtccgccggtcagcggaaccttgcagggcgccggcctcggaactaatgccagcctagcccagatggtgtcaggactcgtgggacaattgctcatgcagccggttctggtcgcacaggggacacctggcatggcgccgccccctgctccagctaccgcatcagcctcagcagggacaactaacaccgccacaactgctggaccggctcccggaggacccgcgcagccccctcccacacctcagccatccatggctgacctgcagttttctcagctgttagggaatttattaggaccagcaggacccggagcaggtggacccggtgtggccagcccaacgattacggttgccatgccaggagtgccagcctttctccaggggatgactgacttcctacaggctacgcagaccgcccccccaccaccaccccctcctcccccacctccccctgcccctgaacaacagaccatgccacccccaggttcccccagcggcggggctggatccccaggaggactgggactcgaatccctgagccctgagttctttacgtccgtggtccaaggggtgctcagttctttgctaggctctcttggagctcgtgccggaagtagtgagtcaatagccgcattcatccagcgcctaagtggctcatccaacatctttgagcccggcgccgacggcgccctgggtttctttggggcactcctctcgctattgtgtcagaacttctctatggtggacgtagtcatgctcctccacggccacttccagcctttacaacgccttcagcctcagcttagatctttttttcaccagcattatctgggcggacaagagccaactccatccaacattagaatggccacacatacccttattacgggtctcgaggaatacgtacgggagtcttttagcctggtgcaagtacagccaggagtggacattattcggactaatctagaattcctccaggaacagttcaactccattgctgcgcacgtgctccactgtaccgatagcggtttcggcgcccggctcctggagctttgcaaccaagggctctttgagtgtttagctctgaatctccattgcctgggcggccagcagatggaactggctgccgtaatcaatggaaggattcggcgtatgagcagaggggtcaatcctagcctagtgagttggttgaccactatgatggggttacggctgcaggtcgtcctggagcatatgcctgttgggccagacgctatcttgcgctacgtgcggagggtcggtgatccccctcaacccctgcctgaagaaccaatggaggttcagggcgccgagagggcctctcccgagccgcagcgcgaaaatgctagccccgcaccaggcactacagccgaggaagctatgagtcgcgggcctccccctgcacccgagggcgggtcccgcgacgaacaggacggcgctagtgccgagactgagccgtgggccgcagctgttcctccagaatgggtcccaattatccagcaggatatccaaagccaacgcaaggtcaaacctcagcccccactgtccgacgcatacctttctggtatgcccgccaagaggcgcaaaaccatgcaaggcgaagggccacagttactcctttcagaagcagtgagccgggctgcgaaagcagcaggtgccagacctctgacttcaccagagtccctctcaagagatttggaagcgccggaagtgcaagagagttacaggcagcaactgcgctccgatatccaaaagagactacaggaagaccccaactactcaccacagcgatttccgaatgcccagcgcgcatttgccgatgacccctag

SEQ ID NO: 180460 - DNA, 3234 bp, synthetic construct
  misc_feature 1..3234: note = Description of Artificial Sequence: Synthetic coding sequence
  source 1..3234: mol_type = other DNA
atggagcccaacgacagcaccagcaccgccgtggaggagcccgactctttagaagtactcgtgaagacactggacagtcagacaaggacgttcatcgtcggcgctcagatgaatgtcaaggaattcaaggaacatatcgccgcatccgtctctattcccagtgaaaagcagaggctgatctatcagggtagagtcctgcaggacgacaaaaagctccaggagtacaatgtcggcgggaaagtaattcacctggttgagagggctccccctcaaacccaccttccaagcggtgcctcctccggcaccggctcagctagcgcgactcatggcggtgggtccccgcccgggacacgcgggcccggcgcaagcgttcatgaccggaacgccaattcatacgtcatggtaggcacatttaaccttccttcagatggctccgccgtcgatgtccatataaacatggagcaggcgcccatccagtccgagcctagagttagactggtgatggcgcaacacatgatccgggacatccagaccctcctaagccggatggagtgtcgggggggcccacagccgcagcactcccagccccccccacagcctccagctgtgactcctgaaccagtggcgctgagctcacagacatcagaacccgtcgaaagtgaagccccccccagagaacctatggaggctgaggaggtggaggagcgcgccccggcacagaatcctgagctcacacccggcccggctcctgcggggccgaccccagctcctgagaccaacgctcccaaccacccctctccggcggagtatgtggaggtgctgcaagagcttcagagacttgaatcccggctgcaaccatttctgcagcgatattatgaggttttgggcgccgccgcaaccacagactataacaacaaccacgagggtcgcgaggaggaccagagactgataaatttggtgggagagtctctgcgacttctggggaatacttttgtagctctgtccgatctcagatgcaatctagcctgtacacccccccggcacctacatgtagtcaggcccatgtcccattataccacgcctatggtgcttcagcaggccgccattccgatccaaatcaatgtgggcactactgtcacaatgaccggaaacggcacgcgccctcccccgaccccaaatgctgaggcaccccctcctggccccggccaggcttcctccgtggctccctcttcaaccaatgttgagtcaagcgccgaaggagccccaccccctggcccggcgccccctcccgcaacatctcaccctcgtgtcatcagaattagccaccagagcgtggagcctgtggtgatgatgcacatgaacatccaggactccggaacgcaacccggcggggtgccgagtgcaccaactgggccgctcggtccacccggccacggacagactctaggccagcaggtgcctggcttccctaccgcccctacgagggtggtgatagctcgccctaccccaccccaggcacgcccctcccaccccggcggacccccggtgtccgggacactgcaaggtgcgggcttaggaaccaacgcctcactggcacaaatggtcagcggtctggtgggacagttgctgatgcaacctgtgctcgttgcccaggggacccccggcatggctccccctccggcccccgccaccgccagcgcctccgctggaactaccaataccgccaccacagctggccctgcgccaggcggcccagctcagcctccgcctacacctcagccctccatggctgaccttcagttttcacaattgcttggcaatttactgggccccgcgggtcccggggctgggggatcaggggttgccagtcccacgattaccgtcgcgatgcctggagtgcctgcatttctccaagggatgacagatttcttgcaggccacacagacggctccacctccacctcctcctccccctccaccgcccccagcccccgagcagcagaccatgcctccccctggaagcccttctggaggggctgggtctccaggcggactggggttagaaagtctgtcccccgagtttttcacgtctgtggtacagggagttctgagcagcctgttggggtccctgggagccagagccggatcttccgagtccattgcggccttcattcagcgcctgagcgggagctccaacatattcgagcccggggccgacggcgccttggggtttttcggggcccttctgtccctgttgtgccaaaatttctccatggtcgacgtagtgatgctgctgcacggccacttccagccactgcaaagattgcagccacagctgcgaagctttttccatcagcattatttaggcgggcaggagcccacaccaagcaacattcgaatggcgacccacaccctcatcaccgggcttgaggaatacgtccgggagtccttcagtctggtgcaggtgcaacctggcgtggatatcatacgcactaatctggagtttttgcaggagcagttcaatagtattgctgcccatgtgctgcactgcactgacagcggctttggagctagattgctggagctctgcaatcaaggactctttgaatgcctcgccctcaatctccattgcctcgggggccagcagatggagctggctgcagtgattaatggtaggatcaggcgcatgtcacgaggtgtaaaccctagtttagtgagctggctaacaaccatgatggggctgcgcctgcaagtggtgctcgaacatatgccggtaggtccggatgcaattctgagatacgtgagacgcgttggggacccaccccagcctttaccagaagaacctatggaggtccagggtgctgagagagcctctcccgagccacagagggaaaacgcctcaccagctcctgggaccacggccgaggaagccatgtcccggggccccccccccgcaccggagggcggctctagggatgagcaagacggggccagtgccgaaacagagccgtgggccgcagccgtgcctcctgagtgggtcccaattatccagcaggacattcagtcgcagcgtaaagtaaaaccgcagccccctttgagcgacgcgtacctcagcgggatgcccgctaagagaaggaaactgagatcggatatccaaaaaagactacaggaagaccccaattattcgccgcagcgatttcctaatgcacaacgggccttcgctgacgatccttag

SEQ ID NO: 180461 - DNA, 2712 bp, synthetic construct
  misc_feature 1..2712: note = Description of Artificial Sequence: Synthetic coding sequence
  source 1..2712: mol_type = other DNA
atggagcccaacgacagcaccagcaccgccgtggaggagcccgactcactggaagtgctggtgaagaccctggactcacagaccagaacctttattgttggggcccaaatgaacgtgaaagaattcaaagagcacatcgcggcatccgtatcgatcccatccgaaaagcagaggttaatctaccaaggccgggtgctgcaggatgataaaaagctgcaggagtataatgtaggaggcaaagtcattcacctcgtcgagcgggcacccccacagactcacttgccaagcggcgcttcctcaggtaccgggtctgcatccgctactcacggtggtggttctccccctggaacccgcggccctggcgctagtgttcatgatcggaacgccaattcctacgtgatggtgggcacatttaacttaccatctgatggtagcgcagtcgatgttcacattaacatggagcaggctcccattcagtctgaacccagagtccggcttgttatggcacagcatatgattagagatatccaaaccctactgtcacggatggagtgtcggggcgggccacagccccagcatagccagcctccaccacaacctccagcagtaacacctgaaccggtggctttatcatcacagacatccgagcccgtggaaagcgaagcccctccccgcgagcccatggaggccgaggaggtggaggagcgagctcccgcccagaaccccgaactgaccccaggccccgctcctgcaggtcctacacctgcacccgaaacaaacgcacccaaccaccccagccccgccgagtacgtggaagtacttcaggagcttcagcggctcgaaagcagactgcagccgttcttgcagaggtactacgaagttttgggcgctgccgctaccacagactacaataataaccatgaggggcgtgaggaagatcaacgcctgataaatttggtcggagaatctcttcgactcctgggcaatacatttgtggccctgtcagatctgcgctgtaatctggcctgtacccctccaaggcacttgcacgtcgtgcggccgatgtcacattatactacacccatggtgctccaacaagcggcaatccctatccagattaacgtggggacgacagtaactatgactgggaacggaacaagacccccccctacgcctaacgcagaggcacccccacctggcccaggtcaggcaagtagcgtggcacctagtagtacaaacgttgaatctagtgcggaaggagctcctccgccagggccagctcctcctcctgctacctcacatcctcgtgtcatacggatctctcaccagtctgtagaacctgtggttatgatgcacatgaacatacaggacagcggcacccagcctgggggcgtgccatctgcaccgaccggccccctgggaccgcccggccacggccagaccttaggacagcaggtgcccgggttccccactgcgcccacccgagtggtaatcgcacggcccactcctccacaggcccggccttctcaccccggcgggccgccagtttccggcacccttggcgctggattggggacgaacgccagcctcgcccaaatggtttctggcctcgttggccagctgcttatgcagcccgtattggtggcacaggggactcctggctctccaggtgggctgggcctggaaagtttgtctcctgagttctttacaagcgtcgtgcagggtgtgttatcatccttactgggatcattaggcgcccgtgcggggtcgagtgagtccatcgccgcattcatccagcgcctgagtggcagttctaatatctttgagcctggcgctgatggtgctttggggtttttcggggcactcttgagcctgctgtgccagaacttctcaatggtagatgtcgtcatgctcctgcacggacacttccaacccctgcagcggcttcaaccgcagctgcggtccttctttcaccagcactatctcgggggacaagagcctacaccttctaacatacggatggctactcatactttgatcaccgggctagaggagtatgtcagagagtccttttcgctggtgcaggtacagccaggcgttgatattatccggaccaacctcgagttcctccaggagcagtttaacagcattgctgcacacgttctgcactgtaccgattcagggttcggtgctcggctgctcgagctatgcaaccaaggcctgttcgaatgcttggcccttaaccttcactgtcttggcggacaacagatggagttggccgctgtgataaatggaagaattcggcggatgagccggggcgtgaacccttccctggtgtcgtggctcaccactatgatggggctaaggctgcaggtagttctcgagcacatgccggtaggcccagacgccatcctgcgttacgtgcgcagggtcggggatccgcctcagccactcccagaggagcctatggaggtccagggtgccgaaagagctagccctgagcctcaggagtgggtaccgatcattcagcaggatattcagtcgcagcggaaagtcaagccccagcctcccctgtccgatgcctacctgtccggcatgccagcaaaaaggaggaagctgcggtctgacatacagaagcggctgcaggaagaccccaattatagcccacagagattccccaatgcacagcgagcgttcgcggacgatccttag

SEQ ID NO: 180462 - DNA, 3489 bp, synthetic construct
  misc_feature 1..3489: note = Description of Artificial Sequence: Synthetic coding sequence
  source 1..3489: mol_type = other DNA
atggagcccaacgacagcaccagcaccgccgtggaggagcccgactccctggaggtactagttaaaactctggactcacagacgaggacattcatagtcggcgcccagatgaacgttaaggaatttaaggaacacattgcagcatccgtgagcatccccagcgagaagcagaggcttatttatcaagggagagtgttgcaagatgacaaaaaactgcaggagtacaacgtggggggcaaggttattcacctcgttgagcgtgcccccccacagacccatttaccctccggggctagctcaggtacaggctcggccagcgctacacatggcggggggtcaccaccagggacccgcggaccaggggccagcgtgcacgatcggaatgccaactcttatgttatggtcggcacatttaacctgccctccgacggctctgccgtggacgtgcacataaatatggagcaagcaccgattcagagtgaaccacgcgtgaggttggtgatggctcagcacatgatccgcgatattcagacactgctatcaagaatggaatgcagaggtggtccgcaacctcagcacagccagcccccaccgcagcctccggcagtcacaccggagccagtggcgttatcgagtcagactagcgaaccagtggagagcgaggcaccaccgcgcgaaccaatggaggctgaagaggtggaagaacgagcccccgcccagaaccccgaactgacacccggacctgcgccagctggacccacaccagctccagagaccaatgctcctaatcacccttcaccagccgagtacgtcgaggtgctccaggagcttcagcggttggagtctcggctccaaccgttcctccagcgatattacgaggtgcttggggcagccgccacaacggattacaacaacaaccacgaaggcagggaggaggaccagagactcatcaacctggttggggagagtttgcgtctgttgggtaataccttcgtggccttaagcgacctccgatgtaacctcgcttgcacaccacctcgccacctccatgtggtgagaccgatgtcccattatactactcctatggtgctccagcaggcagccatcccgattcagataaatgtggggacaacggtgactatgacaggtaatggcacgaggcctccccctacaccaaatgccgaagctcctcccccgggccccggccaggcctcttctgtcgcccctagcagtaccaacgtcgaatcatccgctgagggcgccccccccccagggcccgcccctccgccggctaccagtcacccccgagtcattagaatcagtcatcaatcggtggaaccagttgttatgatgcatatgaatatacaggattctgggacacagccagggggggttccctctgcccctacaggtcctttgggtccccccggtcatggccaaacgctgggcagcacactgattcagctgcccagcctgccacccgagttcatgcacgccgtcgctcaccagatcacacatcaagcaatggtcgccgccgtcgcgtccgcagctgccggacagcaagtccccggttttcccactgctcccacccgcgtggtcatcgcacggccaactccccctcaagcccggccctctcaccccggcggccctcctgtaagcgggaccctgcagggagcaggcctaggcacaaacgcttccctggcacagatggtgagtggcctggtgggccagctcctcatgcagcctgttctggtggcccaaggtaccccagggatggcacctcccccagctccagcaactgctagcgcctctgccggcaccactaatacagcaacgacagccggcccagccccaggcgggccagcacagcctccccccacacctcagcctagtatggcggacttgcaattctctcagttgctgggcaacttattgggccccgcaggacctggagccggtggctccggagtggccagtcctactattacagtggcaatgcctggtgtgccagccttcctgcaaggtatgaccgactttctacaggccacacagacagcaccccctccccctccacctccacctccccccccacccgcaccggagcagcagactatgccgcctccaggatctccaagcggaggcgccggtagtccgggaggcctgggactcgaaagccttagccccgagttctttacatccgtcgtccaaggagtcctatcttccctcctgggttccttaggggcacgcgcaggatcatcagagtctattgcagcatttattcagagactgtctggctcatctaatatctttgagccgggcgctgatggggctctggggttcttcggggctcttctgtcccttttatgccagaacttttccatggtagatgtcgtcatgttgttacatggtcatttccagccactacaacggctccagccacagctacgaagcttttttcaccaacactacttaggggggcaagaacccactccttccaatatcaggatggcaacacacaccctaatcactgggctagaggagtacgtgagggagagtttcagtctagtgcaggttcagcctggcgtggacattatcaggactaaccttgagtttttgcaggagcagtttaactccatagccgcacatgtactgcactgcacagactccgggttcggagcccgtctgttggaactctgtaaccagggactgttcgagtgcctcgctctcaatttgcactgcctggggggacagcagatggagctagccgccgtcatcaatggccggattcggagaatgtcacggggtgtgaacccctccttagtcagctggctgaccaccatgatggggcttcgcctgcaggtcgtgcttgagcacatgcctgttggaccagacgccattcttcgctatgtgcgccgggtgggggatccaccacaacccttgccggaagaaccaatggaagtccagggagcagagagagcctcacctgagccgcagagagagaacgcatcacccgctcccgggaccacagcagaggaggccatgagtcggggacctccgcctgcacctgaggggggttcaagggatgaacaggatggcgcgagcgccgagactgagccttgggcagccgcagtgccacccgagtgggtgccaatcatacagcaggatatacagtcgcagcgcaaggtcaagccccagcccccgctgagcgatgcctatctatcaggaatgccagctaagcggcggaaaacaatgcagggcgagggaccccagttactgttaagcgaagcagtgagcagagctgccaaggccgccggtgccaggcccctcacctcacccgaaagtctgtccagagacctggaagcaccagaggtccaggagagctacaggcagcagctgcgctcagatatacaaaagcgcttacaggaggatcctaactacagcccgcagcgcttcccaaatgcccagcgcgcttttgcggacgatccctag

SEQ ID NO: 180463 - DNA, 3234 bp, synthetic construct
  misc_feature 1..3234: note = Description of Artificial Sequence: Synthetic coding sequence
  source 1..3234: mol_type = other DNA
atggagcccaacgacagcaccagcaccgccgtggaggagcccgactccctcgaggtactggtgaagactttagacagccagacccgcaccttcatcgtcggcgcacaaatgaacgttaaggagtttaaagagcatatcgcagcatccgtctcgattcctagtgaaaagcagagactaatttaccaaggccgggtgctgcaggacgacaagaaactccaggagtacaatgtgggcggaaaggtcatccaccttgtggagcgagcaccacctcagactcacctgccttctggcgccagctcaggtaccggaagtgcatctgccactcacggcgggggcagtcctcctgggacacgcggacctggcgcttctgtgcacgatcggaacgccaactcatatgtaatggtgggcacatttaatctccccagtgacggctccgccgtggatgttcacattaatatggagcaagctcccatccagtctgaaccaagggtgagactcgttatggcccagcatatgatacgggatattcagaccctgctgagtaggatggagtgtagaggaggaccacagccacaacactcccagcctccaccacagccacccgcagtgacacctgagccagtcgcactgtccagccagaccagtgagccagtggaaagtgaggcacccccacgagagccaatggaagctgaagaagtcgaggaacgcgcacctgcacagaacccagagttgacgccaggacccgcccccgcgggtcctacacctgctccggagactaatgcgcccaaccaccctagccccgctgaatacgtcgaggtcttacaggagctccaacggctggaatccaggctgcagccgtttctacagcggtactatgaagtcctcggagccgcagccacaaccgattacaacaacaatcatgaaggtcgcgaggaggatcaacgcctgatcaacctagtaggcgagagcctccgcctcctaggtaatacttttgtggctttgtccgaccttcgatgtaatttggcatgcacgccgcctagacacctccatgttgtaaggcctatgtcacattacaccactcccatggtgctccaacaggcagctatcccgattcaaattaacgtggggacaaccgtcaccatgactggtaatggcacaagacctccaccaacacctaatgctgaggcccctcccccgggcccaggtcaggcctcaagtgtggccccaagttcaacgaacgttgaaagcagcgcagagggtgccccccctccaggcccggcccccccacccgccacctctcatcccagggtgatccgcatcagtcatcaatccgtggagcccgttgtgatgatgcacatgaacattcaggattccggaacccagccaggaggggtgccaagcgccccgactggcccactgggcccccccggacacggccaaactctcgggcagcaggtaccaggttttcctaccgcgccgactagagtggtgatagccagacccacccccccccaggctcggccatcacatccagggggccctccggtgtcgggcacccttcaaggcgcagggctgggcacaaacgcaagcctggctcagatggtgtccggactggttggacaattgctaatgcagccagtgctggtggctcaaggcactccgggcatggcccctcctccagcaccagccacagcatcagctagcgcaggaacgacaaatacagcgacaacggccgggccagcgccagggggccccgcccagcctcctccaactccgcaacccagcatggccgacttacagtttagtcagttgcttggaaacctccttgggcctgcgggacccggcgccggtggccccggggtggcatcccctactattacagtggctatgccgggcgtgccagctttcttgcagggaatgactgacttcctgcaggctacccagacagccccacctcctccaccaccacctccaccccctccacccgcccccgagcagcaaaccatgcccccccctgggtcccctagcggtggggccgggtccccaggaggactgggccttgaaagcctctctcctgaattctttacttcagttgttcagggagtactttcttccctgctcggctcactcggggcccgggcaggtagcagcgagtcaattgcggcattcattcagcggctatccggctcctcaaacatcttcgagccaggagctgacggcgctttaggctttttcggagcactactttccctgttgtgccaaaacttcagtatggtagatgtggtgatgctcctccatggccatttccagccactgcagcgtttacaaccgcagctgcgcagcttcttccatcagcactatctgggcggccaagagccaactccgtccaacattaggatggcaacacacactctaatcacgggactggaagagtatgtccgggagtcttttagtcttgtgcaagttcagccaggggttgacatcatacgcaccaatttggagttccttcaagagcagtttaatagcatcgctgcccacgtcctccattgtactgatagcggtttcggcgctcgcctgctggaactctgtaatcagggactgttcgaatgcctggctttgaatttgcactgtcttgggggccagcagatggagctggccgctgtaatcaacgggagaattcggagaatgtcaaggggagtgaatccaagcctggtgagttggttgactactatgatgggactcaggctgcaggtggtgctggaacatatgcccgtcggcccggatgccattctgagatacgtgcgcagggttggtgatccacctcagcctctcccagaagaaccaatggaagtgcagggagccgagcgcgcttcacctgaacctcagcgcgaaaacgcctcacccgctcctggaaccaccgcagaggaagccatgtcaagaggccctccacccgccccggagggcgggagccgcgatgaacaggacggtgcttctgcagagaccgagccttgggcagctgctgtgcccccggagtgggttcccatcattcagcaggatatccagagccagagaaaggtgaaaccacagccccccttgagcgacgcctatctgtcaggcatgccagccaaaaggcggaagttgaggtctgacattcagaagcgtctccaggaggaccctaattattccccgcaacgattcccgaatgcccaaagggcgttcgctgatgacccatag

SEQ ID NO: 180464 - DNA, 2712 bp, synthetic construct
  misc_feature 1..2712: note = Description of Artificial Sequence: Synthetic coding sequence
  source 1..2712: mol_type = other DNA
atggagcccaacgacagcaccagcaccgccgtggaggagcccgacagtctggaggtgctggtgaaaactctggactcccagactcgaacatttattgtgggggcacagatgaacgtgaaggagttcaaggagcatatcgccgcgtctgtgtctataccaagtgagaaacagcgactaatctaccagggcagagtgttacaggatgataagaagctacaggaatataacgtcggcggaaaggtgatccatctggtcgaaagagctcccccacagacccatttgccatcaggagcttcctccggaacagggagtgcaagcgctacgcatggaggcgggtcccctcctggtacgcgcgggcccggtgccagtgtgcatgatcgcaatgctaacagctatgtcatggttggtactttcaacctcccctcagacggatcagcagtcgatgttcacatcaatatggaacaggccccaatccagtccgaacctagggtgcgtttggttatggctcaacatatgattagggatatccaaactctactcagtcgcatggagtgcaggggtggccctcagccccaacacagtcagccaccgcctcagccaccggcagtcacacccgagccagtggctttgtccagccaaacttctgagcccgtcgaatctgaagccccgccgcgggaaccaatggaagctgaggaggtggaggagcgggctcccgctcaaaacccggagttaacacccggacctgcacccgctggcccgacacctgctccggagactaacgcgcctaaccacccatcccccgctgagtatgtggaggtgctgcaggaacttcagcgtctggagtccaggctgcaacccttcttgcaacggtattacgaagttttaggagcagcagctactactgattacaacaacaaccacgagggcagggaggaagatcagcggctaatcaatctggtgggggagtctctgagacttctggggaacacctttgttgcgctcagtgaccttcggtgcaatttggcttgtacacctccacggcatcttcatgtggtccgcccaatgtcacactataccacccccatggtgctgcagcaggcggctatccccatccagataaatgtcgggactacagtgaccatgacgggcaacggtacacgaccacctcctacccctaatgccgaggcacccccacctggccccggacaggcatcctctgtagctccttctagtactaatgttgagtcttcggccgagggagctccaccaccaggacctgcaccaccccccgccacttcacacccacgcgttattcgaatttcccaccagagcgtggagcccgtagtgatgatgcatatgaatattcaggattcaggcactcagcctggaggggtaccttccgctcctaccgggccactgggcccacctggccacggacagaccttgggacagcaggtgcctggtttccctactgcccctactagggtagtaattgctcgtcccacgcccccccaggccagaccttcccatcctgggggtccaccagtcagtgggacccttggggccgggctcggcacaaatgccagtttagcccagatggtatccggtctagtcggacagctccttatgcagcccgtcttggtcgctcagggtacacccgggtctcccggcggtctgggcctcgagagtctttcccccgaattttttacttcagtggttcagggggtcctctcttctctgctcgggtcccttggtgctcgcgcgggaagctctgaatccattgccgcctttatccagcgcctgagcggatccagcaatatcttcgagcctggcgcagacggagctctgggctttttcggggcactcctcagtctcctgtgccagaatttcagcatggttgatgttgtgatgttgctgcacggccattttcagcccctgcagcggctccaaccgcagttacggagcttttttcaccagcactacctcgggggacaggagcccaccccgtcaaatatccgtatggccacacataccctgatcacaggcctggaggaatacgtgcgggaaagctttagcctggttcaagtacagcccggtgtggacattattaggacaaatctggagtttctacaggaacagttcaattcaatcgctgcacacgtgctacattgtactgactcagggttcggagcccgacttctggaactatgcaatcagggattgttcgaatgcttagcacttaacctgcactgcctgggaggtcagcaaatggaattagccgccgtgatcaacggcagaataaggcgaatgtcccggggcgtaaatccttctcttgtatcatggctcaccacaatgatgggcctgcgactccaggtggtgttggagcacatgcctgtggggcctgatgccatcctgaggtatgtgcgtcgggtaggagacccacctcaacccttgcctgaggaaccaatggaggtgcagggagcagagagagccagtccagagcctcaggagtgggtgcctattatacagcaggatatccagagccagaggaaggtcaagcctcagccccctctgagcgatgcctatttatccggtatgcctgcaaaacgacgaaagttgaggtcagacatccaaaaaaggcttcaggaagaccccaattattccccacagaggttcccaaatgcccaaagagctttcgccgacgatccttag

SEQ ID NO: 180465 - DNA, 2712 bp, synthetic construct
  misc_feature 1..2712: note = Description of Artificial Sequence: Synthetic coding sequence
  source 1..2712: mol_type = other DNA
atggagcccaacgacagcaccagcaccgccgtggaggagcccgacagcctcgaagtattggtcaagacactggacagccagacacgcaccttcatagtcggcgcacaaatgaacgtaaaagagtttaaggagcacattgccgcctcagtctctattccgagcgagaagcagagactgatttaccagggacgggtgctgcaggatgacaagaagctacaggagtacaacgtaggcggtaaggtgatccacctggtggaaagggcccctccccagacccacctgccatcgggggccagcagcggcacgggcagcgcctcggccacacacggcgggggctccccgccgggcaccaggggaccaggggccagtgtgcatgaccgcaacgcgaactcctacgtgatggtgggcaccttcaatctgccctccgatggttcagccgtggacgtccacattaatatggaacaggcccctattcagagcgagcctcgggtgaggctcgtcatggcccagcatatgattagggatattcaaaccttattatctcgcatggaatgccgcggcgggccacagcctcagcatagccagcccccccctcagcctcccgccgtgactcccgagcccgtggccctgagtagccagacatctgagcctgtggagagcgaggcaccccctcgggaacccatggaagccgaggaggtggaagagagggcccctgctcaaaacccagaactgactcccgggccggccccggcaggtcccactccggcaccagagactaatgccccgaaccacccgtctcccgccgaatatgttgaagtgctgcaggagctgcaacggctcgagagcaggttgcagcctttccttcagcgctactatgaagttctgggtgccgccgcaaccactgattacaacaataatcacgagggccgggaggaggaccagcgactcatcaaccttgttggcgaatccctgcgacttttaggcaatactttcgtagcgctgagcgacctgcgctgtaacctcgcctgtacacctccccgccacctacacgttgtgcgtccaatgtcccactacacaacaccaatggtcctgcagcaagcagctatcccgatccagatcaatgtcggcactactgtgacaatgactgggaacggcacccggccgccacccacaccaaatgccgaggccccaccgcccgggcccggacaggcctcctctgtcgctccctcttccacgaacgtggagtcctcagccgaaggggcccctccccctggtcccgctcctccccctgctacgtcccatcctagagtaataaggattagccatcaatctgtggaacctgtagtgatgatgcacatgaacatccaggatagcggcacacaacccggaggagtcccttccgccccgaccggccccttaggcccccctggtcacggccagaccttgggtcagcaggtgcctggcttccccactgcacctacaagggtggtgatcgccagacccaccccaccacaggctagaccctcacatcctggaggccctcccgtttcagggacacttggagccgggctgggtactaacgcttctctggcacagatggtctcagggttggttggccaactcttgatgcagcctgtgctggtggcccagggcacacctggatcccctggggggttgggtcttgaatccctctctccggagttctttaccagtgtggtacaaggcgtactgtcttctctcctcggcagcctaggagcacgggcaggctccagcgagtccatcgccgcttttatacagcgcttgtctggatcttcaaacatctttgaaccaggggcagacggcgcccttggcttcttcggtgcgttactgtccttgctctgccaaaacttctctatggtcgacgtggtgatgctgttacacggacacttccagccactgcagagactgcagcctcagcttcggtcgttcttccatcagcactatcttgggggccaggagcctactccgtccaatatcaggatggccactcacacgttaatcaccggacttgaggaatacgtgcgcgaaagcttctctcttgtacaggtgcagcctggtgtggatattatccggaccaacctcgagtttctgcaagaacagttcaattcaatcgccgcccacgtgctgcactgcactgactcaggatttggagcccgcctcctggagctttgtaaccagggtctatttgagtgcctcgctttgaatctacactgtctgggaggacagcaaatggaattggcagccgtgataaatggccgcattcgccggatgtcaaggggggtcaacccatccttagtgtcctggctgactactatgatgggcctgcgtctgcaggtagtcctggagcatatgcctgtgggccccgacgccatactgaggtatgtacgacgcgttggtgacccacctcagccccttcccgaggagccaatggaagtccagggcgcggagagggcatctcctgagcctcaggaatgggttccgattatccagcaggacatccaatctcagagaaaggtgaaacctcaacctccgctcagcgatgcctacctatccggaatgcccgccaagaggcgtaagttacggtccgacatccaaaagcggctgcaagaggatcccaattatagtcctcagaggttccctaacgctcaacgggcttttgctgatgatccctag

SEQ ID NO: 180466 - DNA, 3489 bp, synthetic construct
  misc_feature 1..3489: note = Description of Artificial Sequence: Synthetic coding sequence
  source 1..3489: mol_type = other DNA
atggagcccaacgacagcaccagcaccgccgtggaggagcccgactctcttgaagttttagtgaagaccctcgatagccagacccggacttttattgtcggcgctcagatgaacgttaaggaattcaaagaacatatcgctgcttctgtgtcaattccctctgaaaaacagaggctcatttaccagggtagggtcctccaggatgacaagaagttacaggagtacaatgtgggagggaaagttatacaccttgtagagcgggccccaccccagacacatctgccctctggtgccagttctggtacagggtcagcgagcgcaacccatggaggtggcagcccgcccgggacccgtggaccgggggcgtctgtccatgatcgcaatgctaattcctatgtgatggtggggaccttcaacctcccctccgatggtagcgcggtcgatgtccatatcaacatggaacaggctcccatccagagcgagccccgggttagactggtcatggcacagcatatgatccgggacatccagactctcctgagccgcatggaatgtcgcggtggaccccagcctcagcacagccaaccaccccctcaaccgccagctgtgacacctgagcccgtcgctttgtctagccagacctctgagccagtagagtccgaggcccctcccagagagccgatggaagcagaggaagtcgaggagcgagcacccgcccagaaccctgaactcacacccggcccggctcccgcaggccctaccccagctccagagaccaatgccccaaatcacccatcgccagcagaatacgtcgaggtactgcaggaattgcagcggctggagtcccggctccagccctttctgcaaagatactatgaggtcctgggcgcggcagcgactactgactacaataacaatcacgaaggcagggaggaggatcagcgccttatcaacctggtgggggagtcactgagactgctgggcaatacctttgtagccctgtctgatctgcgctgtaatctagcttgcactccacctaggcatctgcatgtggtcagacccatgagccactatacaacaccaatggttctgcaacaggcagctatccccatccagatcaacgttggcaccaccgtaacaatgacgggtaacgggacgagaccgcccccaactcccaacgcagaggcaccccctccaggacccggccaggcttctagtgtagccccgtcctccacgaatgtggaaagctccgcagagggagcaccacctcccggcccggcaccacctccagcaacctcccatccccgggtgatacggatctcccatcagtctgtcgaaccggtcgttatgatgcacatgaacatccaggacagcgggacccagcccggcggagtaccctccgcccccacgggcccattagggcctccggggcatggacagaccttagggagtaccctaatccagcttccatccctgccgccagagttcatgcacgcagtggcccaccagatcacacatcaggccatggtcgccgccgtcgcaagcgccgccgccggacagcaggtgcctgggtttccaacagcacctaccagggtggtgatcgcacgcccaacccccccgcaggctagaccttctcacccgggtggcccccccgtaagtgggactctgcagggcgccggcctgggcacaaatgcttctctggctcagatggtttcaggactggtcggtcagctgcttatgcagcctgtactcgtcgcccagggtactcccggtatggcgccccccccggcacctgccacagccagcgcgtcggcggggaccactaacaccgcgaccactgctggcccggctcccggcggccctgcccagcccccacctacaccccaacccagtatggccgacttgcaatttagccaattactggggaacttactgggtccagcgggccctggagctggtggctctggagtcgcctctccaactatcaccgttgcgatgcccggcgtccctgcattcctgcagggtatgacagattttctgcaggcaacacagacagctcctccccccccccccccaccccctcctccgcctcccgcaccagagcagcagacaatgcctccgcctggaagcccgtctgggggggcgggttcaccagggggcctaggtctcgaatccctgtcacctgaattcttcacaagtgtggttcagggcgtgctatcttccctactgggatctctgggggctagagcggggagtagcgagagtattgcagcgttcatccagcgcctctccggcagctcaaatattttcgaaccaggagccgatggggcgctgggtttcttcggcgctctgctctcactactgtgccagaatttctccatggtggatgtcgttatgttacttcatggccattttcaacccttgcagcgactccagcctcaacttaggtccttttttcatcagcactacctggggggacaggagcctaccccatctaacatccggatggcaacacacacactaatcaccggactcgaagagtacgtgagggagagttttagcctcgttcaggttcagccaggagtcgacataatcaggacaaatctggaatttctacaggagcagtttaactccattgccgcccatgtgctccactgtaccgatagtggcttcggcgctagacttctggagctctgtaaccaagggctgttcgaatgtctggccctcaacttgcactgtttgggggggcagcaaatggagctggccgcggtgatcaacggccgtatacgaaggatgtcgcggggcgtgaatcctagtttggtgtcatggctgactaccatgatgggccttcgattgcaggtcgtccttgagcatatgcccgtaggcccagatgccattcttcgatatgtgcgaagggttggcgaccctcctcagccccttcctgaggagcctatggaggtccagggagccgagagggccagcccagagccacagcgggagaacgcctccccagccccaggcaccaccgccgaggaagcaatgtcacgaggccccccccccgcccccgagggcggcagtcgagatgagcaggacggcgctagcgccgagactgagccatgggccgcagccgtgcctcctgaatgggtgccaatcattcagcaggacatccagagtcaaagaaaggtgaaacctcagcctcctctgtccgacgcctacctgagcggaatgcctgcaaaacgccgtaagacaatgcagggggaaggccctcagctgctgctctcagaagcagtgagcagggctgccaaggcggctggggccaggccgttgacatctcccgaatccttatctcgggacttggaggcccccgaagtccaggagagctacaggcagcagttgcgatcagatattcagaagcgccttcaagaggatcctaactactcacctcagcgtttccctaacgcgcagcgtgccttcgccgatgacccatag

SEQ ID NO: 180467 - DNA, 3489 bp, synthetic construct
  misc_feature 1..3489: note = Description of Artificial Sequence: Synthetic coding sequence
  source 1..3489: mol_type = other DNA
atggagcccaacgacagcaccagcaccgccgtggaggagcccgactctctcgaggtgctcgtcaagacgctggatagccagactaggacctttattgtgggggcccagatgaacgtcaaggagttcaaggagcacatcgctgcttcggttagcattccttccgaaaaacagcggctgatctaccagggccgagtcctgcaggacgataagaagcttcaggaatacaacgtgggtggcaaagtcattcatctggtcgaacgagcccctcctcagactcacttgccgtctggggcgtcgagcggcaccgggagtgcctccgcaacacatggaggcggcagtccacccggcacacgaggccccggggcctcagttcatgatcgcaatgccaactcatacgttatggtgggaacttttaatttgccgagcgacggttctgctgtggacgtccacatcaacatggagcaggccccaatccaaagcgaaccacgggtacgcttagtgatggcccagcacatgatacgcgatattcagaccttactgtcacgcatggagtgccggggcggcccgcaaccccagcactctcagccaccgccacagccgccggctgtcactccagagcccgtcgcactgagcagtcaaacaagcgagccagtggagtctgaggcccctcccagggaacccatggaggctgaggaagttgaagagagggcacctgcacaaaaccccgagctcacccctggtcccgccccagccgggccaaccccagctcccgagacgaacgccccaaaccacccctcaccagccgaatatgtggaggtacttcaggagctacagcggttggagtcacggttacagccgttcctgcagcggtattatgaggtgctgggagccgcggccacaacggactacaataataatcacgaaggacgggaagaagaccagcgactaataaacttggtcggggagagcctcaggctgcttggaaacacttttgtcgctttgtctgacctcaggtgcaatctggcatgcacacctcctagacacctccacgtcgtgcgcccaatgagtcattatacaacacctatggttctgcagcaagctgctatacctatccagattaacgtcggcactacagtcaccatgacagggaacggtaccagacccccaccaactcccaatgccgaggccccacccccaggacctggacaagccagttctgttgctccctcatcgaccaatgttgagagctctgccgagggagcacctccccccggtcctgccccaccacctgctaccagtcacccccgggtgatccgtatttcccaccagagcgttgagccagttgtgatgatgcacatgaatattcaagattccggaacccaacctggaggcgtaccttccgccccaaccggtccgctcgggcctcctggccacggccagacccttgggtctaccttaatccagctcccttctctccctccagagtttatgcacgctgttgcccatcagatcacacaccaggcaatggtcgccgcggtggcctctgctgctgctggccaacaagttcccgggtttcctactgcacctactcgcgttgttatcgcacgacccacaccgcctcaggctcggccgtctcaccccgggggccccccggtctcaggaacattgcagggagcaggtttgggaacgaatgcctctcttgctcagatggtgagcgggctggttggccagctgctcatgcagcccgttctcgtggctcagggcaccccagggatggctccaccccccgcccccgctacggctagcgccagcgccggcaccaccaacacagccaccacagccgggcctgctcctggcgggcccgcacagcccccccccacaccccagcccagtatggccgatctgcagttttctcagctgctgggcaatctgctcggtcccgctggtcctggggccggtggccccggggtcgcaagccccacaatcacagtggcaatgccgggagtgcccgcctttttacaggggatgactgacttcctacaggctacccaaactgcgccacccccaccccctccgccgcctcctccaccccctgccccggaacagcagactatgcccccacctggctcgccgtctggaggggccggcagtcctggaggcttaggcctagagagcctgtctccagagttctttacgtccgttgttcagggcgttcttagctctcttctcggtagccttggtgctagagcaggcagctctgagagcattgccgcatttatccaacgcctgtccggatcctcgaacatatttgagcccggagctgacggggcgctcggtttttttggagcacttttatctctcttgtgtcagaatttttccatggtcgatgtggtgatgcttctgcatgggcacttccaaccgttgcagcggctccaaccccaacttcgctcattctttcatcagcattacctggggggacaagaaccaacaccatctaatattagaatggctacccacacgcttattacaggcctggaggaatacgttcgcgagtcatttagtttggtgcaagtacagcctggggtggacatcatccggactaacttagagttcctacaggaacagtttaactctatcgctgcacatgtgctccattgtaccgattcgggctttggtgcccggttgcttgagctgtgtaaccagggattattcgaatgcttggctctcaacctgcactgcctaggagggcagcagatggagctcgcggctgtgatcaatggtcgaattagacgtatgagccgcggcgtgaacccttccctggtcagttggcttaccacgatgatgggactgcgcctgcaagtggtgctggagcacatgccagtgggtccagacgcaatcctccgttatgttagaagagtcggggacccgcctcagcctctgccagaggagccaatggaagtccagggcgctgagcgcgcttccccagaacctcaacgagaaaacgcctctcccgcacccggcactactgctgaagaggccatgtctcgcgggccaccaccggcccctgagggaggttcccgggacgaacaggacggcgcttcagctgagacagaaccttgggctgccgccgtgcccccagagtgggtgccaatcattcagcaagacatccagagccagaggaaggttaagccacagcccccgctgtctgatgcctacctctccgggatgcctgccaaacggagaaagacgatgcaaggggagggacctcagctgctcctaagtgaggctgtaagcagagctgccaaggccgcgggggctcgaccacttactagcccagagtctttgtcgagagatttggaagcccccgaagtccaagagtcatacaggcagcagctgcggagcgatatccagaaacgccttcaggaagaccccaactactcaccgcaacgtttcccgaacgcacaaagggcctttgctgatgatccgtag

SEQ ID NO: 180468 - DNA, 3489 bp, synthetic construct
  misc_feature 1..3489: note = Description of Artificial Sequence: Synthetic coding sequence
  source 1..3489: mol_type = other DNA
atggagcccaacgacagcaccagcaccgccgtggaggagcccgactcccttgaagtccttgtgaaaactctcgactctcagactcggaccttcattgttggggcccagatgaatgtcaaggagtttaaagaacatatcgcggcctcagtgagcatacctagtgagaagcagcgtctgatctaccaggggagagtgttgcaggatgataaaaagctccaagagtataatgtcgggggaaaagttatccatcttgtcgagcgggctcccccacagactcacttgccatccggagcatctagcgggaccggcagcgctagtgcaacgcatggaggcggatccccacctggcacccgcgggcccggagcctctgtacatgatcggaatgccaatagctacgtgatggttggtacctttaatctgccctcagacgggtctgctgtggatgtacatattaacatggaacaggctccgatccagagcgaaccccgggtccgcttagtcatggcgcagcatatgatccgtgacattcagactttattgagccgcatggagtgtcgcggcggtccacagccacaacacagccagccgccaccacaaccacccgctgtcactccagagcctgtagcactgagctcccagacgtccgagcccgttgagagcgaagcacctccgcgggagcccatggaggcagaagaggtcgaagagcgcgcacccgcccagaacccagagctgacccctggtcctgctcccgcagggccaaccccagcaccggaaactaacgcacccaatcatccatctcctgctgaatacgttgaggtgctgcaggaactccagcggcttgagtctcgactccaaccctttctacagaggtactacgaggtactcggggctgcagcaaccaccgattataacaataaccacgagggacgcgaggaggaccaaaggctgatcaatctagtaggcgaaagcctccggttactaggaaatacttttgttgctctgtccgatttgcgctgtaacctcgcctgtactccaccacgccatctacacgttgtgcgccccatgagtcactacaccaccccaatggttctgcagcaggctgccatacctattcagattaacgtgggaacgacagtgacaatgacaggaaatggtaccagacctcctccaacaccaaatgctgaagcacccccccccggaccgggacaggcatcatcagtggctccatcctcaacaaacgttgaatccagtgcagagggggccccgccccccggcccagctccaccgcccgccacctcccatccccgtgtcatacgcatcagtcatcagtcggtggagcccgtggtcatgatgcacatgaatattcaggacagcggcacacagcctggcggcgtgcccagcgcaccgacaggccctcttggccccccaggacacggacagactcttggctccacactcattcagctcccctccctccctcccgaattcatgcacgccgttgcccaccagatcacacatcaggcgatggtagctgccgtcgcatccgcagcagccggccagcaggtcccggggttccccacagcccccactagagtggtcatcgcccggcctacacctccacaagcccggccatctcaccccgggggaccacccgtatctggcactttacagggcgcaggcttaggaaccaacgcctctctggcacagatggtttccggcttggttgggcagcttttaatgcagcccgtgctggtcgcccaaggtactcccgggatggccccaccaccagcccccgccacagcatccgcctccgctggaactactaacactgccaccaccgccggtcctgctcccggaggacccgctcagccaccaccgactcctcagccaagtatggccgacttacagttctcacagctgctcgggaaccttctgggccccgctggtccaggggctgggggctctggggttgcctccccaacaattacggtcgccatgccaggcgtgcctgcatttctgcagggaatgaccgacttccttcaggcaactcaaacagccccgccacctcctccccccccccccccacccccccctgcccctgagcaacagacgatgcctccacctggttctcctagtggtggtgcaggcagcccggggggattgggactcgaatctttaagccccgaatttttcacgtccgtggtccagggtgtactttccagtttactgggatcattgggggctcgggccggatctagcgagagcattgctgcttttatacagagactgagcggcagtagcaatatatttgagccgggagccgacggagcactcggcttcttcggagcactgctgtccctgctgtgccagaacttctcaatggtggacgtcgtcatgctcctccatggacatttccagccccttcagcgactccaaccacagctcagaagcttctttcaccagcactatctgggcggacaggagcctacaccatccaacatcagaatggcaacacacactctgattactggattagaagaatacgtgcgcgagtccttctccctcgtacaggtacagcctggtgtagatatcatcagaaccaacttggaatttctacaagaacagtttaatagcatcgctgcacatgtgctacactgcactgattccggcttcggtgccagactactggagctgtgcaaccaagggctgtttgagtgtctcgccctgaatctgcattgcttaggagggcagcaaatggaattggcggccgtgataaacggcaggattagacggatgtctcggggagtgaatccatctctcgtgtcctggcttacgaccatgatgggacttcgactgcaggtagttctcgaacacatgcctgtgggtccagacgccatcctgagatacgtgcgaagggtgggtgacccgccacaaccactgcctgaagagccaatggaagtgcagggagctgagcgcgcctcccctgagccacagcgcgagaatgccagtcctgcacctgggactacagccgaagaagctatgtcgagggggccgcctcctgcgcctgagggtggctccagagatgagcaagacggagctagtgctgaaaccgagccctgggccgcagctgtcccacccgaatgggtaccaatcattcagcaggacatccaaagtcagcggaaggtcaagccccaacccccactcagtgatgcctatctgtccggaatgcccgccaagagaagaaagactatgcaaggagaagggccccagctgcttctttcagaggctgtgtctcgggctgccaaggcggccggggcacgacctctgacgtcccctgagtctctgtcacgcgacctcgaggctcccgaagtgcaggaatcctacaggcagcagctgaggtccgatattcagaaacgcctgcaggaggatcctaattactcgcctcagcgttttcccaacgcccagcgggcatttgctgatgacccctag

SEQ ID NO: 180469 - DNA, 3234 bp, synthetic construct
  misc_feature 1..3234: note = Description of Artificial Sequence: Synthetic coding sequence
  source 1..3234: mol_type = other DNA
atggagcccaacgacagcaccagcaccgccgtggaggagcccgactctctcgaagtactcgtgaagactctggatagccagactagaaccttcattgtgggagcccagatgaatgtgaaggaattcaaggaacatatcgccgcttccgtatcaattccctctgaaaagcaaagattgatttaccaggggcgcgttctgcaggacgacaagaagttacaggagtataatgtgggaggcaaggttatacatctggtggagcgcgctcctccgcagacccatctcccatccggtgctagtagtggcacaggctccgcctccgcaacccacggaggtggaagcccccctggaacaaggggcccgggggccagcgttcacgaccggaacgctaactcctacgtgatggtgggcacctttaatctgccaagtgatgggtccgccgtcgacgtccacataaatatggagcaagcccctattcagagcgagccgcgcgtacggttggtaatggcacagcacatgataagggacatacagaccttactcagccgaatggaatgccggggcggcccacaaccacaacattctcagccccctccccagccccccgctgtcacacctgagccagttgccctgtcaagtcagacatcggaaccggtcgaaagtgaagcccctcccagggaacccatggaggcggaggaggtggaagagcgcgctccagctcaaaaccctgagctgacaccaggccctgctccagctggccctacacctgcgccggaaacgaatgcccctaatcacccttcaccagccgagtacgttgaagtgcttcaggagctgcagagactagagtcaaggctacagccgtttctccagagatattatgaggtgctaggtgcagccgcaacaacagactataataacaaccatgagggacgcgaagaagatcaaaggctaattaaccttgtcggggagagcctgcgcctcctaggaaacacatttgtggccctgtctgatcttaggtgcaatctcgcttgtacccctcctcgtcacctgcatgtggtgagaccgatgagccattataccacaccaatggttctccagcaagccgctattcccatccagatcaacgtagggaccactgtgacgatgactggtaatgggacaaggcccccacctaccccaaacgcggaggcccctccacccggacctggccaggcgtcttccgtggccccttcgagcaccaacgtcgagtcaagtgcagagggggctcccccaccagggcccgctcccccgcctgccacgtcccatcctagggttattcgcatatcacatcaatcggttgagcccgtggtgatgatgcatatgaatatacaggattcaggtactcaacctggaggtgtgccaagtgcccccaccggacccctcggtcctcccggacacggacagacgctgggacagcaggtacccggctttccgacagcacctacgagggtggtgatcgctaggcccacacctccccaagcccggccctcgcacccaggtggcccccccgtctcaggcacactacaaggagctggactgggcacgaacgcttctctcgcccaaatggtatctgggttggttgggcagctgctgatgcagcccgtactcgtggcccagggaactcctggcatggctccgcccccggcgccggccactgccagcgcctctgcaggcacaacaaacactgcaaccacagctggcccagcacctggcgggccagcccagcccccacctacgccccagccatctatggctgatctccagttcagccagctccttggaaatctcctgggacccgccgggcccggcgctggaggtccgggcgtcgcctcgccaaccattacagtggctatgccaggcgtgccggccttcctacaggggatgactgatttcctccaagccacgcagactgcccccccgccgcccccccccccaccaccacccccacctgcccctgaacagcagactatgccaccccctggttcaccgtctgggggggcaggctctcccggagggcttggccttgaatcactttcgcctgagttttttacgtctgtcgtgcagggcgttctgagttctctcctgggatcacttggagctcgcgctggttctagtgagtcaatagccgccttcatccaaagattgtccggctccagtaacatcttcgagcctggggcagacggagcgctggggttcttcggagctcttctgtcactgctgtgccagaatttttcaatggtggatgtggttatgttgctgcacgggcatttccagccccttcagcgcctgcaaccacagctccgatccttcttccatcagcactacctcggcggtcaggaacctacaccttctaacatacgaatggccacccatactctgatcaccgggttagaagaatacgtcagggagagtttttcccttgtgcaggtccaaccaggggtggatattatacgcactaatcttgagtttctgcaggaacagttcaattcaattgcggcacatgtgctgcactgcacagactcaggcttcggagcacggctgttggagttgtgtaatcagggcctgtttgagtgcctggcactcaatttacactgcctaggcggccagcaaatggaattagccgctgtaatcaatggacgcattcgacgcatgagtcggggagtcaaccctagcctcgtatcctggcttactactatgatgggccttcgactgcaggtcgttttggaacacatgcccgtcgggccagacgctattctgaggtatgtgcggcgagttggagacccaccccagcccctgcccgaagagccaatggaggtacagggcgctgaacgcgcaagcccagagcctcagagggaaaacgcctcaccagcacccggaaccaccgccgaggaggccatgagccgtggacctccacccgcccccgaagggggttccagggacgagcaggatggtgcctctgctgaaactgagccctgggccgccgcggtgccaccagagtgggtgccgatcatccagcaagacattcagtcccagaggaaggtcaaacctcaaccacctctctccgatgcatatctatccggaatgccagccaagaggcggaaactcaggtccgacatccagaagcgtctccaggaggaccccaattactctccccagagatttccaaacgctcagcgcgcctttgcagatgatccatag

SEQ ID NO: 180470 - DNA, 3234 bp, synthetic construct
  misc_feature 1..3234: note = Description of Artificial Sequence: Synthetic coding sequence
  source 1..3234: mol_type = other DNA
atggagcccaacgacagcaccagcaccgccgtggaggagcccgactctctcgaggtgcttgtgaaaacattggattcacaaacacgcacttttattgtcggagcacagatgaacgtcaaagagtttaaggagcatattgccgccagcgtctccatacccagtgaaaaacaaaggctaatttaccagggccgcgtcctccaggacgacaaaaagctccaggagtacaacgtgggcggaaaggtcattcatttggtggaacgggcaccgccccaaacccatctgccctcaggagctagctcgggtaccgggagcgccagcgcaacccacggaggcggatcccctcctggcactaggggtccgggggctagtgtacatgacagaaatgccaattcctacgtcatggtgggcaccttcaatctgcctagcgatggttccgcagtggacgtccatatcaacatggaacaagcacccatacagtcagagccccgggtcaggttagtgatggcccagcacatgatcagagatatccagactcttctttcgcggatggagtgccgcgggggcccccaaccccagcacagccagccccccccccaaccccctgctgtgacacctgagccagtggccctgagttcacagaccagcgagcccgtcgaaagcgaagcccctccaagagaaccaatggaggccgaagaggtggaggaaagggcgccagcacagaatccagagctcacccccggaccagcccctgcaggcccaacaccggctcccgagaccaatgcacccaaccaccccagcccagccgagtacgtcgaggttttacaggagctgcagaggttggagtcacggctccagccatttctgcagcgctactatgaggttctgggtgccgctgcaactactgactacaataacaaccacgagggaagagaagaggatcagaggctgattaatcttgtgggcgagtcactgcggctgctgggaaatacatttgtcgctctgagcgacctgcgttgcaacttggcttgcacgccacctaggcacttacacgtggtgcggcccatgtcccattacacaaccccaatggtcctccagcaggctgcaatccccatccagatcaacgtcggcacaacagttaccatgacaggaaacggtaccagacctccacccacacccaacgccgaagctcctccaccaggacccggacaggctagtagtgtcgccccctcctcaacaaacgtggaaagcagtgctgagggagcaccgccacccggacctgcccccccccctgcaacttctcaccccagagtgattcgaatttcccatcagtcagtcgaaccagttgtgatgatgcacatgaatattcaagactcgggaacacagcctgggggagtacccagtgcccccacaggacccctgggcccgcctgggcacggtcagacactggggcagcaagttcccggttttcctactgcacctacacgcgtggtcatcgctagacccacaccgccgcaggcaagacctagccacccgggcggcccccccgtgagtggaacgcttcagggggccggactgggcactaacgcttccttggctcaaatggtcagtggtctcgtcgggcaactcctcatgcagccagtcctcgtggcacaaggtactccaggtatggctcctcccccggccccagcaaccgccagcgcctccgctggcacaaccaatacagccacaacagctggaccagctcctggaggacccgcacagcccccacctaccccccagccgagtatggccgacttacagttctcgcagctcctcggtaatttactgggccctgccggcccgggcgccggcgggtctggcgtggcatctccgaccattaccgtagccatgcctggcgtgcccgccttcttacagggaatgacagatttcctgcaggccacccagacagcaccccccccaccaccccctcccccacccccacccccggcccccgagcaacagaccatgcctcctccgggtagcccttcgggcggagccggttcacccgggggcctggggcttgagagcctctccccagaattcttcacatcagtggtgcaaggggtcttgtccagtctgttgggaagcttaggggcccgcgccggcagttctgagagcatagccgctttcatccaaagactctcgggctcgtccaacatcttcgagcccggggcggatggggctcttgggttttttggcgcgttgctgtcgcttttatgtcagaatttctcaatggtggacgtggtaatgctgctgcatggtcacttccaacctctccagaggctccagcctcaactgaggtccttctttcaccagcactacttaggcggccaggagcctactcctagcaatatccggatggctacacacaccctgattacaggcctagaggaatacgtgcgcgagagtttctcattagtgcaggtgcagcccggagttgatattataagaacgaaccttgagtttttgcaggagcaattcaacagtattgccgctcatgttttacactgcacagacagcggatttggcgcccggctcctagaactgtgcaaccaaggcctattcgagtgtctggctctgaaccttcactgtttgggcgggcagcagatggagctggccgcagtgattaatggtaggataagacggatgagtaggggtgtgaacccatcgctggtgtcttggttgaccactatgatgggcctgcggctgcaggtggtgttggaacacatgccggttgggccggatgcgatactccggtacgtgagaagggtgggcgaccctccgcagcccctgccagaggaaccgatggaggtgcagggagccgaacgcgccagccctgagccccagagagagaatgccagccccgcccccgggaccaccgccgaagaggccatgtctcggggacctcctccagctcccgagggcgggtcacgggatgaacaagacggtgccagcgcggaaaccgagccatgggccgccgccgtgccgcctgagtgggtgcctattatacagcaggatatccagagtcagaggaaggtgaagccccagcctcctttgtcagacgcttatctgtcaggaatgcccgcaaagcgtcgtaagctccgcagcgacatacaaaaaagactgcaggaagatccaaactactccccgcagcgttttcctaacgcacaaagagcgtttgctgatgatccctag

SEQ ID NO: 180471 - DNA, 2712 bp, synthetic construct
  misc_feature 1..2712: note = Description of Artificial Sequence: Synthetic coding sequence
  source 1..2712: mol_type = other DNA
atggagcccaacgacagcaccagcaccgccgtggaggagcccgactcgctagaggtgctcgtgaagacacttgattcccaaactcgtacattcatagttggggcccagatgaacgtgaaggaatttaaagaacacattgccgcctccgtgtctatacccagcgaaaaacagagactgatataccagggccgggtactgcaagacgacaaaaagctgcaggagtataacgttggaggcaaggttattcaccttgtggagagagccccaccccagactcacctaccttctggcgcctctagtggcacaggtagcgcaagcgccacacacgggggaggctctcccccaggaacacggggccccggagcatctgtccacgaccgcaatgccaactcatacgtgatggtcgggacatttaacctacccagcgacggcagtgccgtggacgtgcatatcaatatggagcaggctcctatccagagtgagcccagggtccggttggtgatggcccaacacatgatccgagacattcaaaccctgctatcccgcatggagtgtcgtggcggcccacagccccagcatagtcagccacctcctcaacccccggccgtgacgcccgagcccgtcgctttaagttctcagacgagcgaaccagtggaatccgaggctcctccccgggagcctatggaggcagaggaagtggaagagcgggcacctgctcagaacccagaactgacgcccggtccagcccctgccggaccaacccccgcaccagaaaccaacgctcccaatcacccttcacctgctgaatacgtggaggttctccaggagcttcaaaggctggagtcgcgccttcagcccttcctacaacggtactacgaagttctcggggccgccgctacgacagattacaataacaaccacgaaggaagagaggaggaccaacgcctaatcaatctggtgggcgaatctctacgcctgttggggaacaccttcgtcgcactctccgacctgcggtgcaacttggcttgtacacctccgcggcatctacacgtggtgcggccgatgtcccactatacaactcctatggtgttgcaacaagcagccattcccattcagattaacgtgggaacaaccgtgactatgactggcaacgggactaggcctccacctacacctaatgcggaggcacccccgcccgggcccggacaggcttcgtctgtcgccccctcctcaacaaatgtggaaagctcagccgagggcgcacctccaccagggcctgctcctcctcctgcaaccagccacccaagagtgatcagaatttcgcaccaatcagtggagccggtcgtgatgatgcacatgaacattcaagactccggcacccagcctgggggagtgccttccgcaccaactgggccgctcggcccacccggccacggccaaacgctcggccagcaggtgccaggatttccaactgcccccactcgggtggtgatcgcgagacctacaccacctcaggctcggccctcccatcctgggggccctcctgtgtcaggaacactgggcgcaggcttaggcactaacgcatctctggctcagatggtcagtgggctggtagggcagttgttgatgcagccagtcctggtggctcagggcaccccagggtccccaggaggtctgggtctggagtccctcagcccagagttctttacaagtgtcgtacagggcgtgctgtcaagcctcctgggcagcctcggagcccgggccggatcctctgaatccatcgccgcattcatacagcggctgagtggcagcagtaatatattcgagccgggcgccgatggagcactggggttttttggcgcactgttgtctctactgtgtcagaatttctccatggtggacgtggttatgctattgcacggacactttcaacctctgcaacggctgcagcctcagctgcgcagcttcttccaccagcactacctgggcggacaagagcctactcccagtaatatcaggatggcaacacacactttgattaccggcctggaagagtacgtcagagaatcattttccctcgtgcaggtgcaaccaggggtagacattatcagaaccaaccttgaattcctgcaggaacagttcaatagtatcgccgcacacgtcctccactgcactgactctgggtttggagccaggcttctcgagctgtgtaaccagggtctcttcgagtgcctggccctgaacttgcactgcctgggaggccaacagatggagttggccgccgtcattaacggtagaatccgcagaatgtctagaggagtaaacccttctcttgtctcatggcttacaacgatgatgggacttagacttcaagtggtcctcgaacacatgccggtaggtccagacgctatcctgcgttatgtgcgccgcgttggagacccgcctcagccattgcccgaggaacccatggaggtccagggtgctgagcgcgcctcacctgagccccaggaatgggtaccaattatacagcaggacattcagagccagcggaaagtaaagccacagcctccgctgtccgacgcatacttaagcggcatgcctgctaaaaggagaaaactgcgcagcgatatacagaaacggctgcaggaagaccccaattattcacctcagcggtttcccaacgctcagcgggcttttgccgacgacccctag

SEQ ID NO: 180472 - DNA, 417 bp, synthetic construct
  misc_feature 1..417: note = Description of Artificial Sequence: Synthetic coding sequence
  source 1..417: mol_type = other DNA
atgaaggagtacagcggcttcgccggcgtgagccggccccggggcacgttctttcgcattcggggaagaggtcgagcacgaggggtcttcgccggcaccaataccggccctaacaactctaataccactttccagaagaggcctaaagaagaggagtgggatccagaatatacgccaaagtccaagaagtattttcttcatgatgatagagacgatggtgtggattattgggcaaagaggggaagaggcagggggaccttccagcgtgggcggggccgatttaactttaagaagtccggtagctcccctaaatggacccacgacaagtatcagggcgacggcatcgtagaagacgaagaagagacaatggaaaacaatgaggagaagaaggaccgtcgcaaggaggagaaggaatag

SEQ ID NO: 180473 - DNA, 2610 bp, synthetic construct
  misc_feature 1..2610: note = Description of Artificial Sequence: Synthetic coding sequence
  source 1..2610: mol_type = other DNA
atgggccggagcaacagccggagccacagcagccggagcaagagcaggtcacaaagcagtagcaggtcacgctctaggtcccactcaaggaaaaaaaggtacagatccagatcccggacctactcccggtctcgtagccgcgacagaatgtactcacgcgactatcggcgggactacagaaataatcggggcatgcggaggccatacggctaccgaggccgcggtcgtgggtactaccagggaggcggaggccgataccatcggggcggatatagacccgtctggaaccgccgacatagtaggtcacccaggcggggccgatctcggagccgttcacccaaacggcggtcagtctcttcccaacggtctcggagtcgcagccggcggagttaccggtcctcaaggagcccacgctcttcctcatcccgctcatcctctccatactctaaaagcccagtctctaaacggagaggcagtcaagaaaaacagacaaaaaaggccgagggcgagccgcaggaagaatcaccgctaaagagtaaatcccaagaggagccaaaagatacgtttgaacacgatcccagcgaatcgatcgatgagttcaataagtcatctgcaacctccggggatatctggcctggtctctcggcctacgacaacagcccacgcagcccacatagcccatctccaatagcaacacctccttctcaatcctcttcctgctcagacgcgcccatgctcagtaccgtccactcagcaaagaacacaccctcacagcacagccattcaatccagcattcccctgaaaggagtgggtctgggtcggtcgggaatggctccagccgctattctccttcccaaaattcacccattcatcacattccctcccgacggagtcctgcgaagactatcgccccccagaacgcccctagagatgaaagcagaggacgttcatctttttaccccgatggcggcgatcaggagacggccaaaaccggtaagtttctgaaaaggttcaccgatgaagagagtcgggtctttctgctcgaccggggtaacaccagggacaaggaggcatcaaaggagaagggtagcgagaagggtagagccgagggggaatgggaggatcaggaagctctcgactacttctcagataaggaatctggcaagcagaaatttaacgactccgagggagacgacaccgaggaaaccgaagactatcgtcaattcagaaagtcagtgcttgctgatcagggaaagtcgttcgccaccgcttcccaccgcaacacagaagaggaaggattgaaatacaagtccaaagtttcattgaagggtaatagagaatcagatggctttagagaggagaagaattacaagctcaaggagaccggatacgtcgttgaaagaccttcaaccactaaagataagcacaaagaggaagataagaatagtgaaaggatcaccgtcaaaaaggagactcagtcccccgagcaggttaagtccgagaagctgaaggatttattcgattactctcccccgctgcacaaaaacctggacgcccgggaaaaatccacgttcagagaggagtctccgctcagaatcaaaatgattgcctctgactcccaccgcccagaggttaaattgaagatggctcctgtccccctggacgattccaaccggccagcgtccctgactaaggacaggctcctggcaagtaccctcgttcactcggtcaagaaggaacaggaatttcgttctatctttgaccatatcaagttaccacaagcgagcaagagtacatcagaaagcttcatacaacacattgtctctcttgtgcatcacgtaaaggagcagtacttcaaaagcgctgccatgactctcaatgaaagattcacctcgtaccagaaggccaccgaggaacactccactaggcagaagtccccagaaattcataggcgcatcgacatatccccctctacattgaggaaacacacccgccttgccggggaagagcgggtattcaaggaagagaaccagaaaggggataaaaaattgaggtgcgacagcgcggacctccgccatgacattgacagacggcgtaaggagagatccaaggagagaggcgacagtaaagggagccgcgagtcatcggggtcacggaaacaggagaaaacaccaaaggactacaaggagtataaatcttataaagacgattcaaaacataagcgggagcaggatcactctcggtccagttccagctctgcctccccctcgtcccctagctcccgggaagaaaaagagagcaagaaggagagggaggaagaatttaaaactcatcacgagatgaaagaatactctggtttcgcaggggtgagtaggccccgggggacgttccacgatgatcgcgatgacggcgtggattactgggctaaacggggcaggggccgtggcacatttcagagaggcaggggcagattcaattttaagaagtccggcagttcccccaagtggacgcatgacaaataccaaggcgatggcattgtcgaggacgaagaggaaacaatggagaacaatgaagagaagaaggacaggcgtaaagaggagaaggagtag

SEQ ID NO: 180474 - DNA, 2610 bp, synthetic construct
  misc_feature 1..2610: note = Description of Artificial Sequence: Synthetic coding sequence
  source 1..2610: mol_type = other DNA
atgggccggagcaacagccggagccacagcagccggagcaagagcagaagccagtcctctagccggtcgcggtcaagaagccatagccgcaagaaacgctaccgaagtaggagccgcacctacagtaggagccgaagtagagaccggatgtacagccgcgattatagacgcgattaccgaaataatcgagggatgcggcgaccctatgggtacagaggcagggggcgaggatactaccagggaggaggcggtagatatcaccgcgggggctataggcctgtctggaacagaagacactcccggtcccctcgccggggccgatcaagatcgcgcagtcccaagagaaggagcgtctctagccagcgctctaggtcaagaagtcgcaggtcttaccggagttcgcgctctccccgctcaagtagttctcgctcttctagcccttattcaaaaagccccgtttccaaacgaagaggctcccaggagaagcagaccaaaaaggctgaaggggaacctcaggaagaatctccgcttaagtcaaaatcgcaagaggaacctaaagacactttcgagcatgacccctcagagtccatagacgagttcaacaaatcctcggcaacttcaggcgatatctggcctggattaagcgcctatgataactcaccgcgcagtccacactctcctagcccaatcgctactcctccatcacagagtagcagttgcagtgacgctcctatgctatctaccgtgcactcggccaaaaatacccccagccagcatagccatagcattcaacacagtccagagcgctctggatccgggagtgtcggaaatgggtcttcaagatattcgccctcccagaatagtcccattcaccacataccttctcggcggtcccccgcgaagacaatagcaccgcagaacgctcctcgcgacgagagtcgggggagaagttctttctatccagatggcggcgatcaagagactgccaagacaggcaagttcctcaaacgctttacagatgaggaatcaagggttttcttgctcgataggggcaacactagagataaggaagccagtaaagaaaaggggtccgagaagggacgagctgaaggtgaatgggaagatcaggaggcattagattacttctcagataaggaaagcgggaaacagaagtttaatgattccgaaggagatgatacggaggagactgaggattacagacaatttcgcaagtctgtgctagctgatcaaggaaaaagcttcgcaaccgcctctcaccgtaacaccgaagaggagggtctgaaatacaagtcaaaggtgtcgctgaaaggaaaccgggagtcagacggatttagggaggaaaagaactacaaattgaaagaaactggttacgttgtggagagaccctcgacaacgaaggataagcataaggaggaggacaaaaactcagaacgcatcaccgttaagaaggaaacgcagtctcctgagcaggtcaaaagtgagaaactgaaggacctattcgactactctcccccactgcacaaaaatctcgacgccagggagaaatcaacttttcgggaagaaagcccactaagaataaaaatgatcgccagtgacagtcatcggcctgaggtcaagctgaagatggcacccgtaccactcgacgattcaaataggcctgccagcttgacgaaggatcggcttctggcgagtactttggtgcactctgtgaagaaagaacaggagttcaggagcatcttcgaccacattaagctcccacaggcatctaaatctacatccgagtccttcatacagcacatcgtaagcctggtgcaccatgtgaaggaacagtactttaaaagtgccgccatgaccctcaacgaacgcttcacctcataccagaaggcgaccgaagagcactccacgaggcaaaaatcccctgaaatccaccgacggattgacatctctccgtcaacgcttcggaagcacaccagactggcaggggaagaacgcgtgttcaaggaagagaatcagaaaggggataagaaattgaggtgtgattccgctgacctgaggcatgatattgataggcgtaggaaagaacggagtaaggagaggggagattcaaagggctcaagggagtcttctggtagtagaaaacaagagaagacacccaaagattacaaggagtacaagtcctacaaagatgactcaaagcacaagagagaacaggatcatagccggtcttcctcatcctccgcttcaccatctagtccctcaagccgagaggaaaaagagtcgaaaaaagagcgggaggaagagtttaagacccatcacgaaatgaaggagtactccggatttgccggcgtgtcaagaccccgtggaacctttcacgatgatcgtgatgatggggtcgactattgggccaagcgtggcagaggtagaggaacatttcagcggggccgcggccgcttcaactttaagaagagcggaagctctccaaaatggacgcatgacaagtatcagggagacgggattgtggaggacgaggaagagacaatggaaaataatgaagagaaaaaagacagaaggaaggaagaaaaggaatag

SEQ ID NO: 180475 - DNA, 2757 bp, synthetic construct
  misc_feature 1..2757: note = Description of Artificial Sequence: Synthetic coding sequence
  source 1..2757: mol_type = other DNA
atgggccggagcaacagccggagccacagcagccggagcaagagccggtctcagtcttcttcccgctctcgcagcagatctcattcacggaagaagaggtaccgctccagatcacgcacctactccagatctaggtcacgcgacagaatgtacagcagagactaccgaagggactacaggaataataggggcatgcgaaggccgtatgggtatcggggtcgaggcagagggtattaccagggcgggggcggccggtaccatcgaggcggttatagacctgtatggaacagacgccatagtaggtcccccaggagaggccgatcaagatcccggtctccaaagaggcggtccgtgtcctcacaaaggagcaggtctcgaagccgacggagctatagatcaagccgtagcccccgctcctctagctccaggtcttcctctccttactccaagtcccccgtgtcaaaacgcagaggcagtcaagagaaacagactaagaaggccgaaggcgagcctcaggaggagtcccctcttaaatctaagtctcaggaagaacccaaggataccttcgagcatgacccatcagaatctatcgacgagtttaacaagtcgagcgcgacctcaggtgatatctggcccggcctcagtgcatatgataatagtcccaggtctcctcattctcctagccctattgccacaccccccagccaatcatctagctgtagcgatgcgcctatgctgtcaaccgtccacagcgccaagaacaccccatcacagcattcgcactcaattcaacactctcctgagagaagtggatccggctctgtggggaatggttcgagtaggtattccccttcccagaattcaccaattcatcacataccatccagaaggagcccagccaagacaatagcaccccagaacgcaccccgggacgagagcagggggcggtccagcttctatcctgatggcggggatcaagagacagctaaaacgggaaagtttctgaagagattcactgacgaggagagccgggtgttcctgctggacagggggaatacacgggacaaggaagcctctaaggagaagggatcagaaaaaggaagagctgagggtgagtgggaggatcaggaagcattggactatttcagcgacaaagagtctggtaagcagaaattcaacgatagcgaaggcgacgataccgaagaaaccgaggattatcgacagttccgcaagtccgtgttggctgaccaaggcaagtcatttgccactgcttcccacagaaacactgaggaggagggcctgaaatataagtccaaggtgagcctgaaaggaaatagggaaagcgacggcttcagagaggagaagaactataagcttaaagagacaggatatgtagtcgaacggccgagtaccactaaggataaacacaaggaggaagacaagaacagcgagcggataaccgtgaagaaggagacacaatctcctgaacaggtgaagagcgaaaaactaaaggatctttttgactactccccccctctgcacaagaatctggacgccagagagaagagcacctttagggaggagtcccctttgcgcatcaagatgatcgcttccgactcccaccgacctgaggtcaagctcaagatggctccagttcctctggatgacagtaatagacccgcatctttgacgaaggatagattgcttgcctctaccctggtccacagtgttaagaaagagcaagagtttagatccattttcgatcacattaagctccctcaagcaagtaagagtaccagcgagagttttattcagcacattgtatcactggtccaccacgtgaaggagcagtacttcaagtccgcggccatgacgttaaacgagaggttcacctcttaccaaaaggccactgaggagcacagcaccaggcagaagtctcctgaaatccaccgacggatagatataagtccgtctactcttcgcaagcacactcggctcgccggcgaggaaagagtgtttaaggaggaaaaccagaagggagacaagaaactgcgatgtgacagcgccgatctcaggcatgatatcgaccggcgacgcaaggaacgcagcaaggagagaggcgattcaaaaggtagccgcgagtctagcgggagcagaaaacaggaaaaaactcccaaggactataaggaatataaatcctataaagatgacagcaagcacaaacgtgaacaggaccattcacgcagcagtagctcctcagctagccccagtagcccaagcagccgggaagagaaagagtcgaagaaggaacgagaggaagagttcaagactcatcacgagatgaaagaatacagcgggttcgccggcgtaagcaggccccgaggtaccttttttagaatcagaggacggggcagagcacgcggcgtgttcgcagggacgaataccggacctaacaacagcaataccacattccaaaaaagaccaaaagaagaggagtgggaccctgagtacacaccaaagagcaagaaatacttcttgcatgatgacagagacgatggcgtcgactattgggctaagaggggccgcggtagagggacgttccagcgtggccggggtcgttttaacttcaagaagtccggctccagcccgaaatggacacacgacaagtaccagggcgatggaatcgtggaagatgaggaagagactatggagaataatgaggagaagaaggacaggcggaaggaggagaaagagtag

SEQ ID NO: 180476 - DNA, 2244 bp, synthetic construct
  misc_feature 1..2244: note = Description of Artificial Sequence: Synthetic coding sequence
  source 1..2244: mol_type = other DNA
atgggccggagcaacagccggagccacagcagccggagcaagagccgcagtcagtcaagctctagatctaggtcacgcagtcactccaggaagaaaagatatagttcaagatctcgcagccggacctacagtcgctctcggtctcgcgataggatgtactcccgagactaccgccgcgactatagaaataatcgtggaatgcggcggccctatggctatagaggcaggggacgtggttactatcagggcggcggcggccgatatcacagaggaggctaccgcccagtgtggaatcgacgtcacagccgatcccccagaaggggacgctctaggtctagatcccccaaaaggaggagtgtttccagccagcgctcccggtctcgcagtcggcgctcatatcgatccagccggagcccacgcagctcctcttcaaggagttcatcgccatactctaagagtcctgtaagcaaaagaagaggaagccaggagaagcaaaccaaaaaagctgagggcgaacctcaggaagaatcacctctcaaatctaagtcccaagaagagccaaaggataccttcgagcacgatccttcagagagcatcgacgagttcaacaagtccagtgcaacaagtggggatatatggcccggattgagcgcctatgataacagtccccgttctcctcactctccgtctcccatcgcaactccaccctctcaaagctctagctgttcagatgctcccatgttaagcacggtgcactccgcaaaaaacactccgtctcagcacagccatagcattcagcactcaccagaacggtctggatcggggtcagtggggaatggctccagcagatattccccatcccagaactcccccatccatcatattccctcacgccggagcccggcaaagacaattgctccgcagaacgctcctcgcgatgagtctcgcggtaggagttccttttatcctgatggcggcgaccaggaaacagccaagacagggaagttccttaaatccccccccctgcataaaaacttagacgctcgcgagaaatctacgttccgcgaagagtctcccctccgaatcaagatgattgctagtgactcgcataggcccgaagtgaaactaaagatggctccggtgccactggatgattcaaaccgccctgcctctctgaccaaggaccgactcctcgcctcgaccctcgttcactccgtgaagaaagagcaggaattcaggtccatcttcgatcacatcaagctgccacaggcatccaaaagtacaagtgagtctttcatccagcatattgtttccttggtgcatcatgttaaggaacagtattttaaatcagcagccatgaccttgaacgaaaggtttacctcctatcagaaggctacagaagagcatagtactcgacagaagtcccccgaaatacatcgaaggatcgacatatcccctagcaccctgcgtaagcacactcggctcgccggtgaggagcgagtcttcaaggaggagaaccagaagggcgacaagaagttaaggtgtgactccgctgatttacgccacgacattgaccgaaggcgaaaggagcgctctaaggagaggggagacagcaaagggagccgcgagtcgtccggctccagaaaacaagaaaaaactcctaaagattacaaggaatacaaatcttacaaggacgactctaaacataaacgggaacaggaccactcccgcagctccagtagcagcgcatcaccgtcctcacccagcagtagagaagagaaagagtccaaaaaggaaagagaggaggagtttaagacccaccatgagatgaaggagtacagcggtttcgctggtgtcagtaggccacggggcactttcttcagaatccgcggaagaggacgggcaaggggtgtgtttgcaggcaccaacactggccctaataacagcaacacaacatttcaaaagcgacctaaagaggaggagtgggatccagaatacacacctaaaagcaagaaatatttccttcatgacgatcgagatgacggcgtcgattactgggcaaagagagggagagggcggggcactttccagcgcggaaggggacggtttaattttaagaaatctggctccagccccaaatggacccacgacaagtaccagggggacggcattgtggaggatgaggaagaaacgatggaaaataacgaggaaaagaaggatcgccggaaggaagaaaaggagtag

SEQ ID NO: 180477 - DNA, 2763 bp, synthetic construct
  misc_feature 1..2763: note = Description of Artificial Sequence: Synthetic coding sequence
  source 1..2763: mol_type = other DNA
atgggccggagcaacagccggagccacagcagccggagcaagagcaggagccagagctcaagccgcagccgcagtagatcgcactcacgcaaaaagcgttactcaagtagatctaggtcacggacttattcacggtcccgttctcgggaccgcatgtacagtcgagactatagacgtgattaccggaacaaccgcggcatgaggcggccatacggctacaggggccgcggccgaggatactatcagggcggcggcgggaggtatcatagaggtggctatcgccccgtatggaataggcgacactcacgcagtcctcggcgcggccgcagccgcagtcggtctcccaagagacgttctgtctctagccagaggagccgctcgcgcagtaggcgcagctaccgctctagtcgatcaccaagatcctcgtccagccgtagcagctctccgtatagtaaaagccccgtgagtaaaagacggggatcacaggaaaaacagaccaaaaaagcggagggggagccacaggaggaatccccactcaagtcaaaaagccaggaagagccaaaggacaccttcgaacatgacccgagcgagagcatcgatgaatttaataaatcatccgctactagcggggatatctggccaggcctttccgcatatgacaactcccccagatctcctcacagtcccagtccaatcgccactcccccttcccagtcatcttcctgcagcgacgctcccatgttgagtacagttcattccgcaaagaatactccctctcaacacagtcattctatccagcacagccctgaacggtccggctccggttccgtgggcaatggttcttccaggtattctccatctcagaattcacccatccaccatatcccctcgagacgctcaccagccaagacgatcgccccacagaacgccccaagggacgagtctagggggcgctcaagcttctaccctgacggaggagatcaagagacggccaagacaggtaagttcctgaaacggttcactgatgaggagagccgggttttcctgcttgatagagggaacactcgggacaaagaggcttccaaggagaagggcagcgagaagggccgcgccgaaggcgaatgggaagatcaggaagcactggattatttctccgacaaggaatctggaaagcagaaatttaacgattccgaaggagatgatactgaagaaacagaagactaccggcagtttagaaaatcagtgcttgctgaccaggggaaaagcttcgcaacagcttctcaccggaacaccgaggaggaaggcctgaagtacaagtctaaagtgtccctcaaaggtaaccgcgaatccgatgggtttagagaggagaagaactataagctgaaggaaaccggctatgtggtggagaggccatccactaccaaggataaacataaagaagaggacaagaactcagagcggattacggtgaagaaagagacccagagcccagagcaggtgaaaagcgagaaattaaaagacctttttgactactctcccccattacacaaaaatctcgatgccagagagaagagtaccttcagagaagaaagcccactgaggatcaaaatgattgccagtgacagccaccgcccagaggtcaaactgaagatggcgccagtaccactcgacgactctaatagacctgccagcctgacgaaggatcgcctcttagcaagcaccctggtgcactctgtaaagaaagaacaagagttccgtagtatcttcgaccatataaaactgccccaggccagcaaatctacgtccgaatcttttattcagcatatcgtgagtctcgtgcatcacgtgaaggaacagtactttaagtccgcagcaatgacccttaatgaaagattcacaagctatcagaaggccacagaggaacactctacccggcagaagagccccgagatccacagaagaatcgacatttctccttctacactgaggaagcacacaagattggcgggggaggagagagtatttaaggaagagaatcagaagggagacaaaaaactacgctgcgattccgcagacctgcggcatgacatcgaccgacgccgcaaggagcgctcaaaggaaagaggagactcgaagggtagtagggagtcctccggatcccggaagcaggaaaagacccctaaagactataaggagtacaaatcctacaaggatgactccaaacataagcgggaacaagaccactcaaggagttcctctagcagcgcctcccctagttctccttcttctcgcgaagagaaagagtcaaaaaaggaaagagaggaggaattcaagacacaccacgagatgaaggaatatagtgggtttgcgggcgtttcacggccaagaggtactttcttccggatccgcggccgcgggagggccagaggggtgtttgccggcacaaatactggtccaaataattctaataccacatttcagaaacggcctaaggaggaagaatgggaccccgaatacacacccaaaagcaagaagtactttttgcacgatgacagggacgacggcgtcgactactgggccaaaaggggaagagggcgcggcacgttccagagaggccgtggccgcttcaattttaagaaatccggcagctctcccaaatggacccatgataaataccagggcgatggcatcgttgaggacgaggaagaaaccatggagaacaatgaggagaagaaggaccgcagaaaggaggagaaggaatag

SEQ ID NO: 180478 - DNA, 531 bp, synthetic construct
  misc_feature 1..531: note = Description of Artificial Sequence: Synthetic coding sequence
  source 1..531: mol_type = other DNA
atgggccggcccgccggcctgttcccccccctgtgccccttcctgggatttagacctgaagcgtgctgggaacgtcatatgcagatcgagagggccccctccgtgcccccttttcttcgctgggccgggtatagacccggcccagtgcggcgacgcggaaaggtagagctgataaagttcgtccgagtgcagtggaggagaccacaagtagaatggaggagacgacgatggggacccggccccggggcatccatggcgggatccgaggagctcggcctgcgcgaagacactctaagggtgctggcggcctttctgaggcgtggtgaagctgcggggagcccggtgccgaccccgccgcgcccttcatattctcgtcttctttgtttcggaggacctgctgctgggacagcaggtcctcgcgccgccgagatatccgctcagccacgaatcacaggctccccgattgaccgggagggctcacacaccgctgaagcgggcgggccggccggtggcggaggccgaagccactag

SEQ ID NO: 180479 - DNA, 1005 bp, synthetic construct
  misc_feature 1..1005: note = Description of Artificial Sequence: Synthetic coding sequence
  source 1..1005: mol_type = other DNA
atgggccggcccgccggcctgttcccccccctgtgccccttcctgggctttcgccccgaagcatgctgggagcggcatatgcagattgagagggcccccagtgtgccacctttcctccggtgggcaggctacagacccgggccagtcaggagacgtggcaaggtggagttgattaaattcgttagggttcaatggagacggcctcaggtagagtggcgccgcagaagatggggccccggacctggtgcatctatggccggcagtgaggaactcggtctgcgagaggatacgttgcgggtccttgcagcgttcttgcgaaggggggaggctgcaggatctccggtgcccacaccacctagaagtcctgcccaagaggaacctacagattttttaagccgcttgcggagatgtttaccttgttctctcgggcgtggtgccgcaccaagcgagtctcctcgcccttgtagcctacctatccggccttgctatgggctggaacccggtcctgcaacccccgacttttatgcacttgtggctcagcgccttgaacagttagtgcaggaacagttaaaatctccgccaagccccgagctgcaagggcctcccagtaccgaaaaagaggcaatattgcgccgcttagtcgcactgcttgaggaggaagctgaggtcattaaccagaaactggcttctgacccggcattgagaagcaaactggtgcggctttccagtgactcattcgctcggctggtggaactgttctgttccagggatgactcatctcgccccagtcgcgcttgcccaggccctcctccaccttcccctgaacctctagctcggctggccctcgccatggaactttcgcgaagagtggctggtttaggggggaccctagcagggctgagcgtcgagcacgtccactctttcacaccttggatccaggcccatggagggtgggaaggcatactggccgtttctcctgtcgatctgaacctgcctttggactag

SEQ ID NO: 180480 - DNA, 1002 bp, synthetic construct
  misc_feature 1..1002: note = Description of Artificial Sequence: Synthetic coding sequence
  source 1..1002: mol_type = other DNA
atgggccggcccgccggcctgttcccccccctgtgccccttcctgggtttccggccagaggcttgctgggagaggcatatgcaaatcgaacgcgcccctagcgtgcccccgttcttacggtgggccggttatagaccgggtccggtcaggagaagaggtaaggtggaactcatcaagtttgttcgagtccagtggcggcggccccaggtggagtggcgcagaaggagatggggcccaggcccgggcgccagcatggcaggctcggaagagctaggcctacgggaagatacactgagagtgttggcagccttcctaagaagaggggaggctgccggaagccctgtccccacacccccatctccagctcaggaggaacctaccgactttttgagcagattgaggcgctgcctcccatgttctctgggacggggcgccgcgcctagcgagagtccccgcccatgttcacttccgatacgtccatgctatggactggagccgggacccgcgacccccgatttttatgccctcgtagcacagaggctggagcagttggtccaagaacagttaaaaagtccaccctctcctgagctccaaggaccacccagtaccgagaaggaggccatactgagacggctagtggccctgctggaggaagaagccgaggtcattaatcagaagttggctagcgacccagccctgagatccaagctcgtgagattgtcttccgactctttcgcacggttggtggagctgttctgctctcgggacgattcatctaggccatccagagcctgcccaggaccgccgcctccatcccccgagccactcgcccgactagcactggccatggagttaagccgtagagtcgcagggttgggcggtaccctcgcagggttgtcagtggaacatgtgcacagctttacaccctggatccaggctcacgggggctgggaggggatcctggctgtgtctcctgttgatctcaatttacccctagattag

SEQ ID NO: 180481 - DNA, 5166 bp, synthetic construct
  misc_feature 1..5166: note = Description of Artificial Sequence: Synthetic coding sequence
  source 1..5166: mol_type = other DNA
atgctgagcgccacccccctgtacggcaacgtgcacagctggatgaattcagaacgcgtccggatgtgtggggcaagtgaggataggaagattttggtaaacgacggcgacgcctccaaggcccgcctcgaactgagggaagagaaccctctcaatcataacgtggtcgatgccagcacagctcaccgcatcgatgggcttgccgcattgagcatggatcgaaccggcctgattagagagggactgagagtgccggggaacatcgtgtactctagcctttgcggcctgggcagcgagaaaggtcgggaggctgcaacatctacattaggtggtttggggttctcaagcgaacgcaaccctgaaatgcagtttaagcctaacacccccgaaactgtggaagctagtgctgtctccggcaaaccgccgaatggcttctctgctatttacaagacacccccaggcattcagaagagtgccgtggctacagcagaggcgctcggcctggatcgccctgcgtcagataagcagagtccactcaacattaatggggctagctacctaaggctgccctgggtgaatccctacatggaaggcgcaacgcctgcgatctacccgttcctggacagccctaacaaatacagcctgaatatgtacaaggcacttctgccgcagcagtcctattctctcgctcagccactgtacagtccggtgtgcaccaacggtgagcggttcttgtatctgccacccccccactatgtcggccctcacattccctcctcgttggcctcaccaatgcggctcagcacgccctcagcctctcccgcaattcctcctcttgtccactgcgccgataaatccctgccctggaagatgggcgtctctccgggtaatcccgtggacagtcatgcatatcctcacattcaaaacagtaagcaacccagagttccatcggcgaaggctgtgaccagtggcctgcccggcgacacagcactgctactgcccccctcacctaggcctagtcctcgagtgcatctcccaacgcagcctgcggcggacacctacagcgagtttcacaagcactacgctcgtattagcacttccccatccgtggcattatcaaagccctatatgactgtgtcttccgagtttcccgctgcccggctttcaaatggcaagtaccccaaagccccggagggaggagaaggtgctcaacctgtccccgggcatgcccgcaaaactgctgtacaggaccggaaagatgggagcagccctccattgttggagaaacagacagtgacaaaggacgtaacagacaagcccctcgatctgtcaagtaaagtggtagatgtggatgcatctaaggccgatcacatgaagaaaatggcgccaaccgtgctcgtccatagccgggccggctcggggttggtccttagcggtagtgagatacccaaagagactttgagtccgccaggcaacggctgtgccatctaccggtcagagatcatatccaccgccccaagctcttgggtggtgccagggccttcacccaatgaggaaaacaacggaaagagtatgtcacttaaaaataaagccctcgactgggctatcccgcagcagaggtctagttcttgccctaggatgggaggtacagatgcagtgatcactaacgtttctggctctgtcagctccgcaggtcgcccagcctccgccagcccggcccccaatgctaacgctgacggaactaagacctcgcgttcttctgtggaaaccaccccctcagtgattcaacacgtcggacagcctccagcaaccccagcaaagcacagttccagcaccagctccaaaggtgccaaagcatccaaccctgaacccagcttcaaggcgaatgagaatgggttgccaccctctagcattttcctttcgcctaatgaggcattcagaagcccccccatcccctatcctcgctcttatctcccatacccagctcccgagggaatcgctgtctcccccctgagccttcacggaaagggacctgtgtacccccatcccgttctcctacccaacgggagcctgttccctggccatctggctcccaagcccggattgccctacggcctgcctactggaagacccgaattcgtaacataccaggatgcgctagggttaggaatggtccaccccatgctgattcctcatactccaattgagattacaaaagaggaaaagcccgagcgacggtctcgttcacacgaacgggcgaggtacgaagatcctacattgcggaataggttcagcgagattttagagacttcatctactaagctccaccccgatgtgccaactgacaagaacctgaaacctaatccaaactggaatcaaggaaagaccgtggtcaagtccgataaattggtttatgtcgatttgctccgtgaagagcccgacgcaaaaacagacactaatgtatctaaacccagctttgctgcggaaagtgtcggtcagtccgccgagccgccaaagccttctgtggaaccggccctgcagcagcatcgagactttatcgcactgagggaggaactgggcagaattagcgactttcacgaaacatacacatttaaacagcccgtgtttaccgtgtccaaagacagcgtgttggccggcacaaacaaggagaatctggggctgccagtgtctaccccgttcctcgaacctcccttggggtcagatggacctgccgtgacgttcgggaaaacacaggaagaccctaaacccttctgtgtgggcagcgcaccaccatcagttgatgtcactcctacttacaccaaggacggggcggacgaagctgaatccaatgatggtaaggttttgaaaccaaagccctcaaagctagcaaagcgcattgccaacagcgctggatacgtcggggataggttcaagtgcgttactacggagttgtatgctgactcttctcagctctcacgagagcagcgggcattgcagatggaagggttgcaagaggattcaatactgtgtcttccggcagcctactgtgaaagagccatgatgcgatttagtgagttagagatgaaagagcgggagggcggccatccagcaactaaagactcagagatgtgtaagttttcgcccgccgattgggagagacttaagggcaaccaggataaaaagcccaaaagcgttaccctggaggaagctatagctgaacagaatgagagcgaacgatgcgaatactcagtgggaaataaacatagagaccccttcgaagccccagaggacaaagacttgcctgtggagaagtacttcgtcgaacgccagcctgtcagtgagcctcctgcagatcaggttgcctccgatatgcctcatagccccaccctgcgcgtggaccgcaaaagaaaggtgtccggcgattcctctcacaccgaaacgaccgccgaagaggtccccgaagaccccttgctcaaggccaaacgaagacgagtatccaaggggcttcaccctaaaaaacagcgccacctcctgcatctgcgggagcgctgggagcagcaggtgagtgccgccgacggtaagcccgggcgccagtcaagaaaggaagtgactcaggcaacacaaccagaggccattccccagggtactaacatcacagaagagaagcctggccggaaaagggccgaggcaaaagggaatcgatcatggagtgaggagagtctaaagccatctgacaacgagcaggggttgccagtcttctctgggtcacctcctatgaaaagcctgtcctccacgagcgccggcggcaaaaagcaggctcagcccagctgcgcaccagctagtcgcccgcccgccaagcagcagaagattaaggagaaccagaagacagacgttctttgcgcagatgaggaggaggattgtcaggccgcttcattactccagaagtatactgacaactcagagaagccttcaggcaagcggctgtgtaagaccaaacaccttattccccaagaatcacggaggggcctccctctcactggagaatattatgtggaaaacgctgacggcaaggtgaccgtcagaaggttcagaaagaggccagagccttcttccgattatgatttgtcccccgccaagcaggagcccaagccctttgaccgtctgcagcaactgctacccgcttcacagtcgacacagctgccttgttcctctagcccccaggagaccactcagagcaggcctatgcctcccgaagcaagaaggctgatagtgaacaaaaatgctggcgaaactctgctccagagagccgctcgcctgggctatgaggaagtggtgttgtactgccttgaaaataaaatctgtgatgtgaaccaccgggacaatgcagggtattgtgccttacatgaagcctgcgcaagaggttggctaaacatcgtgcgccatcttcttgagtacggcgccgacgtgaattgctcggcacaggatgggacaaggcctcttcatgatgcggttgaaaatgatcacctcgagatcgtacggctgctgctctcgtatggcgccgatcccaccctggcaacatacagcgggcgtaccattatgaaaatgacccatagcgagttgatggagaaatttctcactgactacttaaatgacctccagggcagaaatgatgatgatgctagcggtacatgggatttctacggcagtagtgtgtgcgagcccgatgacgaatccggatatgacgtgctggccaacccacccggcccagaggaccaggatgatgatgatgacgcctactcagacgtcttcgagttcgagttttctgagactcctctcctgccctgctataacattcaggtatcagtggcacaggggcccagaaactggctccttctgtctgacgttttgaagaagttaaaaatgtctagtaggatcttccggtgtaactttcctaacgtggagatagtgactatagccgaagcagaattctatcgtcaggtgtcagcttctctgctcttcagctgcagcaaggatctagaagcttttaacccagagtccaaagaattgctggacctcgtcgagtttaccaatgaaatccagactttgctaggaagtagtgtagagtggttacatccctctgacctggcctccgacaattattggtag

SEQ ID NO: 180482 - DNA, 5268 bp, synthetic construct
  misc_feature 1..5268: note = Description of Artificial Sequence: Synthetic coding sequence
  source 1..5268: mol_type = other DNA
atgctgagcgccacccccctgtacggcaacgtgcacagctggatgaattccgagagagtgaggatgtgcggagcatccgaagatagaaagatactagttaatgacggagatgcgtccaaggctcgtctggaactgcgcgaagagaaccccctgaatcacaacgtcgtggatgcttccacagcccatagaatagacggcttggccgcgctgagcatggacaggaccgggttgattcgagaagggttaagggtcccaggaaatatcgtttattcctcgctctgcgggctgggaagcgaaaaagggagggaagctgccacttccaccctcggcggacttggcttctcatctgagcgcaatcccgaaatgcagttcaaacctaatacgccggagactgtcgaggccagcgccgtgagcgggaagcccccaaatgggttttcagccatttataaaacgcctcccggcatccaaaagtccgccgtggcaaccgccgaagctttgggactcgaccgaccagcatctgataagcagtcccctttgaacataaatggcgcatcttacctgcgactgccctgggtgaacccttacatggagggagctacacccgccatttatcctttcctggactcacccaacaagtattcactcaatatgtacaaagccctgctccctcagcagagttatagcctggcccagcctctctatagccctgtgtgtacaaatggagaaaggttcttatacttaccaccacctcactatgtgggcccccacatccccagctcattggcaagccctatgaggctgagcacgccaagcgccagtccagccataccccctctggtgcattgtgccgataagtccctaccatggaaaatgggtgtaagtcccggcaaccccgtggacagccatgcatatccacacattcaaaattctaagcagcctagggtccccagtgccaaggcagtgacgtctggtttgccaggcgatactgccctcctactccccccatcacctcgccccagtcctcgggtgcacctaccgacccagccagctgccgacacctactcagaatttcataaacattacgctaggatcagtaccagcccctccgttgcactgtcaaagccttacatgacagttagctccgagttccccgcagctcggctgtccaatggcaaatatcccaaggcaccggagggaggcgaaggagcacagcccgttcccgggcacgctaggaaaaccgccgttcaggaccgtaaggacggttccagccctccccttcttgaaaaacagacagtgaccaaggacgtcactgataaacctctggatctctctagtaaggttgtcgatgtggacgcctcaaaggctgaccacatgaagaagatggccccaactgtgctcgtgcactccagagcaggcagtggcctggtcttgtccggcagcgagatccccaaggagacactctccccccccggcaacggctgcgcaatttaccgctccgaaattatttcaaccgcacctagctcctgggttgtgcccggaccctccccgaacgaggagaataacggcaaatcgatgagcctgaagaacaaggctctagactgggccatcccacagcagaggtccagttcttgtcccagaatgggtgggaccgatgcagtgattaccaacgtgtcaggatcggttagtagtgctggaaggccggcctctgccagccccgctcccaatgcaaacgcggacggcacaaaaaccagtcggagctctgtggaaaccacaccctcggtgattcagcacgtgggacagcctcccgctacccccgccaaacattcctcaagcacctcttcaaagggggctaaagcctctaatccagagccctcattcaaggccaatgagaatgggctgcctccctcatcaatattcctgagtcccaatgaggcctttagatcccctcccataccctatcctcggagttaccttccctacccagcaccggaagggattgcagtgagtccactgagtcttcacggcaaaggtcccgtgtaccctcaccctgtgttgctaccaaacggatccttgtttcccggccatcttgcacctaaaccaggcctcccctatgggctgcctactggaaggcctgagttcgttacgtaccaagatgcccttgggcttgggatggtgcaccccatgttgattcctcacactccgatcgagatcaccaaggaggagaaacccgaacggcggtccaggtcccatgagagggcaagatatgaggatccaacattgagaaataggttcagtgagatcctggagacatcctccactaagttgcaccctgatgtgccaacagacaaaaatctgaagcccaacccgaactggaaccagggcaaaaccgtcgtaaagtcagataagctggtttacgtcgacctgctgcgcgaggaacccgacgccaagactgatactaatgtgtccaagccttcatttgccgcggagagtgtagggcaatccgccgaaccccccaagccatcagttgagcctgccctgcagcagcacagagacttcattgcactgcgggaggaattaggtcgaatctccgatttccacgagacttataccttcaagcaacctgtgtttactgtcagtaaggacagcgtgctggctggcactaataaagaaaatctcggacttccagtatcgacgccctttctggagcctcccctgggatctgatggccccgccgtgaccttcggcaaaacacaggaggatcctaaaccattttgcgtcggctccgccccccccagtgtggacgtaacgcccacgtatactaaggacggagcggacgaagctgagagtaacgacggcaaggtcctgaaacccaagccgtcaaaactcgccaagaggatcgctaattctgcaggatacgtaggggatagatttaaatgcgtcaccactgagttgtatgccgactcttcccagttgagccgagagcagcgggctttgcagatggaaggcctgcaggaggatagtatactgtgtctccccgctgcatactgtgaacgagctatgatgcgcttctctgaactggaaatgaaagagagagaaggcggacaccctgctactaaggattcagagatgtgtaaatttagccccgccgactgggagcgcctgaaaggaaaccaggacaagaagccgaagagcgtgacgctcgaggaagcgatagcggaacagaacgaaagcgagcgctgtgagtactctgtaggcaataagcacagggacccatttgaagcccctgaggacaaggaccttcctgtggaaaaatacttcgtggagcggcaacccgtcagcgaacccccggccgatcaggtggcaagtgacatgccacacagccccactcttcgcgtggataggaagcgcaaagtgagcggagattcatcccataccgagactacagcagaggaagtgcctgaggatcccttgctcaaagcgaagcgaaggcgcgtgagcaaggacgattggccagagagagaaatgactaactcctctagtaaccacctggaggacccgcactattcagaactgaccaacttaaaggtgtgtatcgagcttaccggcctgcaccccaagaaacagaggcatttgctccacttacgcgaaagatgggaacagcaggtttccgccgccgatggcaaacccgggaggcagtcccgcaaggaggttacacaggcgacacagccggaagccataccacagggcactaacattactgaagagaaacccggacgaaagcgggcagaggccaaggggaatagaagctggtctgaagaaagcttaaagcctagcgacaatgaacagggattgccggtcttttcaggctcacctcccatgaagagccttagctccacaagtgctggagggaagaagcaggcccagcctagttgcgctcccgcctcaagacctcctgcaaaacaacagaaaattaaggaaaatcagaagacggatgtgctctgtgccgatgaggaagaagactgtcaggccgcttcactcctccagaagtacaccgacaatagcgagaagccaagcggcaagcggctgtgcaagactaaacatctcataccacaggaatcgcgcagggggctgccactgacaggagagtactacgtcgaaaacgcggatggaaaggtgacagtgagaagatttaggaagcgcccggaacccagcagtgactatgacctgagccctgcgaagcaggaacccaagccatttgatcgactccagcaattgctgccagcttcacagtcaacccaactgccctgctctagctctcctcaggagactacccagtctcggccaatgccgccggaggctcgtcgccttatagtgaataaaaacgccggggaaaccttactccagcgggctgctagattgggatacgaggaggtagtcctgtactgtctcgagaataagatatgcgacgtcaatcaccgggacaatgcaggatactgcgctctgcacgaggcatgtgctcggggttggctcaatattgtccggcatctattagagtacggcgcagacgtgaactgcagtgcacaggacggtactcggccactgcacgacgcagtcgaaaacgatcatctggaaatcgtcaggttactgctgtcttacggtgcagacccaacattggctacatacagtggccgcacgattatgaagatgactcatagtgagcttatggagaagtttttaacagactacctgaacgatttgcagggccgaaacgatgacgacgcatccggcacctgggacttctatggttcaagtgtctgtgaacctgatgatgagagtggttatgacgtgcttgcaaatccacctggcccagaagatcaggatgatgacgatgacgcctatagcgacgtctttgagtttgagttcagtgagactcccctcctcccctgttacaatattcaagtatctgtggcccaaggaccccgtaactggctgcttctgtctgacgttcttaagaaactgaaaatgtcatcccggattttccgttgcaatttccccaatgttgagattgtaacgatcgcggaggccgaattttacaggcaagtttcggcttcactgctgttctcctgctctaaagatctggaggcattcaacccagagtctaaggaactcctcgacttggtcgagtttacaaatgagatacaaaccttactgggaagcagtgtggagtggctgcacccttcggatctcgcaagcgataactattggtag

SEQ ID NO: 180483 - DNA, 5112 bp, synthetic construct
  misc_feature 1..5112: note = Description of Artificial Sequence: Synthetic coding sequence
  source 1..5112: mol_type = other DNA
atgctgagcgccacccccctgtacggcaacgtgcacagctggatgaattcagagagggtgcgtatgtgtggagccagcgaggaccgtaaaatccttgtgaacgacggggacgcaagtaaggctaggctggagctgcgggaagagaaccccttgaaccacaacgttgttgatgcaagtacggcccaccgcatagacggactagcagccttgtctatggacagaacaggcctaattcgcgaggggctgagggtgccagggaacatcgtgtactcctctctgtgtgggctggggtctgaaaaaggacgcgaggctgctacctctacattgggcgggcttggatttagctccgaacgcaatccagagatgcagttcaagcccaatacccccgaaaccgtggaggctagcgctgtgagcggaaagcctccaaacggcttcagcgctatatacaaaacaccccctggaatacagaaatcggctgtggccactgcagaggccctgggactggatcgcccagctagcgacaagcagtccccactgaacatcaacggtgcatcatatctgaggctgccatgggtgaacccatacatggagggggcaacccctgccatttacccattcttggatagcccaaacaaatactccctaaacatgtacaaggcgctgctgccacaacagagttacagccttgcgcagcctctgtattcacctgtatgcacgaatggtgagagatttctataccttcccccaccacattatgtaggcccccacattccctcttccttagccagtcccatgaggttgagcaccccgtcggcaagtcccgccattcctccactggtgcattgtgctgataagtcactgccttggaagatgggagtgagcccaggtaatcccgtggattcccacgcatacccacacattcaaaacagtaagcagccgagggtgccctctgccaaagcagtcacctctggccttcccggcgacactgcgctcctccttccaccaagcccgaggccatcaccaagagtacaccttcccacccaacctgcggctgacacctattccgagttccacaagcactatgctcgcatttctacctctccttccgtagccctgagtaaaccgtacatgactgtgtctagtgaatttcctgccgccaggttgtcaaacggaaagtacccaaaggcccccgagggcggcgaaggagcgcagccagtccccggccatgccagaaagactgctgtgcaggatcgaaaggacgggagttccccccctctcctggagaagcagaccgtgactaaagacgtaaccgataagcccctcgacctttcctccaaggtggtggacgtggacgctagcaaagctgatcacatgaagaaaatggcccccacggtacttgtgcattcgagggccggaagcggtctggtccttagcggaagcgagatccctaaggagactctgagcccccccgggaatggttgcgccatttaccggtcagagattatctctaccgcccccagctcttgggtggtccccggaccttccccgaacgaggaaaataatggcaagtctatgtccctgaagaacaaagctctggactgggcaataccacagcaacgctctagttcttgcccaagaatgggaggaacggatgccgtaattactaatgtttccggttcggtttctagcgcagggagaccagcttccgcatctccggctcccaatgccaatgcggacggcactaaaacatctcggtcctctgtcgaaaccaccccatctgtgattcagcacgttggccaaccgccagctacgcctgcgaagcatagctcttcaacctcaagcaaaggagcaaaagcaagtaatccagagccctcctttaaagctaatgagaacgggctcccgcccagtagcatcttcctaagccctaacgaagcattccggtcccctcctatcccttatccgcgtagctatctaccttatccggccccggaaggcattgctgtgtcacccctgagtcttcacggtaagggtcctgtctaccctcatccagtactgttgcccaatgggagcctctttcctggtcatctggccccaaagccaggactcccttatggattgccaaccgggagacccgagttcgtgacataccaggatgccttgggcctcggaatggtccatcctatgctcatcccccatactcccattgagataacaaaggaggaaaagcccgagagacgttctaggtcccacgagcgggctcggtacgaagaccctactctccgaaacaggttcagcgaaatcctggaaacatccagcactaaactgcatcccgacgtcccaaccgacaagaacctgaaaccaaacccaaattggaatcaaggaaagacagtggtcaagtctgacaagctcgtatatgtggatctcctgagggaggagccagacgccaaaactgatacaaacgtgtccaagccaagcttcgctgccgaatccgttggccagagtgcggaaccacctaaaccatcggttgagccagctctccaacagcatcgggacttcatagccctacgcgaggaattggggcgcatctccgattttcacgagacctacacattcaagcaaccagtgttcactgtgagcaaggacagtgtgctggcaggcaccaataaagaaaatctgggcctgcctgtgagcacaccctttctcgagcctcccttgggaagcgacgggccggcagtgactttcggaaaaacccaggaagatccgaaaccgttttgtgtcggcagtgccccaccatccgtggacgtaactcctacgtacactaaggatggcgctgacgaagccgagagcaatgatggcaaagtgctgaagccaaaaccttcaaagctggccaagcgaatagctaattctgcgggatacgtgggcgatagatttaaatgcgttactacagagctttacgcggactcaagccagctctcacgggagcagagggccctacagagggcaatgatgcggttctccgagctggaaatgaaggaacgggagggtgggcacccagccactaaggattccgagatgtgtaaattctcaccagccgattgggaacgcctcaaagggaaccaggataaaaagcctaaatccgtgacgctggaggaagcaatcgccgagcaaaatgaatcagagcgctgtgagtatagtgtggggaataagcatcgggacccgttcgaagccccagaggacaaggacctgcctgtggaaaagtattttgtggagaggcaacctgtaagcgaaccaccagccgaccaggtagctagtgacatgcctcacagcccaaccctccgtgtggatcgtaaacggaaagtgtccggagactccagccacactgaaacaactgctgaagaggtacccgaggatcccttgttgaaagccaagcgcagacgagtttctaagggcctccatccgaagaagcagcggcatttgctccaccttcgggaacggtgggaacagcaagtaagcgccgcggacggcaaaccaggacgtcagagccgtaaagaagtcacacaggccactcagcccgaggcaatcccccaaggcactaacattactgaggaaaagccagggcgcaagcgagccgaagccaagggaaatagaagctggtctgaagagagcctcaaaccaagcgacaatgagcagggcctccctgtcttctctggatcccctcctatgaaaagccttagttctacaagcgcaggcgggaagaaacaggcacagccttcctgcgcacccgcctcacgccccccggccaagcaacagaagatcaaagaaaaccagaaaaccgatgttttatgcgcagacgaggaggaggattgtcaagccgctagcctcctccagaagtacactgacaattccgagaagccttccggaaagcgcctctgtaaaacaaagcacctcatacctcaagaaagcaggcgggggctccccctgaccggagagtattacgttgagaacgctgacggaaaggtgaccgtccgccgctttcgaaaacggcctgagccctcaagtgattatgacctgtcacctgctaaacaagaacctaagcctttcgacagactccaacagctgctgcccgcttcccagtctacgcagctgccctgctcatcatctccccaggagaccacccaatccagaccaatgccccctgaagcccggcggctaatcgtgaataaaaacgctggcgagacacttttgcagcgcgcggcccgcctcgggtatgaggaggttgtgctgtattgtctggagaacaagatctgtgatgtaaaccatcgtgacaatgcagggtactgcgctctccacgaggcgtgcgccaggggttggttgaacatagttaggcatctcctggagtatggggcagacgtgaattgctcagcccaggacggcaccaggccactgcatgacgctgttgaaaatgatcatttagaaattgtgcgactgttgttgtcctacggagcagatcccactcttgccacctacagcgggcggaccatcatgaagatgacacactccgagttgatggagaagtttctcacagactatctgaatgacttgcagggccgtaacgatgatgacgcttctgggacttgggacttttacggatccagcgtttgcgagcccgacgacgaaagcggttacgacgtcctggccaatcccccagggcccgaggatcaggacgacgatgatgacgcgtattccgatgtctttgaattcgagttttccgagacgcccctgctgccttgttacaatatccaggtatcggttgcccagggccctagaaactggctccttctctcggacgtattaaaaaagctgaagatgtcctcccgcatttttcgctgtaatttccctaatgtggaaatcgtcaccattgctgaggccgagttctaccggcaggtgtctgctagcctgctgttctcctgcagtaaagacctggaagcgttcaaccctgaatcaaaagaactgcttgatctggtagaattcacaaacgagattcaaacccttctaggctcctcagtggagtggctgcatccatccgatttggctagcgacaattactggtag

SEQ ID NO: 180484 - DNA, 1869 bp, synthetic construct
  misc_feature 1..1869: note = Description of Artificial Sequence: Synthetic coding sequence
  source 1..1869: mol_type = other DNA
atgccccacagccccaccctgcgggtggaccggaagcggaaggtgagtggagatagcagccacacagaaaccacagctgaggaggtgccagaggatccacttctgaaagccaaacgtagaagggtatcaaaagggttgcaccctaaaaagcagaggcacctcctgcacttgcgagaacgatgggaacaacaagtctccgctgccgatgggaaaccgggacgtcaatcccgtaaggaggtcacccaagccacccagcccgaagcgatcccacaggggactaatattactgaggagaagcccggacgcaagcgagccgaggctaagggaaacagatcttggagcgaggagtccctcaagccttcagacaacgaacaaggactgcccgtcttcagtggctcccctcctatgaaaagtctgtcgtcaaccagtgctggtgggaagaagcaggcgcaaccttcatgcgccccggcatcacgtcctcccgctaagcaacaaaaaataaaggagaatcagaagacggacgttctttgcgccgacgaggaggaagactgtcaggcggcctctctgctccagaagtatactgataactctgaaaagccctccggcaaacgactgtgtaagacgaaacacttaatcccacaggaatcacgccggggccttccgttgaccggcgaatattacgtggaaaacgccgatgggaaggttaccgtgcgccgcttccgcaagcggcctgagcccagttccgactacgacttgtctcctgccaaacaagagcctaagccttttgatcgccttcaacagctgttgccggcatcacagtctacgcagttaccatgtagttcatcaccacaggagacaactcagtcaaggcctatgccgccagaggcccgccggcttattgtgaataagaatgctggagagacccttctgcagcgcgctgccaggctagggtacgaggaggtagtgctgtattgtcttgaaaacaaaatctgcgacgtcaatcatcgggataatgcagggtactgcgccctgcacgaagcctgtgccaggggatggctgaacatagttcgtcatctgctcgagtatggagccgatgtcaactgtagcgcccaggacggtacccggccacttcacgacgctgtcgagaacgatcatctcgagatcgtgcgattattgctcagctatggtgccgatccgaccctggcgacttactccgggcgaaccattatgaaaatgactcattcagaactcatggagaagttcctcactgactatctcaacgacctccaggggaggaacgacgacgacgctagtgggacctgggatttctacggctccagcgtgtgcgaaccagacgatgagagcgggtacgatgtgctcgcaaacccccccggtcctgaagaccaggacgacgacgacgacgcttacagcgacgtcttcgaattcgagttctccgaaacccctctcctaccgtgctataacatccaggtcagcgtggcccagggaccacgcaattggttgctgttgtcagacgtcctgaagaagcttaagatgtcatcacggatcttcaggtgtaactttccgaacgtcgaaatagttacaattgcagaagctgaattctaccggcaagtcagcgcatccctactgttttcctgttctaaagatcttgaggctttcaatccagagtccaaggagctccttgatctcgtggagttcacaaacgaaatccagaccctgctcgggtcttccgtagagtggttgcatccctccgatttggccagcgacaactactggaagtctccacagatcgcccgcggctcagttgaaggaaaaaaaactgacgataagaccagtaaaactgatctatag

SEQ ID NO: 180485 - DNA, 5166 bp, synthetic construct
  misc_feature 1..5166: note = Description of Artificial Sequence: Synthetic coding sequence
  source 1..5166: mol_type = other DNA
atgctgagcgccacccccctgtacggcaacgtgcacagctggatgaacagcgaacgggtgaggatgtgcggtgcctctgaagatcgtaagatcctggtaaacgatggggatgcttccaaggcccgacttgagctccgagaggaaaatcctctcaatcataatgtagtggatgcttccaccgcccacaggatagatggtctggccgcactgtcaatggaccgtacaggcctgatccgagagggattgagagtgcccggcaacatcgtatacagctccctgtgcgggctgggttccgaaaagggtcgggaggcggcgacctcaacgctgggaggcctgggattctcttctgaaagaaaccctgagatgcagttcaaaccaaatacaccggaaacagtggaagctagcgcggtgtccgggaaacccccaaacgggttttcagctatctacaagacacccccgggaattcagaaatctgccgtcgctaccgccgaggccctgggactagacagaccagccagcgacaaacaaagccccttgaatatcaacggagccagctacttgagactcccatgggtcaatccttatatggagggggctacgccagccatctacccttttctggactccccaaacaagtactcccttaatatgtacaaagctttattgccgcaacagagctactctctggcacagcccctctatagtccggtctgtactaatggagagagattcctctatctgcccccccctcactacgtgggaccacacatccctagctctcttgccagtcctatgcgtctgagcacacccagcgcaagtccagcaattccaccactggttcactgtgctgacaagagtctgccatggaagatgggggtttcgcctgggaaccctgttgactctcacgcctatccccacattcagaactcaaaacaaccacgcgtcccctctgctaaagccgtgacctccggactcccaggggatacagcactgctcctcccaccctccccccgtccctctccaagggttcacttgccgacccaacctgcggcagacacatacagtgaatttcataaacattatgcccgcatctctactagccctagtgtagctctgagcaagccctatatgacggtgtcctcagagttcccagccgcaaggcttagcaacggaaagtaccctaaggctccggagggaggggagggtgcacaaccggttcccggccacgcccgtaagaccgccgtgcaggatcggaaagacgggagctcccccccgctgctggagaaacagaccgttaccaaagacgtgaccgacaagccactggacctgtcatctaaagtggtcgacgtggatgcatctaaggcagatcacatgaagaagatggcacccacagtgcttgtacattccagagccggatccggacttgtcctgagcggaagtgagatacccaaggagactctgtccccacctggtaacgggtgtgccatatatcgctccgaaatcattagcaccgccccttcaagttgggtggtaccaggtccgtctccaaacgaggagaataacggaaagtctatgtcactcaagaacaaagccctagattgggccatcccccagcagcgatcttcttcatgcccccgcatgggaggcactgacgctgttatcaccaatgtctctggctccgtgagttctgcagggcggcccgccagtgcctctccagctcccaacgctaatgctgacggcacaaaaacatctcgctcgtcggtagagaccaccccctccgttattcagcatgtcgggcagcccccagccacaccagccaagcattcctcctctacatccagcaagggtgcaaaagcttccaatccggagccttcctttaaagcaaacgagaatggcctgccccctagcagcatattcctcagtccaaatgaggccttccggagcccccccatcccatatccaaggagttatctaccgtacccggcgccggaagggatcgctgtgtctccgctgtcactgcacggcaaaggtccagtgtaccctcaccctgtgctgctgccaaatggtagcctgtttcctggacatctcgcacccaaaccgggactaccttacggactgcctacagggcgtccagagttcgttacctaccaagatgcattagggttggggatggtgcacccaatgttaattcctcacactcctatagaaatcaccaaagaagagaaaccagagaggagaagtagaagtcatgaaagagcccggtacgaggatcccactctaaggaaccgattctcggagattctggaaacctcctctactaagctgcaccccgatgtgcccaccgacaagaatctcaagcccaaccccaactggaatcagggtaagaccgtcgtgaaatctgataagctggtgtatgtggacttgctgagggaagagccagacgcaaaaaccgacaccaacgtttcaaagccgtccttcgccgcggaatctgtcggacagtccgccgaaccgcccaaaccgagtgtagagcccgcccttcagcaacatcgcgatttcattgctctgagagaggaattgggacggatatccgactttcatgaaacatatactttcaagcagcccgtcttcaccgtttctaaagactctgtactagccggtaccaacaaggaaaatcttggattaccagtgtccacaccctttctggagcctccgcttggtagtgatggtccggccgtgacattcggaaaaacgcaggaagaccctaaacccttttgcgtgggctctgccccacccagtgtggatgtgacacccacgtatacaaaggacggggctgatgaggctgaatccaacgacgggaaggtgctgaaaccaaaaccctcaaaactcgcgaagcgaattgctaacagcgctgggtacgtcggcgaccgctttaaatgcgtgactacagagctgtacgctgactcctcacaactgtctagagagcagcgggccctgcagatggagggcctgcaagaagacagcatcttatgtctgccagcagcctattgtgaaagggcgatgatgcggttctctgaattagaaatgaaggagcgagagggggggcaccccgccaccaaagatagtgaaatgtgcaagttttcacccgctgactgggaaagattgaaggggaaccaggacaagaaacccaaatctgtgacgctggaagaagctatagccgaacagaacgagagcgaacggtgtgaatacagcgttggcaataaacaccgggacccattcgaggcccccgaagacaaggaccttcctgtcgaaaaatactttgtggaaaggcagccagtgtcagagccaccagccgaccaggtcgcgtcagacatgccacactcccccaccttacgcgtggaccgcaaacgcaaagtcagcggagactcttcgcatacggaaaccactgctgaagaagttcccgaggacccgctattaaaagctaaacgtagacgtgtgtccaagggcttgcaccccaagaagcagcggcatctgttgcacttaagagagcgctgggagcagcaagtgagcgcagctgacggaaagccaggtcggcagtccagaaaagaagtgacacaggccacccagcctgaagcaatcccccagggcactaacattaccgaagagaagccaggcagaaaaagagctgaagcaaaaggaaacagatcttggagcgaagagtccttaaagccttcagacaatgaacagggactgcccgtcttttctggttcccctccaatgaagagtttaagctccacatccgctggaggaaaaaagcaagcccagccgagctgcgcccctgcctcccgcccaccagccaaacaacaaaagattaaggagaaccagaaaactgatgtgctttgcgccgacgaagaggaggactgccaggccgcttccctgctccagaagtacaccgataactctgagaaaccaagcgggaaacggttgtgcaaaaccaagcatctgatacctcaggaaagccggagaggcttgccacttactggcgagtattacgtagagaatgccgatgggaaggtgacagttcgtaggttccgcaaaaggccggagccatcctccgactacgatctgtctccggccaagcaggaaccgaagccttttgaccggctgcaacagctgctacccgcgagccaatcaacccagcttccatgctcctcgagcccacaagagactacacagtccaggcctatgcctcctgaagccagacggctgatcgtgaacaagaatgcaggagaaaccctgctacagcgcgcagcccgcctgggttacgaagaagtcgtgctgtactgtctggaaaacaaaatttgtgacgtgaatcaccgcgacaatgccgggtactgcgctttgcatgaggcctgcgcgagaggctggctaaacatcgtaagacatttacttgaatacggagcagatgtgaactgttctgctcaggacggcacacgtcccctccatgacgccgtcgaaaacgatcacctcgagattgtaagactattattatcgtacggcgccgacccaacactggccacatactccggccgcactattatgaaaatgacccacagcgaactgatggagaagtttctgactgattacctgaacgatctgcaaggaaggaatgatgacgatgccagcggcacctgggatttttatgggtcctctgtctgtgaacctgacgatgagagtggatatgacgtgttagctaatccgcctggcccagaagatcaggatgatgacgatgatgcgtattccgacgtgtttgaatttgagtttagtgagaccccactgctcccctgttacaatattcaggtgagcgtagcccaaggaccccgaaactggcttctgttaagtgacgtcctcaagaagttgaaaatgtcctctaggattttccggtgcaattttcctaatgtggagattgtgaccatcgccgaggccgaattctatagacaggtgagtgccagtttactgttctcttgttcaaaagatctggaggcctttaaccctgagtcaaaggagttactcgatctagtcgaattcacaaatgagattcagaccttgctgggcagtagcgtggaatggctgcatccatctgatctggcgtcagacaattattggtag

SEQ ID NO: 180486 - DNA, 87 bp, synthetic construct
  misc_feature 1..87: note = Description of Artificial Sequence: Synthetic coding sequence
  source 1..87: mol_type = other DNA
atgctgagcgccacccccctgtacggcaacgtgcacagctggatgaattctgaaagagtacgtatgtgtggggcctctgaggactag

SEQ ID NO: 180487 - DNA, 1236 bp, synthetic construct
  misc_feature 1..1236: note = Description of Artificial Sequence: Synthetic coding sequence
  source 1..1236: mol_type = other DNA
atgacccggcccgccttccagccccccgccacccccgccaagcacagctccagcacgagctctaagggcgcaaaggcctcaaaccccgaacctagcttcaaagcaaacgagaacgggctaccccccagcagcatattcctcagccccaatgaggccttcagatcccctcctataccttacccccggagttatctgccctatccagctcctgagggaatagccgtgagccctctctcactgcacgggaaaggccctgtgtaccctcaccccgttctattacccaacgggtcactcttccccggccacctggcccccaaacctggcctcccctatggactccccacaggtagacctgagttcgtgacttatcaagatgctcttggcctcggcatggtccaccccatgttaataccacacactcctatcgagattaccaaagaggaaaagcccgagcgcaggtctagatcacacgagcgggccagatatgaagatcccacactccgcaacaggttctctgaaattctggagacgtcatcaacaaagctccatcccgatgtccccacagacaagaaccttaaacccaatcccaattggaatcaggggaagacggttgtcaaatccgataagctagtctacgtagatttattacgggaagaaccagacgcgaagacagacactaacgttagcaaaccttcctttgcagccgaatcggtcggtcagagcgccgagccacctaaaccatctgtggaaccagcacttcagcagcaccgcgacttcatcgctctgcgcgaagaactcgggcggatttcagatttccacgaaacgtatactttcaaacagcccgtctttaccgtgtctaaggattccgtgctcgcaggcacaaataaggagaatctgggactgcccgtttctaccccgtttttagagccacctcttgggtctgacggtcccgccgtgaccttcggaaagactcaggaggacccaaaacccttttgcgtggggtctgctccacccagcgtggatgtcacgccgacttatactaaggacggcgcggatgaagcagagtctaacgacggtaaggtcctgaagcctaagcccagcaagctggccaagcgtatagcgaattcagctgggtatgtcggggaccgttttaagtgcgtaactacggagttgtatgctgactcaagccagctttcccgggaacagagggctttacaagttagtccacccacctag

SEQ ID NO: 180488 - DNA, 2238 bp, synthetic construct
  misc_feature 1..2238: note = Description of Artificial Sequence: Synthetic coding sequence
  source 1..2238: mol_type = other DNA
atgcccgtgctgagccggccccggccctggcggggcaacaccctgaaacggaccgccgtcctgttggcccttgctgcctatggggcgcacaaggtttacccgctcgtacgtcagtgcctggcaccagccaggggcctgcaggcaccagcgggcgaacccacccaagaagcatccggggtggccgccgctaaggccggaatgaatcgcgtatttctgcagcgtctgttatggttgctccggctcttattccctcgcgtcctgtgcagggagaccggattattggccctgcacagtgccgcactggtctcaaggacgttcctgtctgtgtatgtagcaaggctggacgggagactagcaaggtgcattgtcagaaaggatccacgggcttttgggtggcaactgcttcagtggctgctcattgcactgccagccacctttgtgaattcggccatacggtaccttgaaggtcagctagctctgtcattcaggtctaggctggtagcacacgcctaccggctgtatttttctcagcagacctactaccgcgtttccaacatggatggcagactgaggaaccctgatcagagtctgacggaggacgtagtggcatttgccgccagcgtcgcccacctgtattctaatctcacaaagcctctcctggatgttgctgtcaccagttatacactgctgagggcagccagatctagaggcgccggtacggcctggcctagtgctatagcaggcctcgtcgtttttcttactgctaatgtcctgagggctttcagtcccaagttcggtgagttggtggctgaggaggctcgccgcaaaggggagctgagatacatgcactctcgggtcgttgccaattcagaagagattgccttctatggaggacacgaggtggaattggcgctgttgcagcgctcttaccaagacttggctagtcagattaacttaatcctgctcgagcgactgtggtacgtcatgcttgagcaattcttgatgaaatatgtgtggagtgcgagcgggttgctcatggttgccgtaccaatcatcacggctacgggttacagtgagtcagatgctgaggccgtcaaaaaagcagcactcgaaaagaaggaagaagaactggtgtccgagcgcaccgaggccttcacaattgcccgcaatcttcttactgcagccgccgacgccattgaaagaataatgagttcatacaaggaagttactgagctcgccggctacactgccagagtccatgagatgttccaggtgtttgaggacgtacagaggtgtcattttaagcggcctagggagcttgaagacgctcaggccggaagcggcacaatcggcagaagcggcgtgcgtgtcgaggggccactaaagatccgcggccaggtggtggacgtggaacagggaattatttgcgagaacattcctatcgtgacacccagtggcgaagtagtggtcgcttccttaaatatccgtgttgaagagggcatgcacctgttaattacagggcccaatggatgcggcaagagtagcctgtttcggattttaggtggactttggcccacttacggcggagtgctgtacaaaccgcccccccagcgcatgttttatattccccagagaccctatatgtccgttggatcactcagggatcaggtaatttaccctgacagtgtggaggacatgcagcgtaagggctattcggaacaggacctcgaggctatactcgatgtggttcacctgcatcacattctgcagcgcgaaggcggctgggaggctatgtgcgactggaaggacgttcttagcggcggcgagaaacagcggattgggatggcaagaatgttttaccatcgccccaagtatgcccttctggatgagtgcacatccgccgtgtccattgacgtggaaggaaaaatttttcaggccgcaaaagatgccggaattgccctgctgtcaattacacataggccctccctctggaagtatcatactcatcttctccagtttgatggcgaaggcggctggaagtttgagaagctggattccgcggcgcggttgtctctgacagaggagaagcagcgcctcgagcagcagttggctgggatccccaaaatgcaacgaagactccaagagctatgtcagatcctcggtgaggccgtggcaccagcacacgttcccgcaccctcaccacagggtcctggcggcttgcagggcgcttcaacctag

SEQ ID NO: 180489 - DNA, 5358 bp, synthetic construct
  misc_feature 1..5358: note = Description of Artificial Sequence: Synthetic coding sequence
  source 1..5358: mol_type = other DNA
atgatcagcaccgcccccctgtacagcggcgtgcacaactggacctccagcgatcggattcggatgtgcgggatcaacgaggaacgcagggcacccttgagcgatgaggagtctaccactggggactgtcaacactttggcagccaagagttctgtgtatcgtctagcttctccaaagtcgaactgacggccgtgggttccggatctaacgcacgcggtgccgaccccgatggaagcgcaacagaaaagttagggcacaagtcagaggataagccggacgatccccagccaaaaatggactatgccggaaacgtggcggaggccgaaggctttctggtgccgctcagcagcccgggggatggcttaaaactgccagcatcagatagcgctgaggccagcaattccagagcagattgtagctggacccctcttaatactcaaatgagcaagcaggtggattgcagccccgctggtgttaaggcccttgattcacgacagggtgttggagagaagaatacatttatcctagccactcttgggacaggagttccagttgagggtacactgcccctcgtgactacaaactttagtcctcttcccgcaccaatatgtccacccgcgccagggtctgcctccgtgccgcatagcgttcctgacgctttccaggtgccactgtctgtccccgccccagtgccacattcaggactcgtgcccgtccaggtcgccacttctgtcccggccccaagtcctccacttgcgcctgtgcctgcactggccccggcccctccttcggtgcctaccttgatatctgactcaaatcccctgagcgtgtccgccagtgtgttggtgcccgtgcctgcctctgctcccccctctggcccggtgcccctgtctgcccccgctcccgctccactcagtgttcccgttagcgcaccaccactggccctgattcaggctcccgtacccccctctgcacctaccttggtcctggctcctgtgcctactccagtgctggcccctatgccagcgtctactccaccagccgccccggcaccgccaagcgttcctatgcccactccaacaccatcatcaggccctccatccacccccactctcatccccgcattcgctcccaccccggtgccggcaccaactcccgcccctatctttacacctgcacccacacctatgccagcggctacgcccgctgcaatacctacatctgccccaattccagcaagcttcagcctgagcagggtctgttttcccgccgcacaggcccctgcaatgcagaaggttcctctgagctttcaaccaggcaccgtcctgaccccatcgcaacccttggtctacatcccacccccatcgtgcggtcaacctctgtccgtagctactctgcccacaacattaggagtgtcatccacccttaccttgccagtgctcccaagctaccttcaggaccggtgcttaccaggagtcctagcaagccctgagctacggtcctatccctatgcattcagcgtggctagacccctgacgtcagattccaaactcgtgtccctcgaagttaacagattaccctgtacgagccccagcggaagcacaacaacacaacccgcccctgacggggtgccgggaccactcgccgatacatctctggtgacagcttccgcgaaagtgttaccaaccccccagcccttgctgcctgctccatcagggtcctctgcgccgccacatcctgctaaaatgccgagtggaactgagcagcagaccgagggaacctctgttacgtttagtcccctgaaaagcccgcctcagctggaacgtgaaatggcctcccctccggagtgctccgagatgccgctcgacctgtccagcaagagcaacagacagaagcttcccctgcccaatcagcggaaaacaccacccatgcccgttttaactcctgttcatactagtagtaaagccctgctcagcaccgtcttgtctcggtcacagagaacaacccaggcggcaggcgggaacgttacctcgtgtttggggtccacaagttctccatttgttatctttcctgagatcgtcaggaatggcgatcctagcacatgggtgaaaaattcaactgccctgattagcaccatacctggaacttacgtcggggttgctaatccagttccagccagcctgctcctgaataaggatcctaacctcggccttaatcgcgatcctaggcatttacctaaacaggaacctatctccatcatcgatcagggggaaccgaaaggcaccggcgctacctgtggaaaaaagggcagtcaggccggggctgaaggccagccttcaactgtcaagcggtatacaccagcccgcatcgcacctgggctccccggttgtcaaacaaaggaactatcactgtggaagcccactggcccagccaacatttaccccaggtgtagtgtgaatggcaagccgacttccacacaagtacttcccgtcggatggagtccctatcatcaagcctctcttttgagcatagggattagtagtgccggacagctcacgccatcccagggagccccaattcgaccaaccagtgtagtgtccgagttcagcggcgttccaagcctttcctcctctgaggctgtgcacggcctgcccgagggtcagcccaggcccgggggtagcttcgtgcccgagcaagacccagtaactaaaaacaagacatgtcgaattgccgccaagccatatgaggagcaggtaaatcctgtgctgttgactctgagtccacaaaccggcaccctcgccctctcagtccagccgagcggtggcgacatccgcatgaaccaggggccagaggagagcgagtcccacttatgtagtgatagcacccctaagatggagggaccacagggcgcctgcggcctcaagctcgccggcgacaccaaacccaaaaatcaggtcctggcgacatacatgagccacgaacttgtcttggctacaccccagaacttgcctaagatgcccgaattacctctgctgcctcatgatagtcacccaaaggagctgattctagacgtggtgccatctagccgcagaggcagcagtacggaacggccacagttgggtagccaggttgatctaggcagagtgaaaatggagaaagtagatggagatgtggtgtttaacttggcaacatgcttccgtgctgatggcctgcctgtagcaccacagcgcggccaggccgaagttagggccaaagcggggcaggcaagggtaaagcaggagtcagtaggtgtttttgcctgtaaaaataagtggcagccagacgacgtgacggagtcactaccacccaagaagatgaagtgtgggaaggagaaggattctgaagaacaacaactccagcctcaagccaaggcagtagtcagatccagccacaggccgaaatgcaggaagttacctagtgatccccaggagtccactaagaagagtcccagaggggcctctgattctggtaaggagcacaacggtgtccgcggtaaacacaagcatcgcaagccaaccaagcctgagagccagtcgcctggaaaaagagccgattctcacgaggaaggaagcttagagaagaaggccaagtcaagctttagggacttcattcccgtcgtgctatcaacccggaccagaagccagtctgggagtatatgctccagttttgcagggatggccgacagcgatatggggagtcaagaagttttcccaaccgaagaggaggaggaagtcactccgactcccgctaaacgccgcaaagtcagaaagacacaaagagacacgcagtataggtcacatcatgcacaggataaatctctattatcccagggacgtaggcatttgtggcgtgcgagagagatgccctggaggaccgaggctgcgaggcagatgtgggacaccaatgaggaggaggaagaggaggaagaggagggactgctcaagcgtaagaaacggagaagacaaaagagccgcaagtaccaaacaggggagtatttgacagaacaagaggacgagcagagaagaaaggggcgggctgatctcaaggcgcgaaaacaaaagacctcttccagtcaaagcctagaacatagactgaggaatcgcaacttactgctaccaaacaaggtccaaggcatctctgattcccctaacgggtttctgcccaataacctggaggaaccggcctgcctggaaaactccgagaaacccagcgggaaaaggaagtgtaagaccaagcacatggccactgtttctgaggaagccaagggtaaaggacggtggagccagcagaaaacccggtccccgaaatcacccactcccgtcaaaccaacggaaccctgtactccttctaagagtaggagtgcctcttcagaagaagcctccgagtcccccacggcacggcagatcccacctgaagccaggcgactcattgtgaataagaacgcaggggagacgctgctccagcgcgccgcccgcttaggatacaaagatgtcgttctgtactgcctgcagaaggactcagaagacgtcaaccatcgggataatgccgggtataccgctttgcatgaggcatgctcacggggatggacagacatattgaacattctccttgagcacggggccaatgtcaattgtagtgcccaggacggtactcggcccgtacacgatgccgtagttaatgataacctggaaactatctggctcctcctttcttatggggctgacccaaccctggctacatattctggccaaacagctatgaagctggcctccagcgatacaatgaaaagattcctctcggatcacctgagcgatctccagggacgagcagaaggcgacccaggagtgtcatgggatttttattcctctagtgttttggaagagaaagatgggtttgcctgtgacctcttgcacaacccgccaggaagctccgatcaggagggggacgacccaatggaagaagatgatttcatgttcgaactcagtgacaagccccttctaccatgttacaacttgcaggtgagcgtcagccgcgggccatgcaactggttcctgttttccgacgtactgaagcgattaaagttatctagtcgtatttttcaagcccgattcccccattttgagatcaccaccatgccaaaggccgagttttacaggcaagtcgcctctagccaactgctgactccagccgagcggccaggcggacttgacgatcgatcacccccaggcagttccgaaaccgtagaattggtccgctacgaacccgatctacttcggctgttgggatctgaggtcgagtttcagtcctgcaattcgtag

SEQ ID NO: 180490 - DNA, 4746 bp, synthetic construct
  misc_feature 1..4746: note = Description of Artificial Sequence: Synthetic coding sequence
  source 1..4746: mol_type = other DNA
atgatcagcaccgcccccctgtacagcggcgtgcacaactggacctcttctgatagaatacgcatgtgcggaatcaacgaggaacggcgggcccccctttccgacgaagagtccacaaccggcgattgtcagcatttcggatctcaggaattctgtgtctcctcctcgttttctaaggtagaattgaccgcagttgggagcgggagtaacgcccgaggcgccgaccccgatgggagcgctaccgagaagctggggcacaagtccgaggataaaccagacgacccccagccaaaaatggactatgccggcaatgttgcggaagcagaagggtttctggtccctctttctagtccaggcgacggactcaaattgcctgcctcagacagtgctgaagcttcaaatagccgggccgattgtagttggacacccctaaacactcaaatgagcaaacaggtggattgcagtcccgctggtgtgaaggcactcgacagcagacagggcgtgggcgaaaaaaatacctttatactagcaacactcgggaccggggtacccgttgagggtactctgcctcttgttacaactaatttttctcctttgcccgctcccatttgtccaccggccccgggatctgccagcgtgcctcactccgttcccgatgcttttcaggtgccactgtctgtcccggcccccgtgccgcacagtgggcttgtccctgttcaggtggccaccagcgtgccagctccttccccacccctggctcccgttccggccctcgcccctgcccccccctctgtgccaaccttaatatcagatagtaaccccctgtcggtttcagcatctgtcctggtaccagtcccggcatccgctcctccctccgggcccgtaccactgtcggcaccggcgcctgcccccctcagtgtcccagtctctgctccgcctctggcccttatccaggcccccgtgcccccgtctgcccccacactggtgctggccccagtgccaacgcccgttttggcaccaatgccggcctccacacctcccgctgctccagccccacctagcgtgcctatgcccacccctacaccttctagcgggccacccagtacaccaaccctaattccagccttcgctccaacacctgtccctgccccgactccggcaccaatttttaccccagcccctacccccatgcctgctgctactccagcagccatccctacgagcgctccgattccagcatccttttccctgtcccgggtgtgttttcctgccgcacaggctcccgccatgcaaaaagtgccgctgtcttttcagccaggaaccgtgctgaccccctctcagcccctggtgtacatacctccccctagctgcggacagccactgagcgtggccacgctccccactacactcggggtttcttcaacacttaccctgcctgttttgccctcgtacctacaggaccgctgcctacccggagttctcgctagtcccgagctgcgttcttatccctatgccttctcggtggcccgccccctcaccagtgacagtaagcttgtgtcactcgaggtgaaccgactgccctgcaccagtcccagcgggtccacaaccacccagcctgccccagatggtgttcccggccccctggctgatacgagtctggtgacggcaagcgctaaagtgctgccaacaccccagcctcttttgccagcccctagtggaagttcagctcccccacatcccgccaagatgcctagcggtacggagcagcagaccgaaggaacctccgtaaccttctcacctttgaagagccctccccagctggaaagagagatggctagcccccccgagtgttctgagatgcccttggatctgtcttccaagagcaaccggcagaaactccctctgcccaatcagcggaaaacccccccaatgcctgttctcacccccgtccataccagcagcaaggccttactgtctacagtcttatcccggagtcagcgaactacccaagcagccggcgggaatgtgaccagttgcctgggctctactagcagtccctttgtgatctttcctgaaattgtgaggaatggcgatccttctacgtgggtaaaaaactccaccgcgctgatctctaccattcctggcacctatgtgggggttgccaatcccgtccctgcgtcattgcttctgaacaaggatcccaacctcggtctgaacagagacccacgccacttaccaaagcaggagccaattagtattattgaccagggtgagcccaagggcaccggtgcgacttgcggcaagaaaggcagtcaggcaggtgcagaagggcaacctagcactgtcaagaggtatacccccgctcgaatcgcccccggactgcctggctgccaaacaaaagagctgagcctatggaaaccaaccggccccgccaatatataccccaggtgcagcgtgaacggtaagcccaccagtactcaagtcctgcccgtcgggtggtcaccctatcatcaggcctcactgctaagcatcggaatttccagcgccgggcaacttacaccctcacagggcgcccccatcaggcctacatccgttgtatccgagttctcgggagtgccgagtttaagctccagcgaggccgtccatggacttcccgagggacaacctcgaccgggtgggagcttcgtacccgagcaggaccctgtgactaaaaacaagacttgcagaatagccgcgaaaccctacgaggagcaagtcaatccggtactgctcactctttcacctcagactggaaccctggccttgtccgttcagccatcagggggagatattaggatgaatcagggtcccgaagagtctgagagtcacttatgcagcgattccacaccaaaaatggaagggccacagggggcctgtggactcaaactcgctggcgatactaagccaaagaaccaagtgctggccacctatatgagtcacgagttggtgctcgcgactcctcagaacctgcctaagatgcctgaactaccactccttccccacgactcccacccaaaagaactgatcctcgatgtagtgccaagtagcaggcgaggctcctccactgagcgcccgcaacttgggagccaggttgacctggggagggtgaaaatggagaaggtagatggggatgtagtgttcaacttagctacctgttttcgcgccgatggcttgcccgtggcccctcagcgggggcaggctgaggtgagggcaaaggcaggccaggccagggtcaaacaggagagcgtcggagtatttgcgtgcaagaataaatggcagccggatgacgtgaccgaatccctcccccccaaaaagatgaagtgtggtaaggaaaaggattctgaggagcagcagcttcagccccaggccaaggctgttgtgcgaagctctcatcggcctaaatgcagaaagctacctagtgacccacaggagagtaccaaaaaaagtccacgaggggcatctgactccggtaaagagcacaacggagtgagaggtaagcacaaacacaggaaaccaacaaagcccgagagccagtcccccggaaaacgggcggatagccacgaggagggcagtctcgagaaaaaggccaaatcgagcttcagggattttattccagtggtgttgagcacaaggacccgatcacagagcgatttaaaagcgcgaaaacagaaaacctcttcctcccagagtctggaacacagattacgtaacagaaatcttttgctgccgaataaggtgcaggggatttctgatagccccaatggcttccttccaaataatctcgaggaaccggcctgtctcgaaaatagcgagaagccctccggtaaaaggaaatgcaagacaaaacacatggctaccgtcagcgaggaagctaaagatgtggtgttatattgtctgcagaaggattcagaagacgtcaaccacagagataacgccggatacactgctctgcacgaagcctgttcccgcggatggactgacattctaaatatacttctggaacacggagccaacgttaactgctctgcacaggatgggacgaggccagtgcatgacgccgtggttaacgacaacctggagaccatctggctccttctgagttacggggccgaccctacacttgcaacctacagcggccagacagccatgaaactcgcttccagtgacacgatgaagcgcttcctcagtgatcacctgagtgacttacaggggcgagctgaaggagaccctggcgttagctgggatttttattcttctagcgttctcgaggagaaggacgggttcgcttgcgaccttctacacaaccctcctggctcatctgaccaagaaggtgacgatcccatggaggaggatgactttatgttcgaacttagcgacaagcctttgctgccctgctacaacctgcaggtatccgtgagccgcgggccttgtaactggttcctgttctccgacgtgttgaagcgcctgaaactctcttccaggatcttccaagctagatttccacattttgagattaccacaatgcccaaggccgagttttacaggcaggtggcctcatcccagttgcttaccccagccgaacggccaggcggcctggacgaccgctcaccaccaggatcaagcgagaccgtagagttggttcggtacgagcccgatttgcttcgactcctgggatcagaagtcgagtttcagagctgcaattcctag

SEQ ID NO: 180491 - DNA, 2226 bp, synthetic construct
  misc_feature 1..2226: note = Description of Artificial Sequence: Synthetic coding sequence
  source 1..2226: mol_type = other DNA
tgacccctgctgcccgcccccagcggcagcagcgcccccccccacccagctaagatgccaagtgggaccgaacagcagacagaggggacaagtgtcacctttagccccttgaaatcccctccccagctggagagagaaatggcgtcccctccagaatgcagtgaaatgcctctcgacctgagctcgaaatctaaccgacagaaattgccactgcccaatcagcgcaagactcccccaatgccagtgctcaccccagtacacaccagttctaaagcactattgagcactgttctgtctcgaagccagaggaccacacaggcggccggtggaaacgttacttcatgcctagggtctactagctcccccttcgtcattttccccgaaatcgtgaggaacggagatccaagtacgtgggtgaaaaacagcaccgcactaatcagcacgattccaggaacctatgtgggggtggccaatcctgtgccagcctccctgctgctgaataaggatccaaacctcggactaaaccgcgatccacggcacttaccaaagcaggagccgatctctattattgatcagggagaacctaaggggacgggggccacatgtggaaagaagggatcccaggcaggtgctgaaggacagccttcgactgttaagaggtacactcctgcccgcattgcacctggactcccaggatgtcagacgaaagagctctctctgtggaaaccaaccggtcccgccaatatctatccccggtgctctgtgaacgggaagcccacatctacccaagtgctgccggtgggctggagtccttaccaccaggcctcactcctatcaatcggtatctcaagtgcaggtcagctcactccttctcagggtgctcctataagaccaacttccgtcgtctctgagtttagcggagttccctccctgagcagcagtgaggcagttcatgggcttccagagggccagccaaggccgggtggcagttttgtgcctgaacaggatcctgttacaaaaaataaaacctgtaggattgctgcaaaaccttatgaggaacaagtgaatcccgtgctgttgactctcagcccacagaccgggactctggctttgtccgtccagccctctggcggggacattaggatgaaccagggaccggaggagagcgagtcgcacctgtgcagcgacagcacgccaaaaatggaggggccgcagggcgcctgcggtcttaagctggcaggagacaccaaacctaagaaccaggtcctcgcaacctatatgagccatgagctcgtcctcgccactcctcagaatctcccaaagatgcctgagcttcccctcttgcctcacgactcacatcccaaggagttgatcctggacgtggtcccgtcatcgaggcggggctcctctacagagcgccctcaattggggtcacaggtggatctgggccgtgtgaagatggaaaaggtggacggagacgtggtcttcaatctggctacttgtttcagagctgacggcttgcctgttgcccctcagagggggcaagctgaggtgagggccaaggctgggcaagctcgggtaaagcaggagtcggtaggagtgttcgcatgcaagaacaagtggcagccagatgatgtgactgaaagcctgcctcccaagaagatgaaatgcggcaaagagaaggactcggaagagcagcagctccaaccacaggctaaggcggtagtacggagttcccatcgccctaaatgccgaaaactgccctccgatcctcaggagtccacgaagaagtccccacgaggtgcctctgacagtggcaaggaacacaacggtgtaagagggaaacataagcatagaaagccaactaaacccgagtcccaatctcctggcaagagggcagatagccacgaggaaggatctctggaaaaaaaggccaagagctcctttagagacttcattcctgtcgtgctgagcacccggacacgttcccaatcagacctgaaagctcgtaaacagaaaacatcttcaagccagtccctggagcaccggctgagaaatagaaacctcctgttacctaataaggtccaggggatttctgacagccccaacggatttctccctaataacctcgaagagccagcatgcctggagaattccgagaaaccctcggggaagcgcaaatgcaagaccaagcatatggcaaccgtttcagaggaagctaagtag

SEQ ID NO: 180492 - DNA, 4158 bp, synthetic construct
  misc_feature 1..4158: note = Description of Artificial Sequence: Synthetic coding sequence
  source 1..4158: mol_type = other DNA
acccccgccgccatccccaccagcgcccccatccccgccagcttcagcttatcgagagtctgtttccccgccgcccaagcgcctgcgatgcagaaagtccctttgagcttccaaccaggcactgtgctgactcccagtcaaccattggtgtatatcccgcccccctcgtgtggacagccattgtccgtcgcaacactgcccaccacattgggcgtcagttccaccctcacactgcccgtcctcccttcttacctgcaggacagatgccttccaggcgtgttggccagccctgaactgcggtcctatccttacgcattttcagtcgctagacctctgactagcgattccaagctggtctcgttggaagtgaatagactgccttgtacatcacctagcggatctactaccacccagcccgctcccgacggcgttcctggacccttggctgatacctccctggtgacagcctcggctaaggtgctgcccacaccacaacccctgttgccagcaccatctggaagcagcgctccacctcacccggccaagatgccttccgggacagaacaacagaccgaaggtacatctgtcaccttttcacctctgaagtcacctcctcaattggagcgggaaatggcatcaccaccagagtgcagcgagatgcccttggaccttagtagcaagtccaatcgccaaaagctgccactaccaaatcagagaaaaacgccaccgatgccagtgctcacaccggttcacacttctagtaaagcactgctgtccactgtcctcagtagatcccagcgtaccacccaggccgctggcggcaatgtaacgtcttgtctgggaagtacttccagtccatttgtaattttcccagagatagtccgtaacggggatccaagtacgtgggtgaaaaactcaactgccctgatctcaaccatacctgggacatatgtgggcgtcgctaacccggtccccgccagcctcctgctaaacaaggacccaaatctgggtctgaatagggatccccggcatctcccaaaacaagaacctatctctatcatcgaccagggcgagcccaagggcacaggcgctacatgtggtaagaaggggtcacaagcgggggccgagggacagccatccaccgtaaaaagatacaccccagccagaatcgctcctggacttcctggttgtcagacaaaggaactctcactatggaagcctacaggtccagccaatatatacccccgctgcagtgtgaacggaaagcccacaagcactcaggtgctgccagtcggatggagcccttaccatcaggcctcgctcctgtcaatagggatatccagcgctggccagctgacccctagccagggagccccaattcgccccacatcagtggtgtccgagttttcaggagtcccatctctctctagcagtgaagccgtgcacggcttgccagagggccagccccgaccaggtggatcattcgtgcctgagcaggatcctgtaacaaagaataaaacgtgtagaattgcggccaaaccttacgaggagcaggtaaatcctgtgctattgacactctctccacaaacgggcacattagcactgagtgtgcaaccgtctggtggagatattagaatgaatcaagggccggaggaaagtgagtcccatctgtgctcagacagcacccccaagatggaaggcccacagggagcttgcggcctgaaacttgcaggagacacaaagcccaaaaatcaagtgctcgccacctacatgtcacacgagttggtgctggctacaccacagaatctgcccaaaatgcctgagctgcccctccttccccacgactcacaccctaaggagctgatcctcgacgttgtacctagcagtcggaggggatcgagtacagaaaggcctcagctgggctcccaggttgaccttgggcgagtgaagatggagaaagtcgatggtgacgtcgtgtttaacctcgccacatgcttccgagccgatggcctgcccgtggcccctcagagggggcaggcagaggtccgtgccaaggccggacaggctcgggtgaagcaggagagtgtgggcgtatttgcctgcaaaaataaatggcagcctgatgatgtgactgaaagcctgcctccaaagaaaatgaaatgcggcaaagaaaaggactctgaggaacaacagttacaaccacaggctaaggcagtcgtgcgatccagtcatcgaccgaagtgtaggaaactgccaagcgacccgcaggagagcaccaaaaaaagtccaagaggcgcatcagactcagggaaggagcataacggggtgaggggcaaacacaagcatcggaaaccgactaaacccgagtcccagtctccgggcaagagggctgacagccacgaggagggaagcttggagaagaaggcaaagtcctccttcagagattttatccctgttgttctttctactagaacaaggtctcagtccggcagtatctgctctagctttgccggcatggccgattcagacatgggctcacaggaagtgttccccactgaggaagaggaagaagttactcctacccctgcgaagcggagaaaggtgagaaagactcagcgggacacacagtaccgcagccatcatgcccaggacaagagtcttctgtcgcagggacggcgacacctttggcgcgcccgcgaaatgccttggcggactgaagctgcccggcagatgtgggatacgaacgaggaggaggaagaggaagaggaggaaggattgctgaagcggaagaagcgccgccggcagaagtcgaggaagtatcagacaggggagtatcttaccgagcaggaggacgagcagcgcagaaagggccgggccgaccttaaggccaggaagcaaaagaccagttcatctcaaagcttggagcacagactccgcaatcggaacttgctgttgccaaataaggttcagggaattagtgacagcccgaacggatttctgcctaacaacctggaggagcctgcatgtttagaaaattctgagaaaccatcagggaaacggaagtgtaagaccaaacacatggcgacagtttctgaggaggcgaaaggtaaaggacgatggtcacagcagaagacaagatctccaaagagccccactccggttaaacccaccgaaccctgcacccccagcaaatcccgcagtgcatcgagcgaggaggccagtgaatcgccgacagcaagacaaattccgccagaggctcggcgcctcatcgtcaataaaaatgcaggagaaacgttgctccagcgcgccgcaagactggggtataaggatgtggtgctttattgcctgcaaaaggattcggaggatgtgaatcatcgtgataacgcggggtacacagccctccacgaagcatgttcccgggggtggaccgatatcttgaatattctcctggagcacggtgctaatgtgaactgttctgcccaggatgggacgcgcccagtacatgatgctgtcgtgaacgataaccttgagacaatctggttactgcttagctacggtgctgatccgaccctcgctacatattccggccagacggccatgaagctcgcttcaagtgacaccatgaagcgctttctgagtgaccatttgtctgatctccagggtcgggccgaaggagaccccggggtctcatgggacttctacagcagctctgtgctggaagagaaggacggttttgcatgcgatttgctgcacaaccctcctggttcctccgatcaggaaggcgacgatcctatggaagaggatgactttatgtttgagcttagtgacaagccattactcccgtgctataacctccaagtttctgttagcagaggcccttgcaactggtttctgttttccgatgtgttaaaacggttaaagctgtcatctcgcatttttcaggcgcgcttcccacatttcgagattactaccatgcctaaggcagaattctatagacaggtagcctctagccagctgctgacgcctgcagagaggcccgggggcctggacgaccgctccccccccgggtcttccgagaccgtcgagctcgtgaggtacgagcctgacctgctgcgactattgggttccgaggttgaatttcagagctgtaattcatag

SEQ ID NO: 180493 - DNA, 5136 bp, synthetic construct
  misc_feature 1..5136: note = Description of Artificial Sequence: Synthetic coding sequence
  source 1..5136: mol_type = other DNA
atgatcagcaccgcccccctgtacagcggcgtgcacaactggacctcctcagaccggatccgtatgtgcgggattaatgaggagaggcgcgcccccctgtccgatgaggaaagcactacaggcgattgccagcatttcggcagccaggagttttgtgtaagctcaagcttttccaaggttgagttgacggctgtgggatccggcagcaatgctcgcggagcagaccctgacggttctgctactgagaagctcggccataagtctgaggataagcctgacgaccctcagccgaagatggactatgccgggaacgtcgctgaggcagaaggctttctggtgcccctgtcttcccccggagatggactcaagctgcctgcctcagactcagcagaggcttccaatagcagagctgactgttcttggacaccgctgaacactcaaatgagtaagcaagtcgactgttcacccgccggggtaaaggccctggactctaggcagggggtcggcgagaagaacaccttcatactggctactctgggcaccggagtgcccgtcgagggtacccttcctcttgttaccacaaactttagcccactgccagcccccatatgcccccccgccccaggatctgccagtgtcccacactccgttccagacgcttttcaagtaccgctaagtgtccctgcgccagtgccccatagcgggcttgtgcctgttcaggtggctacaagtgtccctgcaccatccccgcctttagcccccgtccctgccttggccccagcccccccatcagtgcccacactaatctcggatagcaaccctttgagtgtctctgcctccgtgctggtacccgtcccggcgtcagcccccccttccggccccgtgcctcttagcgctcccgcacccgccccactgtccgtgcccgtgtctgcccctcctctggctctgatccaggcaccggtcccaccgagtgcaccaaccctggtactggcccccgtccccaccccagtcctggccccaatgccggcctccacacctcctgccgccccggcacctccttccgtgccaatgcctacacctaccccatcttctggacccccgtcaactcctaccctcatccccgccttcgcccctacgcccgttcctgcccccactccagcaccgatcttcacccctgcgccgactccgatgcccgccgccaccccggcggctattcccaccagcgcccccatccctgcttctttctccttatcaagggtgtgtttccctgccgcccaggctcctgcaatgcagaaggtgcccctctcctttcaacctggaacagtgctgaccccaagtcagccacttgtgtacattccccctccaagctgcggccaacccctttctgttgccaccctccctacgacactgggcgtgagcagcacccttaccttaccggttctccctagctatctacaggacaggtgcttgccaggtgtcttagcgagtcccgagctcaggagctacccctacgcattctcagtcgcaaggcccttgacaagcgattctaagctggtgtccctggaagtcaaccggctgccctgtacttcacctagcggatcgaccactactcaacccgcacccgacggcgtgccaggacctcttgcggatacatccctggtgaccgcgagcgctaaggtccttcctacacctcagcccctccttccagcacccagcggcagcagtgccccaccccacccagctaaaatgccatcagggaccgaacaacagacagagggcacctccgtgacattctccccactcaagagcccacctcagcttgaaagggaaatggcatcaccacccgagtgctctgaaatgcctttagacctgtcgtccaagtcaaacaggcaaaagttacctttacccaatcagcggaagactcctcccatgccggttttgactcctgtccatacatcatccaaagccctcctatcaactgtgctgtcgaggtcacaacggacgacccaggcggccggcggaaacgtaacttcatgccttggtagcacaagttcgccttttgtgatcttcccagaaattgtgaggaatggggacccaagcacctgggtgaaaaatagcacagcccttatctcaactatccctgggacgtacgtgggggttgccaatccagtaccagcatctcttctccttaataaagatccaaacctcgggctgaaccgtgaccctagacatctgccaaaacaggagcctattagtattatcgaccagggcgaaccgaaagggaccggcgcgacatgtggcaagaaagggtctcaagctggtgccgagggtcaacccagtacagtgaaacggtatacccctgctcgaatcgcaccaggcctgcccggatgccagacgaaagaactgtccctctggaaacctacaggacccgcaaacatctatcccagatgcagcgtgaacggcaaacctacctcaacccaagttttgccagtgggttggagtccataccaccaagcaagcctgctctccatcggcatctccagcgctggccagctgacaccaagccagggggcccctatccggcctacgagtgttgtctccgagttcagtggggtcccaagcctctctagtagcgaagcagtgcatggcctgccagagggacagccccgcccaggggggtcctttgtgcctgagcaagatcctgtcaccaagaataaaacatgccgcattgccgcaaagccttacgaagagcaggtgaacccagtgctactcacgcttagcccccagacaggcactttggctcttagtgtccaaccaagcggaggcgacatccgaatgaatcagggaccagaggaatcagaatcacatctgtgcagtgattcaacgcctaaaatggaggggccgcagggagcgtgcggccttaaacttgccggggacacaaaacctaagaaccaggtgctggctacctacatgagccacgagctggtgttggcaactccacaaaacctgccaaaaatgcctgagctgccccttcttcctcacgattctcatcctaaagaacttattcttgacgtggtaccttccagccgccggggatcatctacagaaaggccacagcttgggtcgcaggtcgacctgggacgagtgaagatggagaaagtcgacggggatgtagtgttcaaccttgctacctgtttcagagcagacggcctccccgtggcgccgcaacgcggtcaggctgaggtaagggcgaaagcaggccaggcgcgcgtgaaacaggagtctgtgggggtcttcgcctgcaaaaacaaatggcagccagacgatgtcactgagtcgttgccccccaagaagatgaagtgtggaaaggagaaggactcagaggaacagcaacttcagccccaggccaaggccgtggtaaggagctcccacaggcctaagtgtcggaaactgccatccgatccacaggagagcacgaagaaatctcctcggggcgcctctgattcgggcaaggagcacaatggggtcagaggaaaacacaaacataggaagcccacgaagccagagtctcagagtcccgggaaacgggcggactctcatgaggaaggaagcttagaaaagaaggccaagtctagctttagggatttcatccccgtcgtgctgtctacccgaacaaggtcacagtctggatctatctgttctagctttgcgggaatggccgattccgacatgggatcgcaggaggtttttcccacagaagaggaggaggaggtgacaccaacccctgcaaagagaaggaaggtgcggaagacccagagggatactcagtacagatcccaccatgcccaggataagtcactcctcagccaggggaggcgacacttgtggcgcgctagagagatgccttggaggacagaagcagccaggcagatgtgggataccaacgaagaggaggaggaagaggaagaggaggggttgctgaagcggaagaagcggaggcgccaaaaatctaggaaataccagacgggagagtatcttacagagcaggaggacgagcagcgcaggaagggacgagctgacttgaaagcccggaagcaaaagacctcttccagtcagtccttagagcataggttgagaaaccgcaacctcctcctgcctaacaaagtccaaggcatttctgattcccccaacggttttttgcccaacaatctggaggaacccgcttgccttgagaattccgagaaaccttcaggcaagagaaagtgcaagactaaacatatggctaccgtatccgaggaggctaaggacgttgttctgtactgcctgcagaaggatagtgaagatgtgaaccaccgggacaacgcaggctacaccgctttgcatgaggcctgcagtcggggatggacagacattctgaacatcttgctcgagcacggcgcgaacgtgaattgttccgctcaggacggaacacgaccagtgcatgatgccgtggttaatgacaatttggagactatttggctgctgctgagttacggggctgaccccactctcgctacatatagcgggcaaaccgccatgaaactggcctcatctgacacaatgaaacgttttttatccgatcatctcagtgacctgcaggggcgagccgagggcgatccaggagtcagctgggacttttactccagttctgttttggaagagaaggacggattcgcctgcgaccttttgcataatccgcccggttctagcgatcaggaaggcgatgatcccatggaggaggatgatttcatgttcgagctatctgacaagccactgctcccctgttataacctgcaagtatctgtcagccggggtccatgtaactggtttctattttcagacgtcctgaaacggcttaagctctcttcacgaatttttcaggcgcgctttccacacttcgaaataaccaccatgccaaaagccgagttctataggcaagttgcatcaagccagctgctgactcccgccgagcggcctggcggcctcgacgacagatcacccccaggttcttcagagacggtggagttagtgcgctatgagcccgaccttctgaggttattgggatctgaggtggaattccagagctgcaattcttag

SEQ ID NO: 180494 - DNA, 1260 bp, synthetic construct
  misc_feature 1..1260: note = Description of Artificial Sequence: Synthetic coding sequence
  source 1..1260: mol_type = other DNA
atgcccctgagcgacttcatcctggccctgaaggacaacccctactttggagctggtttcggactcgttggagtgggcaccgctctggcccttgctcgtaagggcgttcaactcggcctggtagcatttcgtagacactatatgataaccttggaggttcctgctagggaccggtcctacgcctggcttctgtcctggttgactaggcactccacacgcacccaacacttgagcgtggaaacatcctatctccagcatgagtccggtagaatcagcacgaagttcgagtttgtccctagtcccggaaatcactttatctggtaccgcggaaagtggattcgtgtagaacgaagccgggaaatgcagatgatcgatttacagacgggtaccccttgggagtccgtgactttcacagctctgggaactgaccgaaaagtgtttttcaatatcctagaagaggcccgcgaattggccctccaacaggaggaaggcaagacagtgatgtataccgctgtgggctccgagtggcgcccctttggctaccccaggcgccgacgtcccttgaattcagtggtgctgcaacaggggctcgccgatagaattgtcagggacgtacaggagttcatcgataatccaaaatggtatacagatcggggaattccttatagaaggggctacctgttatacggcccaccaggctgtggcaaaagctctttcatcactgctctcgcaggagagctggaacactcgatctgtttgctgagtctcactgacagctccctctccgacgatcgcctgaatcacctcctgtccgtggcaccccaacagtcactcgtgctcttagaagatgttgatgccgcctttttgagccgggacctggccgtggagaaccccgtgaaataccagggcctaggcagattgacattttcggggttactgaatgccctggatggagtggcctccaccgaggctcgtatcgtcttcatgacaaccaaccatgtggataggctggaccctgccctgattcgcccaggcagggttgatcttaaggaatatgtaggatattgttcccactggcagctgacacagatgtttcagagattctacccgggacaagctccgtcgctggctgagaatttcgccgaacacgtcctcagggccactaatcagatttcacctgcacaagtccagggctacttcatgctctataagaacgaccctgtgggcgctatccacaacgccgagagcctgcggcggtag

SEQ ID NO: 180495 - DNA, 1260 bp, synthetic construct
  misc_feature 1..1260: note = Description of Artificial Sequence: Synthetic coding sequence
  source 1..1260: mol_type = other DNA
atgcccctgagcgacttcatcctggccctgaaggacaacccctacttcggagctggcttcggcctcgtgggtgttgggactgctctggccctggcccgcaagggcgtgcaactaggtctcgtggccttccgaagacattatatgatcaccctggaggtcccggccagggaccggagctacgcctggctgctgagctggctgactcgacattctaccagaacccagcacctctccgtagagacctcatacctccagcacgagtctggccgtatttctactaaattcgaattcgttccctcgccagggaaccattttatctggtacaggggtaagtggatcagggttgagagatcccgagagatgcagatgattgatctccaaacagggaccccatgggaatcagtaaccttcacagcactgggcaccgatagaaaggtatttttcaatatccttgaggaggcccgtgaactagcactccagcaggaggaagggaagacagtgatgtataccgcagtaggctctgagtggcgcccattcgggtacccgagacgaagaagacccctgaatagcgtggtccttcagcagggtctggcagacaggattgtccgcgacgtacaggaatttatcgacaatcccaagtggtataccgatcgagggataccttacagaagaggatatcttctctacggcccccctgggtgcggcaagtcaagcttcattacggcactagcaggagaacttgagcatagtatatgtctcctctcgttgaccgatagttctctctctgacgatcgcctgaaccatcttttatctgtagcaccacagcagtctctcgtgctcctcgaggatgtggatgctgctttcttatctcgcgacctggccgtggagaacccagtaaaatatcagggtctaggccgattgacattctcagggctacttaacgctctggatggggtggcctccaccgaagccaggattgtcttcatgactactaaccacgtggataggcttgaccctgctctgatcagaccggggcgcgtggaccttaaggaatacgttgggtactgtagtcattggcaattgactcagatgttccaacgattctatcccggccaggccccatctttagctgaaaattttgccgagcatgtgctgcgcgccacaaaccaaatttcccccgctcaggtgcaggggtatttcatgctatataaaaatgaccccgttggcgccatccacaatgctgagagcttgaggcgctag

SEQ ID NO: 180496 - DNA, 1260 bp, synthetic construct
  misc_feature 1..1260: note = Description of Artificial Sequence: Synthetic coding sequence
  source 1..1260: mol_type = other DNA
atgcccctgagcgacttcatcctggccctgaaggacaacccctactttggcgccggattcgggttggtgggagtggggaccgccctggctctcgcccggaagggcgtgcagctgggcctagtggcctttaggcggcattacatgatcacactcgaagtgccggctagggaccgttcttatgcatggctcctgtcttggctcactcgccatagtaccaggactcagcatctctctgtagagacgtcctatctgcagcatgaaagtggccgaatctctacaaaattcgaatttgtccccagccccggcaatcattttatttggtacagagggaagtggatcagggttgagcgaagtagagaaatgcagatgatagacctgcagacaggaacgccatgggaatctgtgacattcacagcgttaggtactgacagaaaagtattctttaatatcctggaggaagctcgcgagctcgccctccagcaggaggagggcaaaaccgtgatgtatacggcggtggggtccgaatggcgcccttttggataccccaggcgcagaaggcctctcaacagcgtggtgctccaacagggactggcggataggatcgtgcgggacgtccaggaattcatcgacaaccccaagtggtatactgacagggggattccgtacagacgaggctacctgttgtacggtcctccagggtgcgggaaatccagtttcatcaccgccctcgctggcgaactcgaacacagcatttgtctgctttctcttacagactcgagcttaagcgatgaccgcctgaatcatctcctcagtgtcgctccacaacagtcactggttctgctggaggacgtggatgcggccttcttgagtcgtgatctggccgtagaaaacccagtgaagtatcaggggttaggacgattaaccttctccggcctgctgaatgcactcgacggtgtggcctccactgaggcccggattgttttcatgaccacaaatcacgttgatcggctggatccagcactcatccggcccgggagagtagacctgaaagagtatgtgggttactgctcccattggcaactaacgcagatgttccagcggttttacccggggcaagcaccaagccttgccgagaattttgctgaacacgttctgcgcgctacgaaccagataagtccggcacaggtccaggggtactttatgctgtataagaatgatccagtgggagctatccacaatgctgaatccctgcggcggtag

SEQ ID NO: 180497 - DNA, 1260 bp, synthetic construct
  misc_feature 1..1260: note = Description of Artificial Sequence: Synthetic coding sequence
  source 1..1260: mol_type = other DNA
atgcccctgagcgacttcatcctggccctgaaggacaacccctactttggcgccggctttggattagtcggggtaggcactgcgctggcgttggcccgcaagggcgtgcagctcggtctcgtcgcttttcgcaggcattacatgattacgttggaggtgcctgcccgcgacaggtcctatgcttggctgcttagctggttaactcggcacagcacccgaacacagcacctgtccgtcgagacatcttacttgcaacacgaatctggacgcatttcaacaaagtttgagtttgtgccctcccctggtaatcattttatctggtaccgcggtaagtggatccgcgttgagaggagtcgagagatgcaaatgatcgacctgcagaccggtacaccatgggagtcagttacttttacggctctcggcaccgatcgcaaggtgtttttcaacatcctggaagaggccagagagttagccctccagcaggaagagggcaagactgtaatgtacacggccgtagggagcgagtggcgtccctttggatatccacgaaggcgcagacccttgaactccgtggtgctgcagcaaggcctggcagaccgaatagtccgcgacgttcaagaattcattgacaaccccaagtggtacactgatcggggcattccatatagaaggggctatctgctgtacggccccccgggatgtggcaagagctccttcatcactgcattggctggtgagctagagcactccatttgtcttctcagcctgacagactccagcctttcagacgacagactaaaccacctcctgtccgtagcgcctcagcagtctttggttctcctggaagacgtggacgccgcgtttctatcacgtgacctggccgtcgaaaaccctgtcaaatatcaaggattgggcagactgaccttcagtggcttattaaacgctctggatggagtcgcctccacagaggccagaattgttttcatgactactaaccacgttgacaggctggaccccgctcttattaggccagggagggtggatttgaaagaatatgtgggatattgctcccattggcagctcactcagatgtttcaaaggttttacccagggcaggcccccagtttggctgagaactttgcagaacacgttcttcgcgctaccaaccagatctcgcccgcccaggtccaagggtatttcatgctctataaaaacgaccccgtaggggccatccacaacgcggagtccttgcgccgatag

SEQ ID NO: 180498 - DNA, 1260 bp, synthetic construct
  misc_feature 1..1260: note = Description of Artificial Sequence: Synthetic coding sequence
  source 1..1260: mol_type = other DNA
atgcccctgagcgacttcatcctggccctgaaggacaacccctacttcggcgctggatttggccttgtcggggttggcacggccttggcattagcccgcaaaggcgtgcagctggggctggtggctttccgtcggcattatatgatcaccttggaagttcctgctcgagatcgctcctatgcttggctgctaagctggttgacgcggcactcaacccgtactcagcatttgtccgtggaaacttcttatctgcagcacgaatcagggcggattagcactaaatttgagttcgtccccagcccagggaaccactttatatggtaccggggtaagtggatcagggtcgaaaggtcacgggaaatgcagatgatcgatcttcagaccgggaccccctgggaaagtgttacttttacagctttgggaactgacaggaaggtcttctttaacatcctcgaagaggctcgggagttggctctgcagcaggaagaaggaaagactgtgatgtatacggccgttgggagtgagtggagaccattcggctatccaaggcggcgccgaccacttaacagcgtggttctgcagcaggggctcgctgaccgcatcgtgcgcgacgtccaagaattcattgataaccccaagtggtacacagatcggggcattccctaccgacgcggttacctcctttacggcccgccagggtgcggcaagtcaagcttcatcacagctttggctggagaattagagcactcaatttgtcttctttccctcactgactcaagtctgagcgatgatcggcttaatcatctcctgtctgtggctcctcagcagagtttggttctgttggaggacgttgatgccgcgtttctgagcagagatcttgctgtcgagaatcctgtcaaatatcagggcctaggaaggttgacttttagcggtctgttgaatgcccttgacggggttgcctccactgaagcgagaatcgtgttcatgactacaaatcacgtcgacaggctggaccccgctctcatcaggccaggccgggtcgaccttaaggagtatgtcggctactgttcacattggcagttgacccaaatgttccagcgcttctaccccgggcaagcaccgagcttagccgagaacttcgctgaacacgtcctgagggccacaaatcaaatcagcccggcacaggtgcagggctacttcatgctttataagaatgaccctgttggcgcaatccacaacgccgaatctttgcggagatag

SEQ ID NO: 180499 - DNA, 333 bp, synthetic construct
  misc_feature 1..333: note = Description of Artificial Sequence: Synthetic coding sequence
  source 1..333: mol_type = other DNA
atgcccctgagcgacttcatcctggccctgaaggacaacccctacttcggagccggatttggcctagtgggggttggcacagcgcttgctctcgctcggaaaggagtccagttgggactggtcgcctttagacggcactacatgattacactcgaagtgcccgcacgcgatcgatcctatgcctggttactgagctggttaaccagacacagcacacgaacccaacacctgagtgtcgaaacatcctatctgcagcacgagagcggtcgcatttccaccaaattcgaatttgttccgagccccgggaatcatttcatatggtatcgtgggtag

SEQ ID NO: 180500 - DNA, 234 bp, synthetic construct
  misc_feature 1..234: note = Description of Artificial Sequence: Synthetic coding sequence
  source 1..234: mol_type = other DNA
atgcccctgagcgacttcatcctggccctgaaggacaacccctacttcggtgccggcttcggcctcgtcggggtgggaacggccctagcactagctcggaagggcgttcaattgggactcgtggcattccgtcgacattatatgattacactcgaggtgccggcccgagaccggtcttacgcttggttattgtcttggttgaccagacactcaaccagaacccagcacctttag

SEQ ID NO: 180501 - DNA, 621 bp, synthetic construct
  misc_feature 1..621: note = Description of Artificial Sequence: Synthetic coding sequence
  source 1..621: mol_type = other DNA
atgcccctgagcgacttcatcctggccctgaaggacaacccctactttggtgccggcttcggccttgtaggggtgggtaccgcactggcattagcccgaaaaggcgtgcagctgggcctcgtcgctttcaggaggcactacatgattaccctggaagtacccgcaagggaccggagttacgcttggcttctatcttggctcacaagacactctacccggacgcagcacctctctgtggaaacctcatatctgcagcacgaaagcggaaggatcagcactaaatttgaattcgtccccagtccaggtaatcacttcatctggtatagaggcaagtggatcagagtggagcggagccgggagatgcagatgatcgacttgcagaccggcactccatgggagtctgtgactttcacagccttgggaactgaccgcaaagtgtttttcaatatcctggaggaggccagagagttagctctgcagcaggaagaaggaaaaacggtcatgtacaccgccgtgggaagcgagtggaggccttttggctaccctcgccggaggcgccccctcaatagcgtcgtcctgcagcagggactggccgatcggatagttagggatgttcaatag

SEQ ID NO: 180502 - DNA, 1260 bp, synthetic construct
  misc_feature 1..1260: note = Description of Artificial Sequence: Synthetic coding sequence
  source 1..1260: mol_type = other DNA
atgcccctgagcgacttcatcctggccctgaaggacaacccctactttggggcgggcttcggcctggtaggcgtggggactgctctggcactagctagaaagggtgtgcagcttggattagtggcctttagacgacactatatgatcaccctggaggtgccagcacgcgatcgatcttatgcttggctgctgtcctggctgacccgccatagtaccaggacacagcatttgagcgttgaaacctcatacctccagcatgagtcaggcaggatttcaactaaatttgaattcgtgccaagccccggtaatcattttatttggtacagggggaaatggattagggtggaacggagtcgggagatgcagatgatagatcttcagactggcacgccttgggagagtgttaccttcactgcactcggcacagatcggaaggttttcttcaatattctggaggaggcaagagagctggcactgcagcaggaagaggggaagactgtgatgtacacagccgtgggatccgaatggcggcccttcggttacccacggaggcggcgtccactcaattccgtggttcttcaacaagggctcgccgacagaatcgtcagggacgtgcaggagtttatcgataatccaaaatggtacaccgatcggggtatcccatacaggaggggttacctgctatatggaccaccggggtgcggcaaatcatcttttattactgctttggctggcgagctggagcacagcatctgcctgctctctcttacagattccagcttgtctgatgaccggctgaatcacctgctgtccgttgcaccacagcagtccttagtcctcctcgaagacgtggatgcggcgtttctgagccgcgacctggcggtggaaaatccggtgaagtatcaaggccttggaagattgaccttcagcgggctactcaatgcgttagatggggtcgccagcactgaagcaaggattgtgttcatgaccaccaaccatgttgatcgcttagaccctgccttgattcgccctggacgggtggaccttaaggagtatgtaggatattgcagtcattggcaactgacacagatgtttcaacgcttctaccccggacaagccccaagcctcgcagagaatttcgccgagcatgtactcagggccaccaaccagatttcaccggctcaagtgcagggatattttatgttgtacaaaaacgacccagtgggcgccatccacaacgcggagtctcttcgtcggtag

SEQ ID NO: 180503 - DNA, 1260 bp, synthetic construct
  misc_feature 1..1260: note = Description of Artificial Sequence: Synthetic coding sequence
  source 1..1260: mol_type = other DNA
atgcccctgagcgacttcatcctggccctgaaggacaacccctacttcggtgcaggcttcggccttgtaggtgtcggtactgctttggcactggcaaggaagggagttcagctgggactggtggccttccgcagacactacatgatcactctagaggttcctgcccgtgaccggagttacgcctggttactctcttggctgacacgccactcaacccggacccagcatctaagtgtggagacttcttacctccagcacgagagcggacgtatttctacaaagtttgagttcgtgccatcgccggggaaccacttcatctggtaccggggcaagtggatcagggtcgaacggtcacgggagatgcagatgattgatcttcaaacaggaactccatgggaatcagttacatttactgctctgggtactgatcggaaagtgttctttaacatcctcgaagaagcgcgcgaactcgccttgcagcaggaggaaggcaagaccgtgatgtacaccgctgtgggaagcgaatggcggccattcggataccctagacgtaggaggcctctgaacagtgtggtcctgcagcagggcctagccgaccggatagtccgagacgttcaggaattcatagataacccaaaatggtacaccgatcggggaatcccatatcgcagaggctatttactgtatggacctcctggctgcggaaagagctccttcataacagcccttgccggggagctggagcactcgatttgcctcctgagccttactgattcttcactgagcgatgaccggctcaatcacctgctttcggtggccccacagcagtccctggtgcttcttgaggacgtagacgctgcatttttgagcagagacttggccgtggagaaccccgttaaatatcagggcttgggccggcttaccttcagtggattgctcaatgctttggacggcgtcgcctccaccgaagcaagaatagtgttcatgaccaccaaccatgtggatcgtcttgatcccgccttgattcgtcccggacgcgtcgacttaaaagaatatgtggggtactgctcacactggcagcttacccagatgttccagaggttctaccctggccaggctccgtctctggcagaaaactttgcagagcacgttctcagagccacgaaccaaattagtccagcacaggttcaggggtacttcatgctgtacaaaaacgatcctgtgggcgctatccataacgcggagtccctccggagatag

SEQ ID NO: 180504 - DNA, 621 bp, synthetic construct
  misc_feature 1..621: note = Description of Artificial Sequence: Synthetic coding sequence
  source 1..621: mol_type = other DNA
atgcccctgagcgacttcatcctggccctgaaggacaacccctactttggcgcaggcttcggcttggtcggcgttggtactgcgctggcacttgccaggaaaggcgtccagctcggcctagtcgccttcagaagacattacatgattacccttgaagtgcccgcgcgcgatagatcgtacgcatggcttctaagctggctcacccgccacagcacaagaacccaacatctctcggttgagactagttaccttcaacatgagtcaggtcggatttccactaaattcgagttcgtgcccagtccaggaaaccatttcatatggtacagggggaagtggattcgagttgagcggagccgtgaaatgcagatgattgacttacagactggaacaccctgggagtcagttacattcacagcgctgggtactgaccgaaaagtattcttcaatattctcgaggaggctagggaactggcgctgcagcaggaagaaggcaagacagtgatgtacacagccgtgggctccgagtggagaccattcggctatcctagaaggcgaaggccacttaatagcgtcgtacttcagcaggggctggcagatcggatagttagggatgtccagtag

SEQ ID NO: 180505 - DNA, 1623 bp, synthetic construct
  misc_feature 1..1623: note = Description of Artificial Sequence: Synthetic coding sequence
  source 1..1623: mol_type = other DNA
atgtacgagaacgagtgcgagtgccagctgctgctgaaggagatgctcgaaaggctgaataaggaggccgacgaggcgctactgcataacttaaggttgcagttggaagctcagtttctccaagacgatataagcgccgcgaaagacagacacaagaagaacctgcttgaagtccagacatacatcagtatcttgcaacaaattatccacacgacccccccagcctccatagtaacatccggcatgagagaagagaagctgttaacagaacgggaggtggccgctctgaggagccagttggaggaaggcagagaagtgctgtctcatctgcaggcgcaacgcgtcgaattgcaagcccaaactactactctagaacaggctatcaagtctgcacacgagtgttacgatgacgaaattcagctttacaacgaacagattgaaacccttagaaaggagatcgaagaaacagaaagggtgctggagaaaagctcatatgactgccggcagctggctgtagcgcaacaaacactcaagaatgaattggatagatatcatcgaattattgagattgaaggcaaccgactcacttccgcattcattgagacgcctatccccttatttacacagagccatggcgtctcgctctccactggcagcggaggcaaggatcttacccgggccttgcaagacatcacagcggccaagccgagacagaaagccctcccaaaaaatgtgccgcggaggaaagaaattatcactaaagataagacaaacggtgcacttgaagacgcccccctgaagggactggaggataccaaactggtgcaggtggtgcttaaggaagagtccgagtcaaagtttgagtcagaaagcaaagaagtaagtcctttgacccaggaaggagcccccgaagacgtacccgatggaggccagatttcgaaggggttcggcaagctctaccggaaagtgaaagagaaggtcaggtcccccaaggagcccgagactcccactgagctgtacaccaaggaacgccacgttctggttacgggtgacgcgaactacgtggacccaagattttacgtatcctccatcaccgcaaagggtggagtggccgtttcagtggcagaggactccgtgctttatgacggccaagtcgaaccaagtccggagtctccaaagccccctttggagaacggtcaagtgggcctccaggagaaggaagatggccaacctatagatcagcagcccattgacaaggaaatcgagcctgatggggcggagctggaaggacccgaggagaaacgcgagggggaggagcgggacgaagagagccgcaggccatgcgccatggtgacaccaggagctgaggaaccttcgattccagagccaccaaaacctgccgccgaccaggatggcgcagaagtattaggcaccaggtctaggtccctgccagagaaggggccgccaaaggccctagcctataagactgtggaggtggtcgaatctatagaaaagatcagcactgaatccattcaaacttatgaggagaccgccgtgatcgtggagactatgatcggaaaaactaagagtgacaaaaagaagagtggggagaagtcctcttag

SEQ ID NO: 180506 - DNA, 1998 bp, synthetic construct
  misc_feature 1..1998: note = Description of Artificial Sequence: Synthetic coding sequence
  source 1..1998: mol_type = other DNA
atgtaccggcggagctacgtgttccagacccggaaggagcagtacgagcacgccgatgaggcaagtcgcgccgcggagcccgagagacccgcagatgaagggtgggcgggagctacctctctggcggcactgcaaggacttggggaacgggtggccgcccatgtgcaaagagctcgtgccctggaacaacgacatgccgggctgcgccgtcagctggatgcgtttcagcgactgggcgaactggcaggccccgaggacgccctcgccagacaggtcgaatcgaacaggcagcgcgtcagagatctcgaagctgagcgcgcccgcctggagcgtcaggggacagaagcccagagagctcttgacgagtttcggtctaagtatgaaaatgagtgtgaatgccagctcctcctgaaagagatgctcgaaagactcaacaaggaggccgacgaagctctacttcacaacctccgtctccagctggaagctcagttcctgcaggatgatatttctgccgccaaggatcggcataaaaaaaacttgctcgaagtgcaaacgtatatttcaattctgcaacagataattcacaccacaccccccgcctctattgttacgtccgggatgcgcgaagagaaactgctgaccgagagggaggtcgccgcactaagatcccagcttgaggagggccgcgaagtgctgtctcatttgcaggcccagagagttgaactccaggcacagacaacgaccctggagcaggctattaagtcagcacatgaatgttacgacgatgagattcaactctataacgagcagatcgaaaccctgcgcaaagagattgaggagaccgaacgcgtactcgagaaatctagctatgactgtaggcagctagctgttgctcagcagacattgaaaaacgagcttgaccgttatcatagaattatcgagattgagggtaaccggctcacgtccgctttcatcgaaacacccataccactgttcactcagtcgcacggcgttagcctttcaaccggcagcggtggtaaagacctcaccagggcattgcaggatataacagccgccaaacctcgacaaaaggctctgccaaagaacgtgcctcgccgcaaggagatcatcacgaaggataagaccaacggcgctctggaggatgcgcctctgaagggcctcgaggatacaaaattggtgcaagtcgttctgaaagaggaatctgagtcaaagttcgagtctgagagtaaagaggtatcacctttaacccaagagggtgctcctgaggacgtcccagacggaggccagatctccaagggatttggtaagttatataggaaggtgaaggaaaaagtaaggagtcctaaggagcccgagacacctacagaactctatactaaagaacgacatgtgcttgtgactggtgatgccaactacgtcgaccccaggttctacgtcagtagcatcactgctaaaggaggagtggctgtgtctgttgccgaggatagcgtcctttacgacggccaagtcgaaccctccccggagagcccaaagcctccgctggaaaatgggcaggtggggctgcaggagaaggaggacggacagcccatcgatcagcaacctattgacaaggagatcgagccagacggcgcggagctcgaaggccctgaggaaaaacgggagggggaggagcgtgatgaggagtcacgtcgaccctgcgccatggtaacgcctggtgctgaggagcccagcatacctgaacctccaaaacccgccgccgaccaggatggcgccgaagtcctgggcactagatccagaagtttgcccgagaagggcccacctaaagcactcgcatacaagacagtggaagttgtggagtctatcgagaaaatcagcacagagtctattcagacatacgaggagacagccgttatcgtcgaaaccatgatcggaaagacgaaaagcgacaaaaagaagagcggcgagaagtcttcgtag

SEQ ID NO: 180507 - DNA, 1581 bp, synthetic construct
  misc_feature 1..1581: note = Description of Artificial Sequence: Synthetic coding sequence
  source 1..1581: mol_type = other DNA
atgctggagcggctgaacaaggaggccgacgaggccctgctgcacaatttgcggctccagctggaagctcagttcttgcaggatgatatatccgctgccaaggaccgccacaaaaagaacctgcttgaggtccagacctacatctcaatactccagcagattatccatactactccgcctgcttctattgtgactagtgggatgcgggaagaaaagctgctgaccgagagggaagtggctgctctgaggagtcaactcgaagaaggcagagaagttctgagtcatttgcaggcgcaacgggtcgagctacaagcccagaccaccacactggaacaagccattaagtctgcccacgagtgttatgatgacgaaattcaactttacaacgagcaaatcgagacattgcggaaagagatagaagaaaccgaacgggtcctagaaaagagctcctacgattgtagacagttggctgtggcccagcagacattaaagaacgaacttgaccgatatcaccggatcatcgaaattgagggcaaccgacttaccagcgcattcatcgagacacccatcccgctgttcacccaatcgcatggggtgtctctatcgacaggaagcggaggcaaggacttgacccgggctttgcaagacatcacggccgcaaagccacgacaaaaagccctgcctaagaatgtgcccaggcgaaaagagattatcaccaaagacaaaactaatggcgcgctggaagacgctcctctgaagggcctggaggacactaaactcgtgcaggttgtgcttaaagaggagagcgagtctaagttcgaatccgaaagcaaggaagtcagccctttaacgcaggagggtgcacccgaagatgttcccgatggcggccagatatccaaaggattcggcaagctatataggaaagtcaaggagaaagtcagatcccctaaagaaccggagaccccaactgaattgtacaccaaagaacggcatgtcctggtcactggagacgcgaactatgtggatccacggttttacgtatcaagcattacggccaagggtggggtggcggtatccgtggcagaagactcagtcttatatgatgggcaggttgaaccaagccctgaatcccccaagcccccgctggagaacggccaggtcggactccaggaaaaggaggacggacagcccattgatcagcagcccatcgacaaggagatcgaacctgacggtgccgagctcgagggacccgaagagaaaagggagggggaggaaagggacgaggaatcccgccgaccgtgcgccatggtaaccccaggggccgaggagcccagcatacctgagcctccaaagccggccgctgaccaagatggagcggaggtgctcggaactaggagcaggtctctgccggagaaggggcctccgaaagcgctagcttacaaaacggtagaagtcgtcgaaagcatcgaaaagatttccaccgagagcattcagacctacgaagagacagcggtgatcgtggagactatgattggcaaaacaaagagtgataagaaaaagtccggggaaaaatcttcgtag

SEQ ID NO: 180508 - DNA, 1581 bp, synthetic construct
  misc_feature 1..1581: note = Description of Artificial Sequence: Synthetic coding sequence
  source 1..1581: mol_type = other DNA
atgctggagcggctgaacaaggaggccgacgaggccctgctgcacaatcttagattacagctggaagcgcagtttttgcaggacgatattagtgctgccaaggatagacacaagaagaatctgctggaggttcagacttatatcagtattctgcagcaaattatccataccacgcctcccgctagcatcgtcacctccggcatgagagaagaaaaactgttaacagagcgagaggttgccgcactgagatcacaactagaagaagggcgcgaggtcctgagccatctgcaagcacaacgggtcgagcttcaggctcaaactactacgttagaacaggccattaaatctgcgcacgagtgctacgacgacgagattcagctgtacaatgaacagatcgagacactgcggaaggagatagaggagaccgagcgcgtactcgaaaaatcaagttacgactgcaggcagctggcagtagctcaacagaccttaaagaacgagctggaccggtaccacagaattattgagattgagggaaatcgcctcacttccgcttttattgagactccaatccctctgtttactcagagccacggagtctctctttccactggcagtggggggaaggatttaaccagagcactccaagatataacagccgcgaagcccagacagaaggcactccccaaaaatgtaccccgccgtaaggagatcatcaccaaagacaagacaaacggcgctcttgaagatgcgcctctgaaaggtctggaggacactaagcttgtgcaagtcgttctgaaagaggagtccgagtccaagtttgagagcgaaagcaaggaggtttccccgctaacccaggaaggagcccccgaggacgttccagacggcggacagatttctaaagggtttggaaagttgtatcggaaggtcaaagagaaggttagaagccccaaggagcccgaaaccccgacagagctctatactaaagagcgacacgtactggtcacaggggacgccaactatgtcgacccacgcttctacgtgtccagcataaccgccaaaggaggagtcgcagtcagcgtggcagaggacagtgtactgtatgatggtcaggtggagccttcaccagaatctccaaagcctcctctcgaaaatggccaggtgggactccaggaaaaagaggatggccaaccaattgatcagcagcccatcgacaaagaaattgaacccgacggcgcagagttggaaggaccagaggagaagcgggagggcgaggaaagggatgaggagagccgcaggccatgtgcgatggtgactccaggcgctgaagagcctagtatacccgagcccccaaaacccgccgctgatcaagatggggccgaggtcttgggcacgcgaagtcgctcgttacctgaaaaagggcctccaaaggccctggcatacaagacagttgaagtcgtggagtctattgaaaaaatatctacggagagcattcaaacatacgaagagacagcagtgattgtagagactatgatcggcaaaactaagtctgacaaaaagaaaagcggcgaaaagtcaagctag

SEQ ID NO: 180509 - DNA, 1248 bp, synthetic construct
  misc_feature 1..1248: note = Description of Artificial Sequence: Synthetic coding sequence
  source 1..1248: mol_type = other DNA
atgagcgagcggcgggtggtggtggacctgcccaccagcgccagctcctcaatgcctctccagaggcgaagggccagcttccgcggaccgaggtcatctagttccctcgaatctccacccgccagtaggacgaacgcaatgagcggactcgtccgggcgcctggagtttacgtggggaccgcccccagcgggtgtatcggcgggcttggggcgcgagtcacgcgccgcgccctcggaatctctagcgtatttctgcaaggtctcaggagttccggtctcgccacagtacccgcaccaggtctggagcgagaccacggagccgtagaggacttaggagggtgcctagtcgagtacatggccaaagtgcacgcgctggagcaggtgtctcaggagctggagactcagctcaggatgcatctggaatctaaagcaactcgaagcggtaactggggtgctctgagggccagttgggcctcttcttgtcagcaagtgggggaagccgtcctggaaaacgctcgactgatgttacagacggaaaccatccaggcgggcgccgacgacttcaaagaacgctatgaaaacgaacagccgttccggaaggcagcggaagaggaaatcaactcgctatataaagtgattgacgaagcgaatttaactaagatggacctcgaatcacagattgagagcctgaaggaagaactgggatcattgagcagaaactacgaggaagacgtcaaactgctgcacaagcagttagccggatgcgagctcgagcagatggacgccccaatcggaaccggcctggacgatatcctggaaactataagaatccaatgggagcgggacgtggaaaagaatcgcgttgaggccggcgcattgttgcaggctaaacagcaggccgaagttgctcacatgtctcagacccaggaggaaaaattggctgctgctctcagagtggagctacataacacctcttgccaggtgcagtccctacaagcggaaacagagagtctcagagccctgaagaggggccttgagaacaccctgcacgacgccaaacactggcatgatatggaactccaaaatctcggcgccgtggtcgggaggctcgaagctgaacttagggagattcgcgctgaggcggagcagcagcagcaggaacgggcccacctgctcgcccgcaaatgtcagctccagaaggacgttgcgtcttatcacgccctgcttgatcgggaggaatccggttag

SEQ ID NO: 180510 - DNA, 1353 bp, synthetic construct
  misc_feature 1..1353: note = Description of Artificial Sequence: Synthetic coding sequence
  source 1..1353: mol_type = other DNA
atggagggcagcaagaccagcaacaacagcaccatgcaggtgagctttgtgtgtcagaggtgtagtcagccactcaaacttgatacgagctttaaaatactggacagagtcactattcaggaactgacagctccgctgctgaccaccgcacaagccaagcccggtgagacccaggaggaagaaacaaattcgggagaggagccttttatcgaaacgcccaggcaggacggagttagccggcgattcatccctcctgctcgcatgatgagcaccgagtccgcaaactctttcaccctcataggggaggcaagtgacggagggaccatggagaacctaagccggaggttgaaggtgactggtgacttgtttgatatcatgtccggtcagaccgacgtggaccaccctttgtgcgaggagtgcactgacacactcttggaccaactggacacgcagctgaacgtcactgaaaatgagtgccagaactacaaaaggtgccttgagattttggagcagatgaatgaagacgattccgagcaattgcagatggagctgaaggagctcgcactcgaagaggagcggctgatccaggagttggaggacgtggaaaagaatcgcaagatcgtcgccgaaaatctggaaaaggtgcaggcagaggcagagcggctggaccaggaggaagctcaatatcaacgcgaatatagtgaattcaagcgacagcagctggagctggatgatgaattaaagagcgtcgagaatcagatgcgctatgcccagactcaattagacaaactgaaaaagaccaacgtgttcaatgcaaccttccatatctggcactctgggcaatttgggaccattaataatttccgactcgggagacttccatctgtgcctgtggagtggaacgagattaacgctgcctggggccagacagtgcttctgctgcatgctcttgcaaataaaatggggcttaagttccagagatacaggctggtgccctatgggaatcattcatacttagagagtctaaccgacaagagcaaggagctgccactgtactgtagcggcgggttgcgctttttttgggacaataaattcgatcatgcaatggtggcctttctcgattgtgtgcagcagtttaaggaagaagtagagaagggcgaaacccgtttttgtctaccttaccgcatggatgtggagaagggaaaaatagaggatacagggggatccgggggatcttactctatcaagacccagttcaactcagaggagcagtggacaaaggctctcaagtttatgttgactaacttgaagtggggcctggcttgggtttctagccagttctataacaaatag

SEQ ID NO: 180511 - DNA, 840 bp, synthetic construct
  misc_feature 1..840: note = Description of Artificial Sequence: Synthetic coding sequence
  source 1..840: mol_type = other DNA
atggagggcagcaagaccagcaacaacagcaccatgcaggtgagcttcgtgtgccagcgttgttcccagccactcaaactggataccagttttaaaatattagaccgggtaacaatccaggaactcaccgcgcccctcttgaccaccgcccaagctaagccaggagaaacccaggaggaagagaccaacagtggtgaggagcccttcattgagacaccccgccaagacggagtgtcccgacgattcattccacctgcccgccgatgcctcgagatattggagcagatgaacgaggacgactctgagcagcttcagatggagctcaaggagcttgccctggaggaagaacgcctgatccaggaattagaggatgtcgaaaaaaaccgtaagatcgtggccgaaaaccttgagaaggtgcaggcagaggctgaaagattggatcaggaagaggcccagtatcagagggagtattccgagtttaagagacagcagttggagttagatgacgagctcaaatccgtggaaaatcagatgcggtatgcccagacacagctcgacaagctcaagaagaccaatgtcttcaatgctacttttcacatctggcattccggccagttcggaactataaacaattttaggttgggcagacttccttctgtgcccgttgaatggaatgaaatcaatgccgcctggggacaaactgtgcttctgctgcatgctttagcaaacaaaatgggcctgaagttccaacggtacaggctcgtaccctatggaaatcactcttacttagagagcctgacagacaagagcaaggatgggtgtggcgagcgccaggactag

SEQ ID NO: 180512 - DNA, 1092 bp, synthetic construct
  misc_feature 1..1092: note = Description of Artificial Sequence: Synthetic coding sequence
  source 1..1092: mol_type = other DNA
atgatgagcaccgagagcgccaacagcttcaccctgatcggcgaggccagtgacggcggtaccatggagaacctgtccaggcgcctgaaggttaccggggacctgtttgacattatgtctggacagacagatgtagatcacccactttgtgaagagtgtaccgacacgctgctcgatcagctcgatactcagctcaacgtgacggaaaacgagtgccagaattataagcgctgcctcgaaattttggagcagatgaacgaggacgacagcgagcagctacaaatggagctgaaggaactcgcccttgaagaagagcgcctgatccaggaactggaggatgtcgagaaaaatcgtaaaattgtggctgaaaacttagagaaggttcaggctgaagcagagaggctcgatcaagaagaagcccaatatcagagggaatactcagagtttaagcggcagcagctggaattggacgacgagctcaagtccgtagagaaccagatgcgctacgcgcagacacagttagataaactcaaaaagacaaacgtgtttaatgctacattccacatctggcatagtggacaatttggaaccatcaataatttcagactaggccggttgccctctgttcccgtcgagtggaatgagatcaatgccgcctggggccagactgtccttttactgcacgctctagcaaataagatgggcctgaaatttcagcgctaccgtctcgtgccttatggaaaccacagctacctggagtctcttaccgacaagtcaaaagagctgcctctatactgctccggggggcttcggtttttttgggacaataaatttgatcatgccatggtcgccttcctggattgcgtgcagcagttcaaggaagaggtagaaaaaggcgaaacccggttttgtctcccctaccggatggacgtggaaaagggtaagatagaagacacgggcggttccggtgggagctactcaattaaaacccagtttaattccgaagaacagtggactaaggctcttaaattcatgctgaccaacttgaagtggggtcttgcatgggtctccagccaattctacaacaagtag

SEQ ID NO: 180513 - DNA, 5394 bp, synthetic construct
  misc_feature 1..5394: note = Description of Artificial Sequence: Synthetic coding sequence
  source 1..5394: mol_type = other DNA
atggagcagctgaccaccctgccccggcccggcgaccccggcgccatggaaccttgggccctgccaacttggcactcttggactcctggcaggggtggcgaacccagcagcgccgcccctagcattgctgacaccccccccgctgctctgcagctgcaagagcttaggagtgaggaatctagcaagccaaagggggacggatcctcacgacccgtcggcggcactgacccagagggtgcagaagcttgtctgccttcgcttggccagcaggcgtcatccagtgggcctgcttgccagcgccctgaggatgaggaagtcgaagcctttctcaaagcaaagttaaatatgtcattcggggatcgacctaatctcgagttactgcgagccctgggagaactgcggcagcgctgcgccatcctgaaggaggagaatcagatgttgcgcaaatctagttttccagaaaccgaggagaaggtccggagattgaaaaggaaaaacgcggaattggctgtgatcgcaaagcggttggaagagcgtgcgcggaagctgcaagagactaacctgcgagtcgaagggccacagtggctgcacgttagagacttcgaccgactgctgagagagtctcagcgggaggtgctcaggctgcagaggcagatagctcttaggaaccagcgcgaaacactccctcttcccccctcctggccccctggtcctgcgctgcaagcgcgcgctggcgcacctgccccaggggcgccaggggaagcaaccccccaggaggatgccgacaatctgcccgttattctgggcgaaccggagaaggaacagcgcgtccagcaactcgagagcgaattgtcgaaaaagaggaagaagtgcgagtctctagaacaggaggcccggaaaaaacaacggagatgcgaggagctggagctccagctgcgccaggcccagaacgagaacgctaggctggtggaagagaactccaggcttagtggtagggctactgagaaagaacaggtagaatgggagaacgcggaactcaggggacagctgctgggcgttacacaggagagggacagcgctctccgcaagagtcaggggctccagagcaaactggagagtctggagcaggtcctgaagcacatgcgcgaagtggcacagagacgccagcagctggaagtggagcacgaacaggcccggctctctctgcgtgaaaaacaggaagaagtcaggcggctgcagcaggcccaagctgaggctcagcgggagcacgaaggtgcagttcagctgctcgaatctacactggatagcatgcaggcacgggtgagagagctggaggagcaatgtagatcccagacggaacagttctccctgctggcacaagagctgcaagcctttcgccttcaccccgggccgctggatttactgaccagcgcactagattgcggctctctcggagactgtccacctcccccttgctgctgcagtattccccagccgtgtagaggtagcggccccaaagatctcgacctccccccggggagtcctggccgctgcacgcccaagtcctccgagcctgctcctgccaccctaactggcgtaccccgccgtaccgcgaaaaaagctgagtcgctgtctaactcctcccattccgagtccatccacaatagtcctaagtcttgtccgacgcctgaggttgacacagcaagcgaagtggaggagcttgaagctgacagcgtgtccctgctgcctgccgctccggagggttctaggggtggtgccagaatccaagttttcctagcgcggtactcatacaatcccttcgaaggccccaacgagaacccggaggcagagctccctctgaccgcgggtgaatatatatacatctatggaaatatggacgaggacggcttctttgaaggtgaactgatggatggccgccgcggactggtgccatctaactttgtagagagagtttccgacgatgacctcttgactagtctgcctcctgaattggccgacttgagccacagctctggacctgagctaagtttccttagtgtcggcggcggaggctcgagttctgggggacagtcttccgtgggcaggtctcagccccgacctgaagaggaggacgccggggacgagctttccctcagcccctctccggaaggcctcggcgaaccaccggcagtgccctatccgcgcaggttggtggtactaaaacagcttgcacatagcgtcgttcttgcgtgggaacctccacctgaacaggtggagctgcacggtttccacatctgtgtgaatggagagctccgccaggccctcggtcctggcgcacctccaaaagcagtactggaaaatctcgatctgtgggccgggccgctgcacatctctgtccaagccttaacttcaagaggcagttccgatcccctgcggtgctgcctggccgttggagcacgggcaggggtcgtgccttcacaactccgggtccacaggctgacagctacctctgcagagatcacctgggtgcccggaaacagtaatctggcccacgccatttatttgaacggggaagaatgtccccccgcctcgccgagcacttattgggcgaccttttgccacctccgacctggcactccttaccaagctcaggtcgaagcccagctgccaccccaaggaccctgggagcctggatgggagcgcctggaacagcgggcagctacactgcagttcacgactttgccggccgggcctccggacgcaccactggacgtgcaaatagagccaggcccatcccccggaatcctgatcataagctggcttccagtgacaatagacgcggcaggtacctcaaatggagtgcgagtcaccggatacgctatctatgctgacggacaaaagatcatggaggttgctagcccaactgccggatccgtgctggttgaactgtcccaacttcagctgttgcaggtttgccgggaggtggtggtgagaactatgtcgccacacggcgagtctgcagattccattccagcccccatcaccccagcactggccccagcctctctccccgccagagtatcctgtccgtctccccacccctctcctgaagctagggcgcccctggctagcgcatcccctggtcctggcgatccctcatcacctctccagcatccggctcctttgggaacccaggaacctccgggagccccccctgcatctcccagccgggaaatggccaaaggtagtcacgaagacccccctgcaccttgctctcaggaagaggcaggggcagccgtcctgggaacctctgaagagcgtactgcctctaccagtaccttgggcgagaaagatccaggacctgccgcacccagcctggcaaagcaggaggccgaatggacagccggagaagcttgtcccgcctcctcctctacacagggggcgcgggctcagcaggctccaaacaccgaaatgtgtcaggggggtgaccctgggtctggcctgaggcccagggcggagaaggaggacactgcagagctgggcgtgcatctggtcaattccctggtggaccacggccggaactctgacttgtctgatatccaggaggaagaagaggaagaagaggaggaggaggaggaggagttaggcagtaggacttgttcattccagaagcaggtggctggaaattctatcagagaaaacggagcaaagtcccaacccgatcctttttgtgagaccgacagcgacgaagagatcttagagcaaatcttggaactgcccctgcagcagttttgtagcaagaaactcttcagcatcccagaggaagaagaggaagaggaagaggacgaggaggaagaaaagtcaggagctggctgtagttctcgggatccaggcccccctgagcctgccctgctcggactggggtgcgatagcgggcagccgcgtcgccccgggcagtgtccactctcccctgagagctctagagcaggggactgcctggaggatatgcctggcctggtgggcggaagctctcgcaggagaggcggagggagcccagaaaaaccccccagtcgtcgtcggcctcccgaccctcgggagcactgctcgcgcctgctatctaacaatggcccgcaagcctccggtagactcggcccaacccgcgagagaggaggccttccggtgatcgaaggcccccgcaccgggctagaggctagcgggcggggacggcttgggcctagcagaaggtgcagtaggggaagggctctggaaccaggtctcgccagctgcctgtctccgaagtgtctcgagataagcatcgagtacgattccgaagacgagcaggaagccggatctgggggcattagtatcacgagcagctgttaccctggcgacggggaagcctggggcaccgccacggttggaaggccaagaggaccccctaaagcaaattccggcccaaagccttacccaaggctgccggcttgggaaaagggggagccagagcgcagaggaagaagtgctactgggagagcgaaagagcctctgtccagagctactgagaccggagaggcgcgagggcaggatggtagtggaagaagggggcctcagaagaggggtgtgcgtgtgctccggcccagcactgcagagctagtgcctgcgaggagtccaagcgagaccctcgcatatcagcacctgcccgttcgcatcttcgtggctttattcgactacgaccctgtcagcatgagtcccaatccggacgcaggcgaggaggaactccccttcagggagggacagatcttgaaggtttttggcgacaaggacgccgatggattttaccagggcgaaggaggtgggaggaccggctacataccttgcaatatggtggctgaggtagctgtggacagccctgcggggcggcagcagctgctgcagcggggctatctgagtcccgatatcctgctggagggcagtggaaatggcccattcgtgtacagcacagcgcacaccactggaccaccccctaaacctcggcgctccaaaaaggcagaaagcgaaggaccggctcagccttgtcccggccctcctaagctggtcccatcagcagacctgaaggccccccattcaatggtcgctgcattcgactacaatccgcaggaatccagccccaatatggacgtcgaggcagaactgccattccgtgccggggacgtcataactgtcttcggcggaatggacgatgacgggttttactatggggaactgaacggacagcgtggcctggtcccatctaactttttagaaggacccggtcctgaggctggcggtctagaccgcgagcctcggaccccacaggctgaatctcagcggacccgtcgacgccgtgtccagtgctag

SEQ ID NO: 180514 - DNA, 5574 bp, synthetic construct
  misc_feature 1..5574: note = Description of Artificial Sequence: Synthetic coding sequence
  source 1..5574: mol_type = other DNA
atggagcagctgaccaccctgccccggcccggcgaccccggcgccatggagccctgggccctgccaacctggcacagttggactcccggccgaggtggggagccatctagcgcagccccgagtatcgcggatacccctcccgcggcattacagcttcaggagctaagatcggaggagagttctaagccgaagggagatggtagctctcgcccagtgggcgggacagacccggagggcgccgaggcttgcctgccctccctgggacagcaagcttcgtcctcaggacccgcctgccagaggcctgaagacgaagaagtggaggcctttctgaaggcaaagctgaacatgagcttcggggatagacccaacctcgagcttcttcgggccttgggcgagctgcgccagcgctgcgctatcctgaaagaggaaaatcaaatgttgcggaaatcgtctttccctgaaaccgaagagaaggttagaagactcaaacgcaagaacgcggagctcgctgttatcgcgaagcggctcgaagaaagggcacgcaagctgcaagaaactaaccttcgggtagtcagcgcacccctgcctaggcccggaacctctcttgaactgtgcaggaaagccttggccaggcagagggcccgggatctttccgagaccgcatctgcattactcgccaaagataagcagatcgccgctttacagcgagagtgccgcgagctccaggcacggctaacccttgttggcaaagagggccctcagtggctgcacgtgagagacttcgacagattactcagggaatcacaacgggaagttctgcgactgcagagacagatagcgctcagaaatcaacgcgaaaccctgcccctgccaccttcatggccccccggccctgcattgcaggcacgtgctggcgcaccggccccaggcgcaccaggggaggctacgcctcaggaagatgctgataacttgcctgttattctcggcgagccagaaaaagagcagcgagtacagcaactagaaagtgagctgtccaaaaagcgaaagaagtgcgagtccctcgagcaggaggctcgcaagaagcaaagacgatgcgaggagcttgagttgcaattgagacaggcacagaatgaaaatgctcgcctcgtcgaggaaaactcgagacttagcggcagggcaacagagaaggagcaggtagagtgggaaaacgccgagctcaggggacagcttttaggcgttacccaggagagagactcagctctacgtaaatcacagggacttcagtctaaactggaatcattggagcaagtattaaaacatatgagagaagttgcccagaggcggcagcagctggaggtggagcatgagcaagcccggctttccctgcgggagaaacaggaggaagtgagaaggctgcagcaggcccaggccgaagcccaacgagagcacgagggcgccgtgcaactacttgaatcgacccttgatagcatgcaggctagggtgcgtgagctggaggaacagtgcaggtcccagacggaacagtttagcctgctggcacaagaattgcaggcatttagactgcaccctgggcctctagaccttttaacaagcgcgttggattgtggaagtttgggagattgccctccaccaccatgctgttgctccatcccccagccctgcagaggttcaggaccgaaggacttggacctaccccctgggtctcccgggagatgcacacccaagagcagtgagcccgcccccgccaccctgaccggggtaccacgccggactgcaaagaaggctgagtcattgtccaatagtagccactcagagagtatccataactcacccaagtcatgtcccactcctgaggtggataccgcaagcgaagtggaggagctcgaagcagattcagttagccttctccccgcagctccagaaggcagcagagggggagcccgcatccaggtgttcttggctcggtacagctacaatccttttgagggacccaatgaaaatcccgaggcggaactgccactgaccgcaggtgagtacatctacatatatgggaatatggatgaagatggctttttcgagggcgagcttatggacggcaggaggggcctggtgccttccaacttcgtcgagcgggtctctgacgacgacctgcttaccagtctgccgcccgaactagcggatttatcacactcttccggccctgagcttagctttctgtctgtgggaggcggagggtcttcctccgggggtcagagttcagtgggtaggagtcagccccgaccagaagaagaagacgcaggagatgagctctcccttagtcccagccctgaggggctgggtgagccacctgcagttccctatccccggcgtctggtggtgctcaaacagcttgctcacagtgtggtactcgcttgggaacccccgcccgagcaagttgaattacacggcttccacatctgcgtgaacggcgagttgcgccaagcacttggtcccggcgcccctccaaaagccgtgttagagaatctagatctgtgggccgggcccctgcatatctcagttcaggctctaaccagtcggggtagctctgatcctctgaggtgttgcctggccgtaggcgctagagctggcgttgtaccaagccaactgcgtgttcatcgcctaaccgctacaagcgcggaaatcacttgggttcctgggaactctaatcttgcgcatgctatttaccttaatggcgaagaatgccctccggcatcgccttccacctattgggccaccttctgtcatctgaggcccggcaccccataccaggctcaagtggaagcacagctgcctccacagggcccatgggaacccgggtgggaacgattggaacagagggccgccacccttcagttcacaaccctcccagcgggcccacccgacgctccactcgatgtccagatcgagcccggcccctcccctgggattctgatcatttcatggctgccagtaactattgatgccgccggaacgagtaatggcgttcgcgtgaccggatacgccatctacgcagacggacagaagatcatggaggtcgctagccccactgccggatcagtccttgtcgaattaagccagttgcagcttttgcaggtgtgccgggaggtggtggtcagaacaatgtcccctcacggagagtccgccgactctattcctgcacccattacaccggccctcgcccccgcgtctctcccagcgagagtttcttgccccagcccccacccatcaccagaagcccgagctccactcgctagcgcctctccgggccctggtgacccttcatcaccacttcagcacccggccccactaggcacccaggagccgcccggagctccgccagccagtcctagtcgggagatggccaagggtagccatgaggacccacccgccccctgctcccaggaggaagcgggcgctgccgtactgggcacaagcgaggagaggactgcaagcacttccactctcggtgagaaggaccctggacctgccgccccttcactggcaaagcaggaggccgagtggacagccggtgaggcctgtccggccagctcctccacccagggagctcgagctcagcaggctccaaatacagaaatgtgccagggcggagacccagggagtgggttgagacctcgcgcagaaaaggaagacaccgctgagctgggggtgcatcttgtcaatagtctggtggatcatgggcggaattccgatctatctgacatccaagaggaggaggaagaagaggaagaggaggaagaggaagaactgggaagccgcacctgttcattccagaagcaagttgctggcaattccattagagaaaacggagccaagagccagccggacccattctgcgaaaccgatagcgatgaggaaatacttgaacagattctggagctgcccttgcagcaattttgctccaagaagttgtttagtattcccgaggaagaggaagaggaagaggaggatgaagaggaagagaaaagtggcgctggatgttcttcccgtgacccgggcccacccgaaccagcactgctgggcctcggctgcgactcagggcagccacggagaccaggacaatgtcctttaagccctgagtcgagccgcgccggcgactgccttgaagatatgccaggactggtcggcgggtcttctcggaggcggggaggcggtagtccagagaagcccccaagcagaaggcgcccacctgatcccagggaacactgctccaggcttctatcgaacaatggaccccaagcttcgggccgacttgggccgacccgggagcgcggtggcctgcccgttatcgagggcccccggacggggctggaggcatcgggccgtgggcggctgggccccagtaggaggtgctcccggggccgggcccttgaacccgggctggcaagttgcctgagccccaaatgcctcgagatcagcatcgaatatgactccgaggatgagcaggaggcgggttccggcggcatcagcatcacaagttcttgttatcccggtgatggtgaggcttggggcactgcgacagtcgggcggcccaggggtcctcctaaagctaattccggacctaagccctatccacgacttcctgcttgggagaagggcgaaccagagaggcgcggacggtcagccacaggccgtgccaaggaacccctatcccgcgctaccgaaactggtgaggccaggggacaagacggctcaggccggagaggcccgcagaagcggggcgtccgagtgttgaggccttctaccgctgagctggtacctgcgcgatccccatccgaaacgctcgcttatcagcatctccctgtgcggatctttgtggcactgtttgactatgatcccgtgagcatgagcccaaacccggatgccggcgaggaggagctgccctttcgtgaagggcagattttaaaggtcttcggggataaagatgcagatggtttttatcaaggagagggcggcggccgaaccgggtatattccatgtaacatggttgcagaggtcgcggtggattcccccgccggccgacagcagcttctccagagggggtatctgtcacccgatatactcttggaaggcagtgggaatggccccttcgtgtattccacagcacatacaactggccccccacccaagccaagacggagcaagaaggctgagagtgagggccccgcacagccctgccccgggccacctaagctggtacccagtgccgatctaaaagccccacatagcatggtggcagcattcgattataacccacaggaatcgtctccaaacatggatgtggaagctgaactaccttttcgagcaggagatgtcatcacagtattcgggggtatggatgatgatggtttttattatggtgaactcaacggtcagcggggcctcgtgccaagcaactttctcgagggccccggtcctgaggctgggggattagatcgcgaacccaggaccccccaggccgagtctcagcgcactaggcgccgtagggtgcagtgctag

SEQ ID NO: 180515 - DNA, 5724 bp, synthetic construct
  misc_feature 1..5724: note = Description of Artificial Sequence: Synthetic coding sequence
  source 1..5724: mol_type = other DNA
atggagcagctgaccaccctgccccggcccggcgaccccggcgccatggagccctgggcccttcctacctggcattcatggactcctggcagagggggcgaaccatcgtcagccgcaccgagcatcgcagacacaccacccgctgctttacaactgcaggagctcagatctgaagaaagctctaagccaaagggggatggctccagcagacctgtaggtgggaccgacccggaaggtgcagaggcatgtctgccttccttggggcagcaggcttcatcctcagggcctgcctgtcagcgcccggaggacgaagaggttgaggctttcctgaaagcgaagctgaatatgtcgtttggtgaccgcccgaacctggagctcctgagagcgctgggggaactgcgccagcggtgcgccattctgaaagaggagaatcagatgctgcgcaaaagctccttcccagagacagaggagaaagtccggcgcttaaagagaaaaaacgcagagctggccgtaattgccaaacggttagaagagagagctcgcaagctacaggagaccaacttgagggtggtgtcggccccacttcctcgtcccggcacttcgctggagttgtgtcgtaaagctcttgcccggcagcgggcacgagacctgagcgagactgcatcagccctactggcgaaagacaagcagatcgcagcactgcagcgcgaatgtcgcgagttgcaggctcggttgactcttgtgggcaaagaaggcccccaatggctgcacgttcgggacttcgatcgattattgcgcgaatcccaacgggaagttctcaggctgcagcggcagatcgccctgcgcaatcaaagagaaactttgcctctgcccccaagttggcctccgggcccagcactgcaggcacgggctggcgcacctgcacctggagctccaggggaagcaactccacaggaggacgctgacaatttaccggttatattgggagaacctgaaaaggaacaacgtgtacagcagctcgaatcagagttaagcaagaagaggaagaagtgcgaatcgctggagcaggaggccaggaaaaagcagcgtcggtgcgaggaactcgagctgcaactacggcaggcgcaaaacgaaaatgccaggctggtggaggagaactcacggctttcgggacgggctacagagaaggagcaggtggaatgggagaatgcggaacttcgcggtcagcttctgggtgttacccaggagcgggattctgctctcagaaaatctcaggggctgcagtcaaagctggagtctcttgagcaagtactcaagcacatgagggaggttgctcagaggcgccagcagcttgaggtagagcacgaacaggcacggctgtccttgagggagaagcaggaggaagtgaggcggctacagcaagcccaagcggaggcccagcgggagcacgaaggggctgtccagctcctcgagtccacccttgacagcatgcaggcacgtgtcagagaattagaggagcaatgccggtcacaaactgaacagttttctctgttggcccaggagctgcaggccttccggctccacccagggccgcttgatctactgactagtgcactggactgcggctctctgggcgattgcccccctcctccgtgctgttgctctattccacagccttgtagggggtccggcccaaaagatcttgaccttccacctgggtctcctggccgatgtacccctaaatccagtgagccagcgcccgccaccctgacaggtgtgcctcgccgaactgcaaagaaagctgagtctctatctaactcgtctcactctgagtcaatccacaactctccgaagtcctgtcctactcctgaggtcgacacagcgtccgaggtggaggagctggaggcggacagtgtctctttgttgccagccgctccagaaggatccagggggggcgcaagaatacaggtgttcctggcaaggtactcatacaacccgtttgaggggccaaacgaaaaccccgaagcggagcttcccctgactgctggagaatatatttacatttatggcaacatggacgaggatgggttctttgagggtgaacttatggacgggcggaggggtctggtgccctccaacttcgttgagcgggttagcgacgacgacctgctgacttcccttcccccagaactggccgacctgagccacagctccggccctgaactttcatttctttcggtcggtggtgggggaagcagttcaggaggacagagtagcgttgggagatcgcaaccccggcctgaagaggaggacgcaggtgacgagctgagcctttcaccatcgcctgagggcctcggcgaacctcccgccgtgccctatccccgccgactagtcgtgctgaagcagcttgctcacagtgtagtgctggcttgggagcctcctccagaacaagtcgagcttcatggatttcatatctgcgtcaatggagagttgcgccaggcattaggcccgggggccccccccaaagccgtgctggagaatctggacctgtgggccggcccgctgcatatttctgtacaggccctcacgtcccgaggttcttccgaccccttgcgctgctgcctcgctgtaggcgcccgtgcaggagtggtgccttctcagctccgcgtgcacagattgaccgctacctcggctgagattacctgggtgccagggaactcaaacctcgcacatgccatttatctaaacggcgaagagtgtccacccgcctccccctccacatactgggctactttttgccatttgcgacctggtactccttaccaggcgcaggtagaggcccagttgcctccacaggggccatgggagcccggttgggagcggctggagcagagagcggcaacccttcagtttacaaccctcccagccgggcccccagacgcaccactagacgtgcagattgagcctgggccaagccccggaatcctgattatctcttggttgccggtgacaattgacgccgccggcactagcaatggcgtacgggttactgggtatgctatttacgcggacggacagaagattatggaagttgcttcacccactgccggaagtgttcttgtggagctgagtcaattgcagctccttcaggtgtgcagagaggtcgtcgtccgcacaatgagtccacacggggaatctgcagattcgattccggccccgatcacgcctgctctggcccctgcaagtctgccagctagagtgtcatgtccttcccctcacccatccccagaggccagagcccctctcgctagcgcgagtccgggacctggtgatccttcttctccgcttcagcatcctgcccctttggggacacaggagccgcctggcgccccacctgcctcgccttcccgggaaatggccaagggctcccacgaggacccccccgcaccttgttcccaggaggaagcaggagccgctgtgttggggacttccgaagagcgtacggccagcacttctacactaggcgagaaggaccctggtcctgcagccccttcgcttgctaaacaggaagccgaatggaccgctggggaagcatgcccagctagctcctctacacagggggcccgggcgcaacaggcccctaacactgaaatgtgtcagggcggcgatccaggctcaggcttgagacctagggctgaaaaagaggacacagccgagctgggagtacatctggttaatagcctggtcgaccacggacggaatagcgatcttagtgatatccaggaggaggaggaagaagaggaggaggaggaggaagaggagttgggatcccggacctgtagctttcagaaacaggtcgctggcaactcaatacgtgaaaacggtgccaagtcacaaccggatcccttttgcgagacggatagcgacgaggagattctggagcagattcttgaattgcctctacagcagttctgttctaaaaaactattcagtattcccgaagaagaggaggaggaggaagaggacgaagaagaagagaaatctggagcaggttgcagctcccgcgaccctggtccccccgagcctgccttgctcggactcggctgcgattcgggtcagcctcgcaggcccggtcagtgtccactttcaccggagagctccagagccggtgactgtctggaagacatgccgggtttagtggggggatcttctcgcagaagaggcggaggtagccctgagaaacccccatcacgcaggcgtccccctgaccctcgggagcactgttcacggctcttaagcaacaatgggccccaagcctccggacggttaggccccacgagggagaggggaggactgccagtgatcgaagggccacgaacaggccttgaggcctcaggtcgaggccggctgggacctagcaggcgatgcagcagaggcagagccctggagccaggacttgcttcctgtctgagccctaaatgcttagaaatttctattgaatacgattcagaggatgagcaggaggcaggttcaggggggatctccataacatcttcttgctacccaggtgacggcgaggcttggggcaccgctacggtgggccgtcctcgaggacctcccaaggccaacagtggccctaagccttacccccgcttgcctgcatgggagaagggcgaaccggagcggcgcggccgatccgctaccggtagggcaaaagagcccctctcccgcgccactgagacaggggaggctcgtggtcaggatgggtcaggccggcgagggcctcagaagcgcggagtcagagtgctaaggccctccactgccgagctggtgccagctagatccccctcggaaacgctggcctaccagcatctgcctgtccgcatttttgtggccttattcgactacgatccagtttccatgtctccaaatcctgatgccggtgaggaagaattaccattccgtgaagggcaaattctgaaggtatttggggataaagatgcagacggcttctaccagggagaaggcggcggacggacaggatatataccttgcaacatggtcgctgaggtcgccgtggacagtccagcgggcaggcagcagctcctgcagaggggctacttgtcacccgatatccttctggaagggtcaggtaacggcccttttgtgtactccacagctcatactaccggacctccacccaaacctagacgtagcaaaaaagccgagtccgagggtcccgcacaaccttgccctggaccccctaagctggtcccctctgctgatcttaaagcccctcatagcatggttgcggcatttgattataatccccaggaatcttcccccaatatggatgtggaggctgagttgccctttcgggctggcgatgtcatcacggtttttggaggtatggatgatgacggattctactacggcgagctcaatggccagagggggctagtaccctctaacttcctcgaggggcccggtcctgaagcgggaggactggaccgagagcccagaaccccacaggcggaatctcaggactggggatgtacaacacagggttctcccggcccaccaggtgggccatgtaccccatcaagtgggagtgcgccacgaattgagcgcggggagccccaggggcgcagtgaaaaagtgtgggggttcttctcaaaaggaaagcaacttttacggcgcctcgggtccggtaagaaagagtag

SEQ ID NO: 180516 - DNA, 864 bp, synthetic construct
  misc_feature 1..864: note = Description of Artificial Sequence: Synthetic coding sequence
  source 1..864: mol_type = other DNA
atggtgaacgacccccccgtgcccgccctgctgtgggcccaggaggtcggccaggtgctggccggccgcgcacgccgacttctcctgcaattcggggtgctattctgtacaattttgcttctgctttgggtgtcagtattcctttacggctctttttactactcttatatgcctactgtctctcatttgtctccagtgcatttttattatagaaccgactgcgatagttccacaacctctctttgctcattccccgtcgctaatgtgtcactgaccaagggggggagagatagggtcctaatgtacggccagccataccgagtcacactcgaactggagttgccagagagtccggtgaaccaagatcttggcatgttcctggtgactattagctgttatactcgcggtggaaggattatctctaccagctctagatctgtcatgttgcactataggtcagatctactccagatgctcgataccttggtattttcctccctgctgttgtttggctttgccgagcaaaaacagctgctggaggtagagctgtatgctgactaccgggaaaattcatacgttccaacaacaggtgctattatcgagatccattccaaaagaattcagctttatggtgcgtatttgcggatccacgcccattttactggcctgcgactgacatcagagaaggaaacaatcccaggccgcaaatccaacgaggggtctttgctgatctctcagggtttaaaagccagacgctctcaacttcggaaccagatgctacagagaatggtgagagccctgaaaattcctcagggacagcgcgtcagctgtccaagaagaaggaatcaaatttcatccccatag

SEQ ID NO: 180517 - DNA, 1389 bp, synthetic construct
  misc_feature 1..1389: note = Description of Artificial Sequence: Synthetic coding sequence
  source 1..1389: mol_type = other DNA
atgagcaccgagaaggtggaccagaaggaggaggccggcgagaaggaagtctgtggagatcagattaagggacccgacaaagaggaagagcctccagccgccgcctcccacggccagggatggcggcccggcggccgggccgcaagaaacgcccgaccagagcccggggctcgccacccagccctccccgccatggtgaacgaccctcctgttcccgccctgctttgggctcaggaggtcgggcaggttctggcaggaagagccaggcggctgttattacagttcggtgtgctcttttgtaccatcttactcttgttgtgggtttccgtttttctttacggatccttttactattcatatatgcccaccgtatctcacctttctcccgttcatttctactaccgaactgattgtgattctagtacgacgagcttgtgcagttttccggtagcgaacgtaagcttgaccaaaggcgggagggaccgggtactgatgtacggacagccttatcgcgtcacactcgagctcgagctccccgagtcccctgtgaatcaagacctgggaatgtttctagtcaccatttcctgctacacgcgcgggggccgaataattagtacctcatcaaggtcagtcatgctgcactataggtccgacctattgcagatgctggacacacttgtgtttagcagtcttttgctgttcgggtttgccgaacagaaacaactcctggaggtcgagctctacgctgactaccgggaaaacagctacgtccctaccaccggggccataatcgagattcacagcaaacgtatccagctgtatggggcttacctgaggatccatgctcacttcaccggtctgcgttatctgttgtacaacttccctatgacatgcgcctttatcggggtggcaagtaactttacctttttgtctgtgattgtcttgtttagctatatgcagtgggtgtggggtgggatctggcctaggcatcggttctcactccaggtcaacattagaaaacgcgataattcccgaaaagaagtccagagaaggatctccgctcatcagccgggtcccgaaggccaggaagaaagcacccctcagtcagacgtcacagaggacggggaatcaccagaagacccctccggaaccgaggggcagctctccgaagaagagaaacccgaccagcagccgctttctggagaagaagagctcgaaccagaggcctcagacggctccggcagttgggaagacgctgctcttcttacggaagccaaccttcctgcccccgccccagcttccgctagtgcacctgtgctggagactttgggctcttctgaaccagcaggaggggccttgaggcaacgacccacttgctcctcctcctag

SEQ ID NO: 180518 - DNA, 1197 bp, synthetic construct
  misc_feature 1..1197: note = Description of Artificial Sequence: Synthetic coding sequence
  source 1..1197: mol_type = other DNA
atggtgaacgacccccccgtgcccgccctgctgtgggcccaggaggtcggacaggtattagcaggaagggccagacggttgctgctccagtttggagtcctgttttgcacaatcctactcctattatgggtgagtgtgtttctctatggcagcttctactactcctatatgccaacggtctctcatcttagcccagtgcacttctattaccgcactgattgtgacagctctaccaccagtttgtgttcattccccgtggctaacgtctccctcactaagggcgggagggacagagtgctgatgtatggacagccttatagagtgaccctggaattggagctgcccgagtcaccagtcaaccaggacctgggcatgttccttgttaccattagttgctatacgcgtggaggaaggatcatctccacttcctcaaggtccgtgatgctgcactataggtccgacctgctacagatgttggataccctggtgttttccagtctactgctgtttggattcgcagaacagaaacagctcctcgaagttgaactgtacgcagactatcgagagaattcctatgtgcccacgaccggcgcaatcattgagatccattcaaagagaatccagttatacggggcttatctgcggatccacgcccacttcacaggtttgcgatatcttttgtacaattttcctatgacgtgtgctttcatcggtgtagccagcaattttacgttccttagcgttattgttcttttttcttatatgcaatgggtttggggcggcatctggccaaggcaccggttcagcttacaggtcaatattaggaaaagagataactccaggaaagaggtacagagaaggatcagcgcgcatcagcctggccctgaggggcaggaagaatccactccacagagcgacgtgaccgaagacggagagtcgcccgaagatcccagtggaactgagggacagctcagcgaggaggaaaaacccgatcaacagcctctgtccggcgaggaggagctggagcctgaggccagcgacgggtctggctcatgggaagatgccgctctgctgacagaagcgaacttaccagcccccgcaccggcaagcgcaagcgcacctgtcctcgaaacactgggctcctccgagccggccgggggggctctgcgtcagagacctacttgctcttcctcatag

SEQ ID NO: 180519 - DNA, 1197 bp, synthetic construct
  misc_feature 1..1197: note = Description of Artificial Sequence: Synthetic coding sequence
  source 1..1197: mol_type = other DNA
atggtgaacgacccccccgtgcccgccctgctgtgggcccaggaggtgggtcaggtgctggctggtcgggcacgccgactgctcctccaattcggcgttcttttttgcaccatactgctgttgctgtgggtcagtgtgttcctctatggtagcttttactactcctatatgcccaccgtgtcacatctgtcacccgtccatttttattataggactgattgtgacagtagcaccactagcttgtgtagtttcccggttgcaaatgtgagcctcactaaaggcgggcgagaccgggttttaatgtacggccagccctaccgcgtcacacttgagctcgaattacctgagtcacccgtgaaccaggatctgggtatgtttctggtaactataagttgttacacaagaggagggagaatcattagtacgtcgtcccgtagtgtcatgctccattatcgatctgatcttctacaaatgctcgacaccttagtattcagtagcctgctgctctttgggttcgccgaacaaaagcagctgctcgaggtggagttgtatgccgattatcgggaaaactcatacgtccccacaacaggcgccatcatcgagatccattccaaaagaattcagctctacggcgcttatcttaggattcacgctcacttcacggggctgagatacctcctgtataatttcccaatgacctgcgcttttattggcgttgcgagtaacttcacgtttctcagcgtgatcgtactcttttcttacatgcagtgggtgtggggcgggatttggccaagacatagattttcccttcaagtcaatattcggaagcgcgacaactcacgcaaagaggtgcagcggcggattagcgcccaccagccgggcccagaaggacaggaggaatccaccccgcagtcggatgttaccgaagatggagagagccctgaggatccatctgggaccgagggacaactctctgaagaagagaagccagatcaacaacccctgagcggagaggaggaactggagcctgaggctagtgacggatcaggatcctgggaggatgctgcactcctcacagaggctaacctacctgcacctgccccggcaagtgcttccgctccggtgctggaaacactgggttccagtgagccggccggcggtgctctgcgacaaagaccaacatgctcatctagttag

SEQ ID NO: 180520 - DNA, 1197 bp, synthetic construct
  misc_feature 1..1197: note = Description of Artificial Sequence: Synthetic coding sequence
  source 1..1197: mol_type = other DNA
atggtgaacgacccccccgtgcccgccctgctgtgggcccaggaggtagggcaggtactggcaggtcgggctaggagactgctgttacagtttggcgttctgttctgcaccatcctccttcttctgtgggtctctgtgttcctttatggaagtttctattactcatacatgcccaccgtttcccatctgagccccgtgcacttttactacaggaccgactgcgattcttccacaacgtccctgtgcagtttccccgtggccaatgtgtcactaacgaagggtggaagggacagagtcttgatgtatggacagccataccgcgttaccctggaactggagctgccagagagccccgtgaaccaagatctcggtatgttcctcgtgacgatcagctgttacactagggggggacgaatcatctccaccagtagcagaagcgtgatgcttcactaccgctcagacctgctccagatgttggatacgttggtgttttcctcactgttattgttcggcttcgccgagcagaaacagctgctcgaagttgagctctatgcagactacagggaaaactcatacgtgccaacaacaggcgcgatcatcgagatccattccaagagaatacaactttacggtgcgtatctgagaattcacgcacactttactggtttgaggtatctgttatacaatttccctatgacatgcgcattcattggggtggcctcaaattttacattcctgagtgttatcgtgctgttctcatacatgcagtgggtatgggggggaatctggccccgacatagattttctctgcaggttaacatcagaaagagggacaattcacggaaggaggtgcaacggaggatctccgctcatcagccaggcccagagggacaggaggagtccacgcctcagagcgatgttacggaagacggggagtcacctgaggatccgagcggcactgagggccagttgagcgaagaggaaaagcccgatcagcagccgctgtcgggagaggaggagctcgagccagaagcctcagacggctcaggatcttgggaagatgccgcgctgttgaccgaggccaatctgccggcaccagcccctgcgtcggcctctgccccggtcctcgagactctcggcagcagcgagcccgccgggggcgccctgcgccagagacctacgtgctcctctagctag

SEQ ID NO: 180521 - DNA, 1389 bp, synthetic construct
  misc_feature 1..1389: note = Description of Artificial Sequence: Synthetic coding sequence
  source 1..1389: mol_type = other DNA
atgagcaccgagaaggtggaccagaaggaggaggccggcgagaaggaggtgtgtggggaccagatcaaaggccctgacaaggaagaagagcctcctgcagccgctagccatgggcaggggtggcgccctggcggcagggcagcaagaaatgcacggccagagccaggggcaagacacccagccctgcccgcaatggttaacgatccaccagtccccgccctgctgtgggctcaggaggttggtcaggttctggccggccgagctcgcaggctgctgctgcaattcggggtgcttttctgcaccatcttactgctgttgtgggtctctgtctttctctatgggtctttctattactcatatatgcccaccgtttcccacctttccccggtgcatttctactaccgtacggactgtgattcctctacaacctctttgtgttcattcccagtagcaaatgtgtccctgacaaagggcggcagagaccgcgttctgatgtacgggcagccttatagggttacgcttgaactagagctcccagaatctcctgtgaaccaggacctagggatgtttctggtcacgatctcttgctacacccgtggtggacgtatcatatccacatccagtcgcagcgttatgctccactataggtccgatctcctccagatgctagatacattggtgttcagttctcttctgctgtttggcttcgccgagcagaagcagctgctggaggtggagctgtacgcggactacagggagaatagctatgtgccgacaactggggcaatcatcgagattcacagcaagcgtatccagctttacggggcgtacctccgcatacacgctcatttcaccggattacggtatctcctgtacaacttccccatgacctgcgcattcatcggggtggcctctaattttacgtttttgagtgtgatcgtgcttttctcctatatgcagtgggtttggggaggcatttggcctaggcataggtttagtctccaggtcaatataagaaagagagataacagccgtaaagaggtccagcgacggatcagtgcacaccagccgggcccagaaggccaagaagagtctactcctcaatctgatgtgactgaggacggcgaaagtccagaggatccctccgggaccgaagggcagctttccgaagaggagaaacccgatcagcagccgctgtcgggcgaggaagagctcgagcccgaagctagcgatggaagcggcagttgggaagacgccgctttactgacagaggccaatttgcccgctcctgcacctgctagtgcaagtgcccccgtccttgaaaccctcgggtcttcagaaccggccggcggagctctgagacaaaggcccacctgctcttcgtcttag

SEQ ID NO: 180522 - DNA, 672 bp, synthetic construct
  misc_feature 1..672: note = Description of Artificial Sequence: Synthetic coding sequence
  source 1..672: mol_type = other DNA
atggtgaacgacccccccgtgcccgccctgctgtgggcccaggaggtgggccaggtcctggcgggaagggcacgcaggctgctgctccagttcggggtactattttgcacaatactgctgctactttgggtgtcagtcttcttgtacgggtccttttactattcgtacatgccaactgttagccatttaagcccagttcatttctactaccgaacagactgcgactcttccacaacttcactctgttcattcccagtcgccaatgtgtccctgaccaaagggggccgagaccgcgtgttgatgtatgggcagccttatagagttaccctagaacttgaactaccggagtcccccgtgaaccaagacctgggaatgttcctggtaacgatctcttgttatactagggggggaaggataatctcaactagctcacgcagtgtgatgctccactaccggtctgatctattgcagatgctcgatacattggtgttctcaagcctcctactgtttggatttgccgagcaaaaacaactacttgaggtggaattatatgctgactacagggagaactcatacgtgccgacaactggggccattatcgagatccattctaagagaatccaactttatggagcttatttaagaattcacgcccattttactggactatag

SEQ ID NO: 180523 - DNA, 282 bp, synthetic construct
  misc_feature 1..282: note = Description of Artificial Sequence: Synthetic coding sequence
  source 1..282: mol_type = other DNA
atgagcaccgagaaggtggaccagaaggaggaggccggcgagaaggaggtgtgtggtgaccagataaagggacccgataaggaagaagagcctcccgctgccgccagccatggccaggggtggaggcctggagggcgggcggcgagaaacgcccgccctgagccaggggcgcgtcaccctgctctccctgccatggtgaatgaccctcctgtgcctgcactcctttgggctcaggaagtggggcaggtattggcagggcgcgcgcggagattgctgctatag

SEQ ID NO: 180524 - DNA, 681 bp, synthetic construct
  misc_feature 1..681: note = Description of Artificial Sequence: Synthetic coding sequence
  source 1..681: mol_type = other DNA
atgagcaccgagaaggtggaccagaaggaggaggccggcgagaaggaagtctgtggagatcagatcaagggccccgacaaagaagaggagcccccggcagctgcctcccacggtcagggctggcgccccggcggacgcgcggcgagaaacgctcgtcccgagcccggagcgcgccaccctgccttgcccgcaatggtaaacgacccgccggtccccgccctgctgtgggcccaggaggtgggccaggttttagccggccgggctcgaaggctgctcctgcagtttggcgtgttattttgcacaatactgctgcttttatgggtgagcgttttcctctacgggagcttctattatagctatatgccaaccgtatctcatctctctcccgtgcacttctattacagaacagactgcgactcaagcacaactagcctgtgctcttttcccgtcgccaacgtcagcctgacaaaaggtggtagagaccgagtcctgatgtatggacagccttatcgagtcactctggagctggaactgcccgagagtcccgtgaaccaggatctgggtatgttcttggtgacaatttcatgttacacaagggggggcagaatcattagcacctcctcacggtccgtcatgctgcactaccgctctgacctacttcaaatgctcgatacgctgtag

SEQ ID NO: 180525 - DNA, 72 bp, synthetic construct
  misc_feature 1..72: note = Description of Artificial Sequence: Synthetic coding sequence
  source 1..72: mol_type = other DNA
atgagcaccgagaaggtggaccagaaggaggaggccggcgagaaggaggtatgcggcgatcaaatcaagtag

SEQ ID NO: 180526 - DNA, 87 bp, synthetic construct
  misc_feature 1..87: note = Description of Artificial Sequence: Synthetic coding sequence
  source 1..87: mol_type = other DNA
atgagcaccgagaaggtggaccagaaggaggaggccggcgagaaggaagtttgtggggatcagattaaaggtcctgacaaagagtag

SEQ ID NO: 180527 - DNA, 372 bp, synthetic construct
  misc_feature 1..372: note = Description of Artificial Sequence: Synthetic coding sequence
  source 1..372: mol_type = other DNA
atgagcaccgagaaggtggaccagaaggaggaggccggcgagaaggaagtatgcggagaccagattaaggggccagataaagaagaagaaccccctgccgccgctagccacggacaaggctggagacccgggggaagagcagctcgaaacgccagaccagagcctggtgctagacacccggcgctacctgctatggtcaacgatccccctgtgcctgccctgttgtgggcccaagaggtggggcaggttttggctggaagggcaagaagattgctgttacagtttggtgttctcttctgcaccatcctactcctgctttgggtcagtgtatttttatatgggagtttctattactcatacatgccgacgtag

SEQ ID NO: 180528 - DNA, 300 bp, synthetic construct
  misc_feature 1..300: note = Description of Artificial Sequence: Synthetic coding sequence
  source 1..300: mol_type = other DNA
atggtgaacgacccccccgtgcccgccctgctgtgggcccaggaggtgggtcaagtgctagccgggcgcgctaggaggcttctgctgcaattcggggtgctcttctgcactattctgcttctcctctgggtgagtgtctttctgtatgggtcgttttactattcctatatgccaaccgtgagccacctgtctcccgtccacttctactacagaactgattgtgactcatccactacctctctctgttcttttccagtggccaacgtgagcctcaccaagggaggccgtgaccgggtatag

SEQ ID NO: 180529 - DNA, 879 bp, synthetic construct
  misc_feature 1..879: note = Description of Artificial Sequence: Synthetic coding sequence
  source 1..879: mol_type = other DNA
atggagttccagcccaaccaggaggacgaggaggacgcccacgccggtatcatcgggagatttcttggactacagtcccatgatcatcacccaccccgggccaactcccgcacaaagttgctgtggcccaagagggaaagtctgctgcatgaaggcttacccaagaatcataaggccgcaaaacagaatgttcggggacaagaggacaataaagcctggaaactgaaagcggtggatgccttcaagagtgcccctctgtaccagcgtccaggctattactcagctccccagacacccctgagccccactccaatgttcttccctctggagccgtctgccccaagcaaactgcacagtgtgactggtatagatactaaggacaagagtcttaaaactgtaagtagcggcgctaagaagtcttttgagctcctgtctgagtctgatggtgccttaatggagcaccctgaggtgagtcaggtgaggaggaagacagtcgagtttaatctgacagatatgccagagatacccgagaatcacctcaaggaacctctcgagcagagccctacaaatattcacacaacactgaaagaccacatggacccctactgggcacttgagaaccgatctgttctacatctgaaccagggccactgcatcgcactttgccctacccctgccagcttggccctctcgctgcctttccttcacaatttcctcggtttccaccactgtcaaagcactctcgatctgcgacctgccctcgcttggggtatctacctggcgacattcaccggtatcctcggcaagtgcagtggccctttcctgacttcgccttggtaccatcctgaggactttctaggcccgggagagggcagatag

SEQ ID NO: 180530 - DNA, 1497 bp, synthetic construct
  misc_feature 1..1497: note = Description of Artificial Sequence: Synthetic coding sequence
  source 1..1497: mol_type = other DNA
atgttcgagaagctgaccctgtactgcgacagctacatccagctgatcccgatctcttttgtgcttgggttctacgtcacgctggtggtcacccgctggtggaaccaatatgaaaatttgccctggccggacaggttgatgtcacttgtaagtggattcgtcgaaggcaaagacgagcagggtaggctcctgcgccggactctgatccgttatgcgaacctgggcaacgtcctgatcttgaggtccgtgtccacagccgtctataagagattcccttccgcccagcacttggtgcaggctgggtttatgacacccgccgagcacaagcagctcgaaaagctctctctgccgcacaacatgttttgggtgccatgggtatggttcgcgaaccttagtatgaaggcatggctaggggggcgaatccgggacccaatcctgttgcagtcgcttttgaatgagatgaacaccctgcgcacccaatgtggacatctgtatgcgtatgactggatatcaattcctctggtgtatacccaggttgtgactgtagccgtgtattccttcttcctgacttgcttggtgggcaggcagttcctcaatccagctaaagcttatcccggacatgagttggaccttgtggtaccagtgtttacgtttctccagttctttttttacgtgggatggctcaaagtgtcattgttggccgtggatgagatgcatcaggatcttccccgtatggagcctgatatgtattggaataaacctgagccacagccgccttatacagccgcgtctgcacagttcaggcgcgcctcatttatgggaagcacattcaatatttcactcaacaaggaggagatggaattccaaccaaaccaagaggacgaggaggacgcacacgctgggattattggcaggtttctcggcctgcagagtcacgaccatcacccgcccagggccaattcccggacaaagctgctttggcccaagagagaaagtctcctgcatgagggactgccgaaaaatcataaggcagccaaacagaacgtacgcggccaagaggacaataaggcatggaagctcaaagcagtggatgctttcaaaagcgccccgctctaccagcgcccaggctactacagcgcaccacaaacaccattgtcgcccacccctatgttctttcctctagagccaagcgcgccatccaagctgcatagcgtgaccggaatcgacaccaaagataaatctctaaagactgtcagctctggtgccaagaaatctttcgagctgctgtcagagtcagacggggccctcatggagcaccctgaagtctcccaggtgagacggaagacagtggaatttaacctgactgacatgccagaaattcccgagaaccacctgaaagagcccctggagcagtcgcccacaaatattcatacaacccttaaggatcatatggacccctattgggctctggaaaatcgtgacgaggcccattcatag

SEQ ID NO: 180531 - DNA, 1758 bp, synthetic construct
  misc_feature 1..1758: note = Description of Artificial Sequence: Synthetic coding sequence
  source 1..1758: mol_type = other DNA
atgaccatcacctacaccagccaggtggccaacgcccggctgggcagtttttcgagactgctgctctgctggaggggatctatttataagttgctctatggcgagttcctgatcttcctgctttgctattatatcataagatttatctataggctggctctgaccgaggaacagcagctaatgtttgagaagttgaccctttactgcgatagttatattcaattaatccctatatcttttgttttgggtttctacgtgacacttgtcgtgacccggtggtggaaccagtacgaaaatctcccatggcccgacagactgatgtctctggtcagtggattcgtggagggcaaagacgagcaaggcagactactgagaaggaccctcatccggtacgcgaaccttggcaatgtgcttatcctgagaagcgtcagcactgctgtttacaaacgcttcccctctgcccagcacctggttcaagccggctttatgacgcctgcggaacataagcagctagagaaactaagcctaccccataatatgttctgggtgccttgggtatggtttgccaacctgagcatgaaggcctggctcggtggccgcatcagagaccccatcctgttgcagtccctgctgaatgaaatgaatactttgaggacacagtgcggtcatttgtacgcatatgattggattagcatcccactcgtatacacacaggtggttacagtggcagtttacagcttcttccttacctgtctcgtgggccgccagttcctgaatcccgccaaggcgtacccaggccatgagctagatcttgtggtccccgtgttcaccttcctgcagttctttttctacgttgggtggcttaaagtcgcagaacaactgattaacccctttggagaggacgacgacgattttgagactaattggattgttgatcgtaatctccaggtttccctcctcgcggtggacgagatgcatcaggacctccccaggatggagcctgatatgtactggaataaaccagaacctcaacccccttatactgcggcctccgcccagtttcgcagggcttcttttatggggtcgactttcaatatctccctaaacaaagaggagatggagtttcaacccaaccaagaggacgaggaggatgcccatgccggaatcatcggacgctttctgggactgcagagccacgatcatcatccaccccgcgcaaattcccggactaagcttctgtggccgaaaagagaatccttgctccatgaaggccttcctaaaaatcataaagccgcgaaacagaacgtgagagggcaagaggacaacaaagcctggaaactaaaagccgtggacgcattcaaaagcgccccattgtaccagaggcctggctactacagtgccccccagactcccctctcccccacgccgatgttctttcccctagaacccagcgccccgtcaaagctccattccgtcactgggattgacacgaaagacaagtccctcaagactgtctcctccggtgccaagaaatcttttgaactcttgtctgaaagtgatggcgctctcatggagcatcctgaagtaagtcaggtccgacgcaagacagttgagtttaacctgacagatatgcctgaaattccagaaaaccatcttaaggagcccctcgagcagagcccgaccaatatccatactacccttaaggatcacatggatccgtattgggccttggaaaatcgagacgaggctcactcgtag

SEQ ID NO: 180532 - DNA, 813 bp, synthetic construct
  misc_feature 1..813: note = Description of Artificial Sequence: Synthetic coding sequence
  source 1..813: mol_type = other DNA
atgaccatcacctacaccagccaggtggccaacgcccggctgggctccttctctaggctcctgctgtgttggagaggtagcatctacaagctgctctacggtgaattcctgatctttctcctctgctactatattatacgattcatctacaggttagccctgactgaagaacagcagttaatgttcgagaagctcaccctatactgtgacagctacatccagctgatcccaattagttttgtcctgggattttatgtaacactcgtggtgacaagatggtggaaccagtacgaaaatctgccatggcccgatagactgatgagtcttgtcagtggcttcgttgagggtaaagatgaacagggccgcctgctacgacggacacttattaggtatgcaaacctcgggaatgttctcatcctccggtctgtcagcacagccgtttacaagcgtttcccttcagcccagcacctcgtacaggctggattcatgaccccggccgagcacaaacaacttgagaaactttcactgccacacaatatgttctgggtcccatgggtgtggtttgcaaacctgtcaatgaaagcttggcttggcggcagaataagggatcccatcctgctgcagtccctactcaacgagatgaacacactccgtacccagtgcggccatctttacgcctatgactggataagcattcctctcgtctacactcagcccgagcaacggggagatggtgtccctgcccagagtggaggcagggggggatgcagcaggtggcaccattggccactccctcgaccggccgtaccatag

SEQ ID NO: 180533 - DNA, 1815 bp, synthetic construct
  misc_feature 1..1815: note = Description of Artificial Sequence: Synthetic coding sequence
  source 1..1815: mol_type = other DNA
atgttcgagaagctgaccctgtactgcgacagctacatccagctgatccccatttcgtttgttctcggtttttatgtgacgctcgttgtaacacggtggtggaaccagtatgaaaatctgccttggccggatcgccttatgagtctggtttccgggttcgtcgagggcaaagatgaacagggcagactcctgcggcgaaccctgattcgatacgccaacctgggtaacgttctaatactcagatcggtctccacagctgtgtataagagattcccctccgcccagcacctggtgcaggctggctttatgactcccgccgaacacaagcaactggagaaactttcacttcctcacaatatgttctgggtaccctgggtgtggtttgcaaacctctctatgaaagcctggttgggaggccggattcgggatccaatcttgctccaatctctgctgaacgagatgaatacgctgagaacacagtgcggtcacctgtacgcatacgactggattagcatccccctggtctatacacaggtagttaccgtagcagtgtactcattcttccttacctgcctcgtgggcaggcagtttctgaaccctgctaaggcctaccctggacacgagctggatctcgtagtgccggtcttcacttttttgcagttctttttttatgtaggctggctgaaggtggccgaacagctgatcaacccattcggggaagacgacgatgactttgaaactaactggattgtggaccggaacctccaagtttccctactggccgttgacgaaatgcatcaagacctccctcgcatggaacccgatatgtactggaacaagccagaaccccagccaccctatactgccgcttctgcccagttccgccgcgccagcttcatgggcagcacttttaatattagcctcaacaaagaggaaatggagtttcagcccaaccaagaggatgaggaggatgcccatgccggtataatcggacgattcttgggcctccaatcacatgatcaccatccgcccagggccaatagtagaacgaagttactctggccgaagcgcgagtcccttctgcatgaggggcttcctaaaaatcacaaggcggcaaagcagaatgttagaggccaggaagacaacaaggcgtggaaactgaaagccgttgacgcattcaagagtgcaccgctctaccaacgacctggctattacagcgctcctcaaacccccctgtcacccactcctatgttctttcccctagaaccctctgcacctagcaaactgcacagtgtgacaggcatcgacacaaaagataagtccctgaagaccgtatcttccggcgcgaaaaaaagttttgagttgctgagcgaatccgatggagccctgatggaacaccccgaagtaagtcaggtgcgtcgcaaaactgtcgaattcaacctgaccgacatgccagaaattcctgaaaatcacctcaaagagcccttggagcagtcacccaccaacatccataccacattaaaagatcacatggacccttactgggcactggaaaatcgttctgtgctccacctaaatcagggccactgcatagccctttgtcctacccctgccagtctcgcactgtcccttcctttcttgcacaattttctggggtttcaccactgtcagtccactctggaccttaggcccgcactcgcttgggggatatatctggctacattcaccggcattttgggtaaatgcagcgggccgtttcttacgtccccttggtatcaccccgaggatttcctgggccccggtgaagggcgctag

SEQ ID NO: 180534 - DNA, 1530 bp, synthetic construct
  misc_feature 1..1530: note = Description of Artificial Sequence: Synthetic coding sequence
  source 1..1530: mol_type = other DNA
atgaccgtgacctacaccgcccgggtggccaacgcccggttcggcggatttagccagctcttactactgtggcgagggagtatctataaattactgtggcgtgagctactgtgttttcttggcttttacatggcactgtccgccgcgtacagatttgtccttaccgagggacagaagcggtactttgagaaactggttatctactgtgaccagtacgcctcgttaatccctgtgtccttcgtgttaggcttctatgttaccctggtcgttaaccggtggtggtcacagtacctatgtatgcccctccccgatgccctgatgtgtgtagtagcaggtactgtacacggacgggacgaccgaggccggctgtataggcggaccctgatgcgctatgcaggcttgtctgcagtcctgatccttcggtccgtgtcgacagctgtgttcaagagatttcccaccatcgaccacgttgtggaggcagggttcatgactagagaggagaggaaaaaattcgaaaatctcaattctagctataacaagtactgggttccatgcgtgtggttttccaatctcgctgctcaggctcggcgagagggtaggataagggacaatagcgcacttaagttgttgcttgaagagttgaacgttttccgtgggaaatgtgggatgctgttccactatgattggattagcgtacccctggtgtatacccaggtggttaccattgctttgtatagttacttccttgcctgccttattggccggcagtttttagaccccgctcaggggtacaaggaccatgacctagacttatgtgtcccaatctttacccttctgcagttttttttttacgccgggtggctgaaagtcgctgaacagttgatcaaccctttcggtgaagatgatgatgactttgaaaccaattttctgattgacagaaactttcaggtgtccatgctggccgttgatgaaatgtacgatgacttagctgtcctcgaaaaggatctgtactgggacgctgccgaggccagggcaccctacacagccgcaacggtctttcagctgcgtcagccatctttccaaggcagcacttttgatatcaccctggcaaaggaggatatgcagttccagagattggatggactggacgggcccatgggcgaggctccaggcgatttcttgcagcggctgctgcccgctggagctggaatggtcgctggcggccctctaggccgacgactctcatttttacttcggaaaaattcttgcgtgtctgaagccagcacaggggctagttgttcctgtgccgtcgtccctgaaggcgcagcacccgaatgctcctgtggggaccctttactggatccaggtctgcctgagccagaggccccccctcctgcaggccctgaaccactcacccttatcccgggcccagtggaaccgttcagtattgtgacgatgccgggaccacgtggacccgcccctccctggttaccatctcctattggagaggaagaggagaatctggcttag

SEQ ID NO: 180535 - DNA, 1530 bp, synthetic construct
  misc_feature 1..1530: note = Description of Artificial Sequence: Synthetic coding sequence
  source 1..1530: mol_type = other DNA
atgaccgtgacctacaccgcccgggtggccaacgcccggttcggcggtttctcacaacttttgctcctgtggcgtggtagcatctacaagctgctttggcgagagttgctgtgtttcctcgggttctatatggcactgtctgccgcctaccgattcgtcctcaccgaaggacagaagaggtactttgaaaagctggtgatctattgcgaccagtatgccagcctcattccagtgtcattcgtgctcggcttttacgtcacccttgtggtgaatcggtggtggagtcagtatctgtgtatgcccctgccagacgctttgatgtgcgtcgtcgccggcacagtgcacggtcgagacgataggggtcggctataccgacggaccctgatgagatatgccggcttgagcgcagtcctgatactccggagcgtgtccaccgcagtgttcaagcggttccctacgattgaccacgtagtagaagccggctttatgaccagagaagaacgcaaaaaattcgagaatttaaactcctcctacaataagtattgggtaccatgtgtctggttcagcaacctggcggctcaggccagaagggagggccggatcagggataattccgctcttaaactgttgcttgaggagctaaacgtgttccggggtaaatgcgggatgctgtttcattacgactggattagcgttccattggtgtacactcaggtggtgacaatcgccctatattcttattttttggcgtgccttattggtcgacaattcctcgaccctgcccagggttacaaggatcacgacttggatctgtgcgttcccatatttacactgcttcagttttttttttatgccgggtggctaaaggtggctgagcaactcattaatcccttcggcgaggacgatgacgacttcgagacgaactttctaatcgatcgcaactttcaagtgagtatgctggctgttgatgaaatgtacgatgaccttgcggttctggaaaaagacctctactgggatgccgctgaggctagggccccctataccgcggccaccgtgtttcagcttcggcagcctagcttccagggctctactttcgatataactctcgcaaaggaggacatgcagttccagcgtctggacggtttagacggacctatgggggaagcgcctggggattttcttcagcgcttactgccagctggtgccggcatggtggcaggcggccccctgggccgtagactctcgtttctcctgagaaagaactcatgtgtgagcgaagccagcacaggcgctagctgttcatgcgcagtggttccagagggagctgcccccgaatgctcgtgcggggaccctctgctggatcccggattgcctgagcctgaggctcccccgcccgccggtcccgagccattgacactgatccccggccctgtggaacctttcagtattgtgacgatgccaggccccaggggccctgcccctccgtggctcccctcccccattggcgaagaggaagaaaaccttgcttag

SEQ ID NO: 180536 - DNA, 1530 bp, synthetic construct
  misc_feature 1..1530: note = Description of Artificial Sequence: Synthetic coding sequence
  source 1..1530: mol_type = other DNA
atgaccgtgacctacaccgcccgggtggccaacgcccggttcggcggattcagccagctgctgcttctctggagaggctcaatctataaactgctttggcgtgagttgctctgtttcctcggtttttatatggctctatctgcggcgtaccgttttgtgttgacagagggtcaaaaaagatattttgagaaactggtgatatattgtgaccagtatgccagcctcattccagttagcttcgttctgggattttatgtgaccctcgttgtcaaccgatggtggagccagtatttatgtatgcctctccccgacgctctgatgtgcgttgtggccggcacggttcatgggcgggacgaccgggggaggctgtataggcgcaccttaatgcggtatgcaggactgtcggcagttttgatcttaagaagtgtgagtacggctgtgttcaaacggtttccaaccattgaccacgtggtggaggctggcttcatgacacgagaggagaggaaaaaattcgaaaacctgaattccagctacaacaagtattgggtcccatgcgtgtggtttagcaacctggctgcccaggcgcgccgggaaggcagaataagggataacagtgctctcaagctgctcctggaagagttaaatgtctttagaggaaaatgcgggatgcttttccattatgactggatttctgtcccactggtctatactcaagtggtcaccatcgcactctacagctatttcctggcctgtctgataggaaggcagtttctcgaccctgcgcagggctacaaagatcacgatcttgatctgtgtgtccctatcttcaccttgcttcagtttttcttctatgcagggtggcttaaggtggcagaacaattgatcaacccctttggggaagacgacgatgattttgagacaaacttcctcattgacagaaacttccaggttagcatgctggctgttgatgagatgtacgatgatttggctgttctggaaaaggacctgtactgggatgccgccgaggcccgagctccctataccgccgcaaccgtgtttcagctgcggcagccttcattccagggatccacattcgacattaccctggcaaaggaggacatgcaattccagcgccttgatggccttgacggtccaatgggagaggcaccaggagattttctgcagcggctcctgcctgctggtgccggaatggtggccggcggaccactgggccgcagactctcattcttactccgcaagaatagttgtgtgtcggaggccagcaccggagctagttgcagttgtgccgtggtaccagaaggagcagccccggaatgcagttgcggggacccgcttctcgatccaggcctgcctgaacctgaggcgcctccccccgccggtcccgaaccgctcaccctgatccccgggcccgtcgagcccttttccatagtgactatgcctggccctaggggacctgcccccccttggctgccatccccaattggagaggaagaagaaaatttggcatag

SEQ ID NO: 180537 - DNA, 219 bp, synthetic construct
  misc_feature 1..219: note = Description of Artificial Sequence: Synthetic coding sequence
  source 1..219: mol_type = other DNA
atgttcctgatcagcagcagcgtgcacggcagcgacgagcacggcagactgctgaggcgcaccctgatgcgttacgtcaatcttactagcctgcttatctttaggtctgtgagtacagccgtgtacaagagatttcctaccatggatcacgtcgtggaggcagaacggacaggaatgaaacccatcctgccctccagcttcgaaatgcaatcattttag

SEQ ID NO: 180538 - DNA, 2007 bp, synthetic construct
  misc_feature 1..2007: note = Description of Artificial Sequence: Synthetic coding sequence
  source 1..2007: mol_type = other DNA
atgaccgtgacctacagcagcaaggtggccaacgccaccttcttcgggttccaccgcctgctcctaaagtggcgcggaagtatctacaagctgctgtaccgcgagtttatcgtgtttgcggtcctctatacagcaatcagcctggtttacagactcctgctcacgggagtgcagaagcgatatttcgagaagctgagcatttactgcgaccgctacgctgagcagattcccgtgacatttgtactgggattctatgtaactttagtggtgaaccgctggtggaaccagtttgttaatcttccttggcctgatagacttatgtttttaatcagttcatccgtccacggcagcgacgagcacggccgacttctgagacgcactctcatgcggtatgtaaatttgacatctttgctgattttccgaagtgtctctaccgcagtttataagaggtttcccacaatggatcacgtggtggaggcaggctttatgacaaccgacgagcggaaattgttcaaccacctcaagtctccgcatttgaaatactgggtcccattcatttggtttggtaatctggcaacaaaggctcggaatgagggacgtattcgagacagtgtagatctccagagcctcatgaccgagatgaaccgctacaggagttggtgctctctgctctttggctacgactgggtgggcattcccctagtctacacacaggtcgtgacactcgcagtgtacaccttctttttcgcctgcctgattgggagacagttcctcgaccccaccaagggctatgcaggccacgatctcgacctctatattcccatatttacactgcttcaatttttcttctacgcagggtggttaaaggtagctgaacagctaattaatcccttcggtgaagatgacgacgacttcgagactaactggtgtatcgatagaaaccttcaagtaagcctgctcgctgtcgacgagatgcatatgagtctcccaaagatgaagaaggacatatactgggacgactcagcagcccggccaccctacaccctggcggctgctgactattgtatcccctcatttctcgggagcacggttcaaatgggactgtcaggcagtgactttcctgacgaggagtggctttgggattacgagaagcacgggcataggcattctatgattaggagggtcaagcgtttcctaagtgcacacgaacacccctcttctccccgccgacgctcttatcgccggcaaaccagcgactctagtatgttcctgcccagggatgacctctcaccagcaagagacctactggacgttccttcccggaacccccctcgcgctagcccgacctggaaaaagtcctgctttcccgagggctctccaacgctccacttttctatgggcgagctgagcactatacgggagacatctcagacgtccacactccagagcttaacaccacagagctctgtgagaactagcccaatcaagatgcccctcgtccctgaggtactgattacagccgctgaagctcccgtccctacatccggcggatatcatcacgactcagcgacttccatcctctcaagcgagttcaccggtgtacaaccttccaagactgagcagcagcagggacctatgggttccattctgagtccttcggagaaggaaactccacccggaggaccaagccctcagacagtgagtgctagtgcagaagaaaacattttcaattgtgaggaggaccccggggacacttttcttaaacggtggagccttcctggattcctcgggtcatcccatacaagcttgggcaacctcagcccagatccaatgagttcccagccagcactgcttatcgataccgagacttcaagtgagatctccggcattaacatcgtggccggttcacgggtgtcctcagacatgctgtacctgatggagaatctggacacgaaagagaccgacataatcgagctgaacaaggagacagaagaaagcccaaaatag

SEQ ID NO: 180539 - DNA, 1197 bp, synthetic construct
  misc_feature 1..1197: note = Description of Artificial Sequence: Synthetic coding sequence
  source 1..1197: mol_type = other DNA
atgaccgtgacctacagcagcaaggtggccaacgccaccttcttcggctttcaccggctgctcctcaagtggaggggctctatatacaaattgttgtatcgcgaatttatcgtcttcgctgttctctatacggcgatcagcctagtatatcgattactgctgactggtgtgcagaagaggtatttcgaaaaattatcaatatactgcgacaggtacgctgaacagatacctgttacctttgtacttggattctacgtgacactggtggtcaacaggtggtggaatcaatttgtaaatctgccgtggccggacagattgatgttcttgattagcagctccgtgcacgggagcgatgagcatggccgcttactcaggcgcacccttatgcgatacgtgaacctgaccagcctgctgattttccgttctgtcagcactgcagtctataagcgctttcctacgatggatcacgtggtcgaagccggctttatgacgacagatgaacgtaagctgtttaaccacctgaagtctccccatttgaagtactgggttccatttatctggttcggtaatttggccacgaaagctcgaaacgagggacggattcgagactctgtggaccttcagtcgctgatgaccgagatgaatcgctaccggtcgtggtgtagcctgctgtttggttatgattgggttggaattcctctcgtgtatacacaggtggttacgctggcagtatacaccttcttctttgcttgtctgatcggtaggcagttcctcgatcccaccaagggttatgctggtcacgacctggacctgtacatccctatttttactctgcttcagtttttcttctatgctggatggctgaaagttgccgagcagctgatcaatccctttggcgaggatgatgatgatttcgagactaactggtgcatcgaccgtaacttgcaggtgtctctgctcgcagtagacgagatgcacatgagtttgcctaagatgaaaaaagacatatattgggacgattctgctgcgcgcccgccatataccctcgccgcagcagattattgtattccctcctttctggggagcactgtccaaatgggaaagcagatgccgaagaacgaatggaaaatggaggacataaagatccccctgcctcagccacaattccagtgtgccaagagtgacccgggcgggtag

SEQ ID NO: 180540 - DNA, 219 bp, synthetic construct
  misc_feature 1..219: note = Description of Artificial Sequence: Synthetic coding sequence
  source 1..219: mol_type = other DNA
atgttcctgatcagcagcagcgtgcacggcagcgacgagcacggcagactgctgcggagaacattgatgcggtatgttaacctgacctctctgctaatcttcagatccgtgtccacagccgtgtataaacggttccctaccatggaccatgtggtggaggccgaaagaaccggcatgaagcccatacttccctcatccttcgagatgcagtctttctag

SEQ ID NO: 180541 - DNA, 1368 bp, synthetic construct
  misc_feature 1..1368: note = Description of Artificial Sequence: Synthetic coding sequence
  source 1..1368: mol_type = other DNA
atgaccaccgacgagcggaagctgttcaaccacctgaagagcccccatcttaaatactgggtgccattcatttggttcggtaatctggccactaaggcaagaaatgaaggacgaattcgggactccgtagacctccaatcgctgatgactgagatgaatcggtacaggtcctggtgtagcttgctattcggctatgactgggtcggcatccctttggtctatacgcaggttgctgaacagctgattaaccccttcggcgaagatgacgatgatttcgagaccaactggtgcattgaccgtaaccttcaggtctccctgttagccgtggacgaaatgcatatgagtctgccaaagatgaagaaagacatttattgggatgactccgcagcccgaccaccctataccctcgccgcggccgactattgcattccctcctttctgggaagcactgtacagatggggttgtccgggtcagacttccctgatgaagagtggctgtgggactatgaaaagcacggtcataggcacagcatgatcagacgagttaaacggtttctgtcggctcacgaacatccctcatccccccggagaaggagttaccggagacaaacatccgattccagcatgtttctgcccagggacgacctgtcaccagccagggacctcctggacgtgccatcccgcaacccgccgcgggcctccccgacatggaagaaaagttgttttccggaggggtcccctactttgcattttagcatgggagagctgagcaccattagggagacttcgcagacatccaccctgcagagtcttacacctcagagcagcgtgcgtacctctcctatcaaaatgcctctggtgccagaggtgctgatcacagccgccgaggcgcctgtgcctacctctggcggctaccatcacgattccgcgacttcaattcttagtagcgaatttaccggggtgcagcctagtaaaactgaacagcagcagggacccatgggttcgattctctcacctagtgaaaaggaaactcctcccgggggtccaagccctcagaccgtgtcagccagcgcagaggagaatatatttaactgtgaagaagacccaggggatacgttcctgaagcgctggtctctgcctggcttcttggggagttcccacacttctcttggaaacctgtctcccgatccaatgtcctcccagcctgcgttgctgatcgacaccgagacatccagcgagatctccggaataaatattgtggcaggctctagggtctccagcgatatgctttacctaatggaaaatctggatactaaagagaccgatataattgagctcaacaaagagaccgaggaatcccctaagtag

SEQ ID NO: 180542 - DNA, 219 bp, synthetic construct
  misc_feature 1..219: note = Description of Artificial Sequence: Synthetic coding sequence
  source 1..219: mol_type = other DNA
atgttcctgatcagcagcagcgtgcacggcagcgacgagcacggcaggttactgcggcggaccctcatgaggtacgtcaatttaacaagcctgctgatctttcgcagcgtctccaccgctgtatacaagaggtttcctacaatggaccatgttgttgaagcggagcggacaggaatgaagccgattcttccctcttccttcgaaatgcagagcttctag

SEQ ID NO: 180543 - DNA, 1422 bp, synthetic construct
  misc_feature 1..1422: note = Description of Artificial Sequence: Synthetic coding sequence
  source 1..1422: mol_type = other DNA
atgaccgtgagctacaccctgaaggtggccgaggcccggttcggcggattttcaggcctgcttctgaggtggagagggagcatttacaagctgctttacaaggagtttcttctttttggcgcgttatacgcagtgctcagtataacttataggctgcttctcacccaggaacagagatatgtttatgctcaggtggccagatattgcaacaggtccgccgatctaatacccctgtcttttgtgctgggcttctatgtcacgcttgttgtgaatcgatggtggtctcagtacactagtatcccactgccagaccagctcatgtgcgtcatttcagcaagtgtgcacggagtggatcagagaggacgtctcctgagaagaaccctgatcaggtacgctaaccttgcttctgtgcttgtcttgcgctcggtctctacacgcgtgcttaaacgtttccccacaatggagcatgtagttgatgccggattcatgtctcaggaggagcgcaaaaagttcgaatctctgaagtccgactttaacaagtactgggtaccttgtgtgtggttcaccaatctagcagctcaggcgagaagggatggacggatcagggacgacatcgcactttgcctcctgctggaggagttgaacaaatatcgggccaagtgttccatgctgttccattacgattggataagcattcctctggtgtatacccaggtcgtaaccatcgcagtctactcattctttgcgctttctctggtgggaagacagttcgtcgaaccagaagcaggagcagccaagccccagaaacttttgaaacccggccaggagcccgcgccggcattgggagatcccgatatgtatgtcccgctgaccactctgctccagtttttcttttatgctgggtggttgaaggtagcagagcaaattattaacccgtttggggaagatgacgatgatttcgaaacgaatcagctgatagatcgaaatttacaggtcagtctcctgagtgtagatgaaatgtaccagaatttaccaccagctgagaaggaccagtactgggacgaggaccagccccagcctccgtacaccgtagctactgctgctgagtctttacggcccagttttctgggaagtacctttaacttgcgtatgtccgacgatcccgaacagtcgctgcaggtggaggcctctccaggttctgggcgaccagcccccgccgcccaaacgccactgttagggcgctttctcggcgtgggagctcctagtcctgcgatctccctgcggaatttcgggcgggtccgcgggaccccccgcccgccccacctcctgcggttcagagcagaggaaggtggggatccagaagccgccgctcgcattgaagaggaatccgcggagtctggggatgaggctctcgaaccctag

SEQ ID NO: 180544 - DNA, 294 bp, synthetic construct
  misc_feature 1..294: note = Description of Artificial Sequence: Synthetic coding sequence
  source 1..294: mol_type = other DNA
atgtacctgggcatcacccccagcgtgacctgcaacaacagcagcaaaaacgaattctcactgattctggagaagaacccattggtggagtttgttgaggagctgcctgccggccggagcagtttatgctactgcaacttactgtgcggtatcattcggggggcactggagatggttcaccttgcggctgatgtgaccttcttgcaggaccgacttaaaggggattcagttacagagatcggtattacctttctcaaaaaacgcgatgagaagaagtatcgtgggaagaaatag

SEQ ID NO: 180545 - DNA, 546 bp, synthetic construct
  misc_feature 1..546: note = Description of Artificial Sequence: Synthetic coding sequence
  source 1..546: mol_type = other DNA
atgagccggcccgcccaccggcggcccgagtaccacaagatcaacaaagacctgtttgtgcttacctacggcgccctcgtcgcccagctgtgcaaagattacgaaaaagacgaggatgtcaaccaataccttgacaaaatgggttatggcattggcaccagactggtagaggactttttggcaagaagttgcgtgggccggtgccactcttattcagaaatcattgatatcatcgcccaagtagcttttaagatgtacttgggcatcaccccatctgtcacttgcaataactcctcaaaaaacgaattctctctcattttagaaaagaatccactagtagagttcgtggaggaactaccggcgggccggtcaagcttgtgttactgcaatttgctttgtggaattatacgaggggccctggagatggtccacttggccgctgatgttacattcctgcaagatcgcctcaaaggagacagtgtaactgagattgggattacttttttgaaaaagcgggacgaaaaaaaatacaggggtaagaagtag

SEQ ID NO: 180546 - DNA, 504 bp, synthetic construct
  misc_feature 1..504: note = Description of Artificial Sequence: Synthetic coding sequence
  source 1..504: mol_type = other DNA
aacaaggacctgttcgtgctgacctacggcgccctggtggcccagctctgtaaggactatgaaaaggatgaagatgtgaaccaatacctcgataaaatgggttatgggattggaacaagattagtggaggactttctggctcgaagctgcgtcggacgatgccactcatatagtgagataatcgacataattgcgcaagtggcattcaagatgtatctcggaataactccctctgtaacatgcaacaattcatcaaaaaacgagttttccctgattctagagaagaaccctctcgttgagtttgtagaggagcttcccgctgggaggtcctcattgtgttactgtaatttgttgtgtggcatcatacgtggagcactggaaatggtgcatctggcagcagatgtgacttttctccaagaccggctgaagggggactcagtgactgagattggaatcacgtttctgaagaagagagacgaaaaaaagtaccgcggtaaaaagtag

SEQ ID NO: 180547 - DNA, 1497 bp, synthetic construct
  misc_feature 1..1497: note = Description of Artificial Sequence: Synthetic coding sequence
  source 1..1497: mol_type = other DNA
atgcggccccccgcctgctggtggctgctggccccccccgccctgttggcccttcttacctgcagcctggcttttggtttggccagtgaagatacaaagaaggaggtgaagcagagccaagatctagaaaagtccgggatctccaggaagaatgacattgatctgaagggaattgtttttgttattcaatctcaatcgaattcctttcatgcgaagcgggctgagcagcttaaaaagagcattctgaaacaggctgccgacctcacccaggaactcccttcagtcttgcttttacatcagcttgctaaacaggaaggggcgtggacaatcctgccccttctcccgcacttctctgtgacgtattcacgcaactcatcatggatcttcttctgcgaggaggagacaaggatacaaatcccaaaactcctggagacccttaggcgttacgatccaagtaaagagtggttcctggggaaagcactgcatgatgaggaggctacaattattcatcactatgccttctccgagaaccctaccgtcttcaaatacccagattttgctgcgggttgggcactcagcattcccctggtcaacaagctcacaaaacgccttaaatcagaaagtctcaaaagcgatttcaccatcgacttgaagcatgaaattgccttatatatttgggacaaaggcggaggaccacccctgacaccagtacctgaattttgcacgaacgatgtggatttttactgcgcaaccacttttcactctttcctgccgttgtgtcggaaaccggtgaaaaagaaggatatctttgtcgccgtcaaaacttgcaagaagttccacggagatagaattccgatcgtaaaacagacctgggagtcccaggcctcactgatcgaatactactccgactatactgagaattctattccaaccgtggaccttggaattcccaataccgatagaggacactgcggcaaaactttcgccattctggagaggtttctgaatcgcagccaggacaaaacggcttggttagttattgtcgatgacgacacgctcatttccatatcacggcttcagcaccttctttcctgctatgactccggggagccagtctttctgggggagagatatgggtatggcctaggcactgggggatattcatacatcaccgggggcggcgggatggtattttctcgggaagccgtacggcgactccttgcatctaagtgcagatgctatagcaacgatgcaccagacgatatggtactcggtatgtgttttagtggccttgggatccctgtaactcacagtccgcttttccatcaggcaaggcctgttgattatccaaaggattatctgagccatcaggtccccatctcatttcacaaacactggaatatagatcctgtgaaggtctactttacctggcttgctccgtcagacgaagataaggcaagacaggaaacccagaaagggtttagggaagagttgtag

SEQ ID NO: 180548 - DNA, 1005 bp, synthetic construct
  misc_feature 1..1005: note = Description of Artificial Sequence: Synthetic coding sequence
  source 1..1005: mol_type = other DNA
atgcccaagcggcgggacatcctggccatcgtgctgatcgtgctgccctggactttgctcatcactgtgtggcaccagtcaactctggcaccactcctggctgttcacaaggacgagggctcagacccacgaagagagacgccccctggtgcagatccaagggagtattgcacaagcgaccgggacatagtagaagtggtgagaactgagtatgtttacacacgccccccaccatggagtgatacacttcctacaatacatgttgtaacacctacctattcacgacctgttcagaaagcagagctcacgagaatggctaatacccttcttcatgtgcctaacttacactggctggttgtggaagacgcacctaggagaaccccacttactgcccgcctcctccgggacacgggactcaactacacccacctgcacgtcgagacgcctcgtaattataagctgcgtggtgacgcgcgggaccccaggatccctagggggaccatgcaacgaaacctcgctctccgatggctacgagaaacttttcctaggaattccagccaaccaggggtcgtgtacttcgcagatgacgacaacacatacagtctcgagttgtttgaggagatgcgctccacccgaagggtttcggtttggcctgtggccttcgtgggcggcctccgttatgaagcaccgagggtgaacggcgccgggaaggttgttggctggaaaaccgtttttgacccccatagaccgtttgcgatcgacatggcaggcttcgctgtgaacctacggttaatcttacagcggtcacaggcctacttcaagcttagaggcgtcaagggcgggtaccaagaatcaagcttgcttcgagaattggtgaccctgaatgacctggagcctaaggccgcaaactgcactaaaatccttgtttggcacaccagaaccgaaaaaccagtgctggtgaacgagggcaagaaaggatttacagaccctagcgtcgagatttag

SEQ ID NO: 180549 - DNA, 1005 bp, synthetic construct
  misc_feature 1..1005: note = Description of Artificial Sequence: Synthetic coding sequence
  source 1..1005: mol_type = other DNA
atgcccaagcggcgggacatcctggccatcgtgctgatcgtgctgccttggactctgctgatcacggtctggcaccagagcacacttgcccctctgttggctgtccacaaagacgagggctctgatcccagaagagagaccccacctggcgctgatcctagagagtactgtactagcgaccgcgatatagtggaagtagtgcgcactgagtatgtgtacaccagacccccgccatggtcagacaccctgcctacgattcacgttgttaccccgacttatagtagacctgtgcagaaggccgagctgacaagaatggctaatactctcctccatgtccctaatctgcattggctggtggtggaagacgcgcctcgcaggacccccctgacggctagactgctgagggacactggtctgaattatacacacttgcacgtagagacgccgaggaactataagctgagaggagatgcaagggatccccggatcccaagggggacaatgcagcggaaccttgccctgcgttggttgcgggaaacctttccccgcaattcctcccagccaggtgtggtatactttgcggatgacgataacacctacagtctagaactcttcgaggaaatgaggtcaacccggcgggtgtccgtttggcccgtggccttcgtcgggggtctgagatacgaggctccaagggtgaacggggccggcaaggtcgtgggctggaaaactgtgttcgacccccatcggccctttgcaatagatatggcggggttcgctgttaacttaagactcatccttcagagaagccaagcctatttcaagcttagaggggtgaaaggggggtatcaggagtcctcgctgcttcgtgagctggtgaccctcaatgacctagagcccaaggctgcaaactgcaccaagatcttagtttggcacactaggactgaaaagcctgtcttagttaacgaggggaagaaggggtttaccgaccctagcgtcgagatctag

SEQ ID NO: 180550 - DNA, 1005 bp, synthetic construct
  misc_feature 1..1005: note = Description of Artificial Sequence: Synthetic coding sequence
  source 1..1005: mol_type = other DNA
atgcccaagcggcgggacatcctggccatcgtgctgatcgtgctgccttggacccttttgattaccgtatggcaccaaagcacactggctcccttactggcagtgcacaaggacgagggttccgatccaagaagggaaacgccccccggggcagacccgcgcgaatattgtacttcagaccgggatatagtagaggtcgtacgcacagaatacgtgtatacaagaccccccccctggtccgataccctgccaacaatacatgttgttaccccaacttactccaggccggttcagaaggctgaacttacccgcatggctaatacactgctgcacgtacccaacctacactggctggttgtcgaagacgctccacggcggacaccactgaccgcgagattattaagggacacaggcctcaattatacacacctccacgtagagactcccagaaactataaattaaggggcgatgccagagatcctcgtatcccacgcggaactatgcagcgaaatctggcgctgcggtggttaagagaaacattcccaaggaactcgagtcagcccggggtggtatatttcgcagacgacgacaacacctatagtctggaactgtttgaggagatgagatcaactcgtagggtgtcagtctggccggtggctttcgttggcggactgagatacgaagctccccgcgtgaacggcgctgggaaagtggtgggatggaagactgtgttcgaccctcaccgccctttcgccattgacatggccggattcgcagttaatttgcggctcatcttgcagcggtctcaggcttattttaaactgcggggggtaaaaggcggttatcaggaaagtagtctgctccgcgagctggtgaccctcaatgatcttgagcccaaagccgccaactgtaccaagattctggtatggcataccagaactgagaaaccggtccttgtcaacgaagggaagaagggtttcacagatccctccgtcgaaatttag

SEQ ID NO: 180551 - DNA, 1044 bp, synthetic construct
  misc_feature 1..1044: note = Description of Artificial Sequence: Synthetic coding sequence
  source 1..1044: mol_type = other DNA
atgggcaacgaggagccctgggtgcagcccgccctggagatgcccaagcgacgcgatatcctggctatcgtgctcatcgttcttccatggaccctcctgatcacagtatggcatcaatctacattggctccactgctcgccgtgcacaaggacgagggtagtgacccacggcgcgaaacaccccccggggcagatcccagagagtattgcacgagcgaccgagatatcgtggaagtcgttcggaccgagtatgtctatacgcggcccccaccgtggagcgataccctgccgacaattcacgtggtgactcctacctattccaggccagtgcagaaggctgagctgaccagaatggctaacacattgctgcatgtgcccaatctccactggctcgtggtggaggatgctccacggaggactccacttacggcccggctactgagagatacgggactgaattatacccacctacatgtggaaaccccaagaaactataagctgcgcggagatgcccgcgatccccgtattccccgggggaccatgcagcggaacctcgctttgaggtggcttagggagactttcccccgtaactcaagccagcccggggttgtttatttcgccgacgatgacaacacttatagcctcgagctctttgaggaaatgaggtccaccagaagagtttcggtttggcccgtggcatttgtgggggggctgagatatgaggcgcctcgcgtcaatggagccggtaaagtcgttggatggaaaactgtcttcgaccctcacagacctttcgccatcgatatggccggcttcgccgtaaacttgaggcttattctgcagcgatctcaggcctatttcaagctgagaggagttaaaggtggttaccaggagagctcactgctacgtgagctggttaccctgaacgacctcgaaccaaaggccgctaactgtaccaaaattttggtctggcatacaagaaccgaaaaacccgtgctagttaacgagggcaagaagggattcaccgatccgtctgtcgaaatctag

SEQ ID NO: 180552 - DNA, 1008 bp, synthetic construct
  misc_feature 1..1008: note = Description of Artificial Sequence: Synthetic coding sequence
  source 1..1008: mol_type = other DNA
atgaagctgaagctgaagaacgtgttcctggcctacttcctggtgtcaatcgcaggcctgctctacgccctggtccaactcggtcaaccttgtgactgcctgccaccactgagggccgccgcggagcagttgagacagaaggacctgaggatatctcagctgcaggctgaactgcggcggccaccacccgcacccgcacagccccctgaaccagaagctctgccaaccatctacgtggtgacgcccacttacgcccgattagttcagaaggcagaactggtgagactgtcccagactttgtcactggtgccgcggttgcattggttgctggttgaggacgccgaggggccgacacctcttgtttccggattactggccgcaagtgggctgctcttcacccacttggtagtcctgacccccaaagcacagcggttgcgagagggcgagccagggtgggtacatccacggggcgtagagcaaagaaataaggcactcgattggttacggggacggggcggcgccgtgggcggcgaaaaggaccccccccctcctggaacgcagggagtcgtctatttcgccgacgacgataacacatattccagggaactgttcgaggagatgaggtggaccagaggagtgtctgtctggccagtaggcctggtgggaggcttgcgttttgagggccctcaagtgcaagacgggagggtggtaggcttccacaccgcctgggaaccctctcggcctttccccgtggacatggccggcttcgccgtggccctcccacttctgcttgataaaccaaacgcacagtttgatagcacggctcccagaggccaccttgagtccagcttgctctcacatttagtcgatcccaaggatctggaacccagagccgcaaattgcacgcgggtcctggtctggcatacgcgcacagagaaaccaaaaatgaagcaggaagagcagttacagcgccagggcagagggtcagacccagctattgaggtgtag

SEQ ID NO: 180553 - DNA, 948 bp, synthetic construct
  misc_feature 1..948: note = Description of Artificial Sequence: Synthetic coding sequence
  source 1..948: mol_type = other DNA
atgaagctgaagctgaagaacgtgttcctggcctacttcctggtgagcatcgccgggcttctgtatgcactcgtccagctaggacaaccttgtgactgcctgccaccgctgcgcgctgccgcagagcagcttcgacaaaaggacctaaggatcagccaacttcaggcagaactccggcggccacccccagccccagcccagccacctgagccagaggccctgccgactatttacgtagtaacgccaacctatgcccgccttgtgcaaaaggctgagctcgtgagattgtctcagacactctcacttgtgcctagactgcactggttgctggtggaggatgctgagggccctactcccttggtctcaggcctgctggcggcttcaggcttactgtttacccacctcgtggtacttactcctaaggctcagcgactgcgggagggagagccaggatgggtccacccacgcggtgtggagcaacggaacaaggctcttgattggctgagaggccgcggcggagcggtcggtggtgagaaggatccaccacctccggggacacagggcgtcgtgtatttcgccgacgatgacaacacgtatagccgagaattgtttgaggaaatgcgatggacacgcggggtgagtgtgtggcctgtggggctcgtgggcggcttaaggtttgagggcccgcaggtccaggacggtcgagtggtggggttccataccgcttgggagccctctaggccatttccggttgacatggcaggtttcgccgtggccctcccactgctgctcgacaaacctaatgctcaattcgactcaacggctcccagaggtcatcttgagtcctccttgttgagtcatctagtagatcccaaggatctcgaaccccgcgccgccaattgtacacggacagagagccgctgcgtgactcaggcaggtgttcaatag

SEQ ID NO: 180554 - DNA, 2997 bp, synthetic construct
  misc_feature 1..2997: note = Description of Artificial Sequence: Synthetic coding sequence
  source 1..2997: mol_type = other DNA
atgggcagcccccgggccgcccggccccccctgctgctgcggcccgtcaagctactccgacgaagatttcgtctcctgttggccctggctgttgtctcagtgggcctgtggacgctgtacctagaactggttgccagcgcacaggtggggggtaaccccctgaaccgacgctacgggagctggagggaactggccaaggccttggcttctcgcaacatcccagccgtggacccacatctgcagttttaccatccccaaagactttccctagaggaccatgacatcgatcaaggagtgtcttctaattcaagctacctgaagtggaacaagccggttccttggctgagcgagtttcgaggcagggccaatctgcacgtgtttgaagattggtgcggatcgagtattcagcaattaagacggaatttgcactttcccttgtatcctcatatcaggaccaccctccgcaaactggccgtgagccctaagtggaccaactacgggcttcggatcttcggttacctccacccatttacggatggtaagatccaatttgcaatcgccgctgatgacaacgccgaattttggctttccctggacgatcaggtatctgggctccagctgcttgcctctgtgggcaagaccgggaaggagtggacagcccctggggagtttggcaaatttagaagccagatttctaaaccagtaagtttgtccgcctctcacaggtattatttcgaggtattgcacaagcagaacgaagaaggcactgaccacgtagaggtggcgtggagacggaatgatccaggtgcgaagtttacgatcatagactccctgagtctgtcgttgtttactaatgagacatttcttcaaatggacgaggtggggcacataccccagacagctgccagccacgttgatagcagtaacgctctgccaagggacgaacagcctcccgccgatatgctcaggccagacccccgcgataccctctaccgcgtccccctcatacctaagagccacttaaggcatgtcctgccggactgtccttacaagccctcttatctggtagacgggttgccgctgcagcgctaccaggggttaaggtttgtacaccttagctttgtgtacccaaacgattataccagattgtcccacatggaaacccacaataaatgtttttaccaagaaaacgcttactaccaggatcgcttctcctttcaagaatatatcaagattgaccaacctgaaaagcagggcctcgagcaacctggctttgaagaaaaccttttagaggagtcccaatacggggaggtggccgaagagaccccggcttctaacaaccagaacgcgagaatgctggagggcagacagacccccgcgtctaccctggagcaggatgccacggactatagattaaggagtctgaggaaactcctggctcagcctagggagggattactggccccatttagtaagcgtaatagcaccgccagtttcccggggcgcaccagccacataccggtgcaacagccggagaagcgaaaacagaaacctagcccggagccttctcaggatagcccccactcagataagtggccaccgggacacccagtgaaaaatctgccacagatgcgggggccgcggccaaggcccgccggggattctcctaggaaaacccagtggctgaaccaagtggaatcatatatagcagaacagcggagaggagatcgtatgcggccccaggctcccggtcgaggttggcacggagaggaagaggttgttgcagcggcaggacaagagggccaggtcgagggcgaagaggagggggaggaggaggaggaagaggaggacatgtctgaggtctttgagtacgttcccgtgtttgatccggtcgttaactgggatcagacatttagcgcccgcaacctcgactttcaggccttgcgtactgactggatagacctgagttgcaatacatcagggaatctgttgctgccagaacaggaggctctcgaggtcactcgtgtgttcctgaagaagctcaaccagcgctccagagggcggtatcaactgcagagaatcgtgaacgtcgagaaaaggcaggaccaactgcgggggggcagatacctgctcgagcttgaattactggagcaaggccagagagttgtaaggttgtcggagtacgttagcgccagaggatggcagggcattgacccagcaggaggagaagaggtcgaggcgcgaaatcttcagggcctcgtctgggaccctcacaatcgacggcgacaggtgctcaatacaagagcgcaagagccgaagctctgctggcctcagggcttctcctggtctcaccgagcagttgtgcactttgtcgtgccggtcaagaatcaggcgcgctgggttcagcagttcattaaagacatggagaatctgttccaggtaactggagatccccacttcaacattgttattactgactactctagcgaggatatggatgtcgaaatggccctgaagcgttccaagctgaggtcctaccaatatgtgaagcttagtggcaacttcgagaggagcgcaggcctccaagcaggtatcgatctggtcaaagatccccatagcattatttttctctgcgatctgcatattcactttcctgctggcgtgatagacgccatccggaagcactgcgtggaggggaaaatggcctttgcccccatggtcatgcggctccactgtggagcaaccccgcaatggcccgaaggctactgggaagtcaacggctttggtctcctggggatatacaaatcggacctcgaccggattggcggaatgaatacaaaagaattccgcgatcggtgggggggggaggattgggaactgcttgatagaattctgcaggccggactcgatgtggagcgattgagcctacgcaacttcttccaccattttcactctaagcgggggatgtggtctagacgccagatgaagaccttatag

SEQ ID NO: 180555 - DNA, 306 bp, synthetic construct
  misc_feature 1..306: note = Description of Artificial Sequence: Synthetic coding sequence
  source 1..306: mol_type = other DNA
atgagccggagcgtggccctggccgtgctggccctgctgagcctgagtggcctggaagccatacagcgaactccgaagatccaggtttattctcggcaccccgccgagaatgggaaatcaaactttctgaactgctacgtgtccggattccacccgtctgacatcgaggtagacttgttaaaaaacggagaaaggatcgagaaagtagagcactcagatctttctttctctaaagattggtcattttacctgctttactacacagagtttacccctactgaaaaaatgtccatgccagcagtctag

SEQ ID NO: 180556 - DNA, 369 bp, synthetic construct
  misc_feature 1..369: note = Description of Artificial Sequence: Synthetic coding sequence
  source 1..369: mol_type = other DNA
atgagccggagcgtggccctggccgtgctggccctgctgagcctgtcaggactggaagcaatccagcgtactccgaaaatacaggtgtactctaggcaccccgcagaaaatggtaaaagcaacttcctgaactgttacgtgtctggtttccatccatccgacatcgaggttgaccttctgaaaaatggggaaagaattgagaaggtggagcacagcgacctttcattcagcaaagattggtccttttatctgttatactataccgaatttacccctacagaaaaagatgaatacgcttgcagggtcaaccatgtgactctatctcagccaaagattgttaagtggggaaagtcttacattttactgtag

SEQ ID NO: 180557 - DNA, 360 bp, synthetic construct
  misc_feature 1..360: note = Description of Artificial Sequence: Synthetic coding sequence
  source 1..360: mol_type = other DNA
atgagccggagcgtggccctggccgtgctggccctgctgagcctgagcggcctagaggcaattcaacggacaccaaaaatacaagtgtattcccggcatcccgccgaaaatgggaaaagtaattttctgaactgttacgtgtcaggctttcacccaagtgacatcgaagtcgacttgctcaagaatggtgaacggatagaaaaggtggaacatagcgatttaagtttctcaaaggactggagcttttacctgctatactacacagaatttacccctacagaaaaggatgagtacgcatgccgtgttaatcatgtaactctctcccaacctaaaatcgtcaagtgggacagagatatgtag

SEQ ID NO: 180558 - DNA, 369 bp, synthetic construct
  misc_feature 1..369: note = Description of Artificial Sequence: Synthetic coding sequence
  source 1..369: mol_type = other DNA
atgagccggagcgtggccctggccgtgctggccctgctgagcctgtccggacttgaagctatccagcgcactcccaaaatacaggtttatagcaggcacccagcagagaacggaaaatccaattttctcaactgttacgtgagcggctttcacccctccgatatagaagttgacttattaaagaatggggaacggattgagaaagtcgaacatagtgatttatccttttctaaggactggagcttctatctactctactatacagaatttaccccgacagaaaaagacgagtatgcctgtcgggttaaccacgtgacactttcccagcccaagattgtgaaatggggtaagtcctatatactcctgtag

SEQ ID NO: 180559 - DNA, 360 bp, synthetic construct
  misc_feature 1..360: note = Description of Artificial Sequence: Synthetic coding sequence
  source 1..360: mol_type = other DNA
atgagccggagcgtggccctggccgtgctggccctgctgagcctgtcagggctggaagctatccaacggacccccaagatacaggtgtattcacgccatcccgccgaaaacggaaagtccaatttcctgaactgctacgtgtccgggttccacccttccgatatcgaggtcgacctcctgaagaacggcgagcgcattgaaaaagttgaacactctgacctctctttcagcaaagactggtctttctaccttttgtactatacagagttcactcctactgaaaaagacgaatacgcttgtcgggttaatcatgttacacttagccagcccaagatagtgaagtgggacagagacatgtag

SEQ ID NO: 180560 - DNA, 360 bp, synthetic construct
  misc_feature 1..360: note = Description of Artificial Sequence: Synthetic coding sequence
  source 1..360: mol_type = other DNA
atgagccggagcgtggccctggccgtgctggccctgctgagcctgagcgggctagaggccatccagaggacccctaagatacaggtctatagtagacatcctgccgaaaatggcaagtcaaatttcctgaactgttatgtgagcggctttcatcctagtgacattgaggtggacctgctcaagaacggagaacggattgaaaaagtagaacacagcgatctctccttctccaaggactggtccttctacctcctttactacaccgaatttacaccaaccgaaaaggatgagtatgcttgtagagtgaaccacgttactctgtcccaaccaaagatagtcaaatgggacagggacatgtag

SEQ ID NO: 180561 - DNA, 1644 bp, synthetic construct
  misc_feature 1..1644: note = Description of Artificial Sequence: Synthetic coding sequence
  source 1..1644: mol_type = other DNA
atggacatcatcttcggccggaaccggaaggagcagctggagcccgtcagagctaaggtcaccggaaagatccccgcatggctgcagggcactctgctgagaaacggaccgggaatgcacaccgtcggggaaagtcggtacaatcactggtttgacggtctggcactgctccattctttcaccatccgagacggagaggtgtactatcgatcaaagtacctgcgcagcgacacctacaataccaacatagaagccaataggatagtggtgagtgagttcggaaccatggcgtaccccgacccctgcaaaaacatctttagtaaggccttttcttatctgagccacacaatccctgattttacagacaattgcctcattaatattatgaagtgtggggaggatttctacgcgacatccgaaactaactacatccgaaaaataaacccccaaactcttgaaacattagaaaaagtcgactaccgtaagtacgtggcagtgaatttggccacttcccacccacattatgatgaggctggcaacgtcctgaacatgggaacctctatagtggaaaagggaaagaccaaatacgtgatttttaagatacccgcaaccgtgcccgaaggtaagaaacagggaaagtcaccctggaaacatacagaggtgttctgtagcattcccagtcgctccttgttatccccttcctactaccactcatttggagtaaccgagaattacgtaatcttcctggaacagccctttcgcctggatattctgaaaatggccaccgcatatatccgtagaatgtcctgggcctcctgcctggcttttcatcgcgaggaaaaaacatacatccatatcatcgaccagaggactaggcagcccgtccagaccaaattctatacggacgcaatggtcgtttttcaccacgtgaatgcttatgaggaggatggttgcatcgtgtttgacgtgatcgcatacgaggacaattcactctaccagctgttctatctggctaacctcaatcaggacttcaaagagaacagccgcctgaccagtgttccaactcttaggcgctttgcagtgccgctccatgtagacaaaaacgctgaagtggggaccaacctcattaaggtcgcttctacaactgccacagcattgaaagaagaggacgggcaggtgtactgccaaccggagttcctttacgagggtctcgagctgccaagggtgaactatgcccacaatggaaagcagtaccgttacgtgttcgccaccggggtgcaatggagcccgatccctaccaagatcattaagtacgatatcctgaccaagagctcacttaagtggcgggaagatgattgctggcctgctgagcctctcttcgtgccagctcctggagccaaggatgaggatgatggcgtgatcctatcggctatcgtttctaccgaccctcagaagctcccgttcctacttatcctggacgcaaaatcatttacggagctggcgcgcgcctccgtggatgttgatatgcacatggatctccatgggcttttcattacagatatggactgggatactaagaaacaggccgcaagcgaagaacagcgtgatagagcaagcgattgccacggggcacccctcacctag

SEQ ID NO: 180562 - DNA, 1437 bp, synthetic construct
  misc_feature 1..1437: note = Description of Artificial Sequence: Synthetic coding sequence
  source 1..1437: mol_type = other DNA
atggccgccggcaaccccgccccccagtgggcctgggacgcccactcttggggtgtgcaaatccagcccctagtgcggcgtccgtgccccgccccacagctccaccatcaacgcagggctttttcctatctgtcccacactattccagatttcaccgacaactgtctgataaacattatgaagtgtggggaagacttttatgcaacatcagagacaaactacattcgtaaaatcaatccccagactctggaaaccctggaaaaggtagattatcgcaaatatgtagcagttaatctcgcaacttctcacccgcactacgatgaagcaggtaacgtgcttaacatggggacaagcattgttgagaaaggcaagaccaaatatgttatctttaagattcccgcaacagtgccggagggaaagaagcagggcaaatccccttggaaacacactgaggttttttgtagcatcccctccagatcgcttctttctccatcctactatcacagtttcggtgtgacggagaactatgttattttccttgagcagccatttagacttgatatattgaagatggccactgcctatatcagacgaatgagttgggcttcatgtctggccttccaccgcgaggagaagacctacatccatatcatagaccaacggacccgccagcctgtccagactaagttctatactgatgctatggtggtgttccaccatgttaacgcttacgaggaagatggatgtatcgtgtttgacgtgattgcttacgaggacaactccctgtatcagctattctatctggcgaatctaaaccaggactttaaggagaactccaggttgacatcagtgcccacgctgaggcgattcgctgttccacttcacgtcgacaaaaacgcagaggtgggaactaacttgatcaaggttgcatccactaccgccacggccctcaaggaagaggacggacaggtttactgtcaaccggagtttctgtacgagggcctcgagcttccacgcgtcaattatgctcataatggaaagcaataccgatatgtcttcgcaactggcgtgcagtggagccccatccccaccaaaattattaagtatgatatcttaactaaatcaagcctaaaatggcgtgaggacgactgctggcctgctgagcccctcttcgtaccagctcctggtgcaaaggatgaagatgatggcgtcatcctttccgccatagtctcaacagacccccaaaaactcccctttctcctgatactggatgccaaaagcttcaccgagttggcacgtgctagcgtcgatgtggacatgcacatggacttgcatgggctgttcataaccgatatggactgggatacaaagaagcaggccgcctcagaggagcagcgggatcgggcctcagattgtcacggcgctccactaacatag

SEQ ID NO: 180563 - DNA, 1740 bp, synthetic construct
  misc_feature 1..1740: note = Description of Artificial Sequence: Synthetic coding sequence
  source 1..1740: mol_type = other DNA
atgttcttccgggtgttcctgcacttcatccggagccacagcgccacagccgtggatttccttcccgtgatggtgcatcggctgcccgtattcaagcggtatatggggaacaccccacagaagaaggccgtatttggtcagtgccggggtctcccctgcgtagctccgctgttaacaacagtagaagaggcgcctcggggcataagtgcacgggtatggggccatttccctaagtggcttaacggttctctcctccgtataggcccgggtaaatttgagttcggtaaggataaatacaaccactggtttgacggtatggcactgcttcaccagtttaggatggccaaagggaccgtgacctatagaagcaagttcctacagtccgacacatacaaagccaactccgcaaagaacagaatcgtcatttccgagtttggaacgctggctctgcccgacccttgcaaaaacgtattcgagaggtttatgagtaggtttgagctgcctggcaaggccgccgctatgaccgacaataccaacgtcaactatgtgcgctacaaaggagactattatctgtgtacggagacaaactttatgaataaggtggacattgagaccctcgaaaagacggagaaagtggactggagtaagttcatagccgtgaacggagcgactgcacatccacactacgatttggacggcacggcctataatatgggtaacagcttcggcccgtacggcttctcttacaaagtaatccgcgtaccacctgagaaggtggatttaggtgagaccatccatggtgtacaggtgatctgcagtatagcctctaccgaaaaaggcaaaccctcctattaccattcgtttggaatgacccgcaattacatcatatttattgagcagccactcaagatgaatttgtggaagatagcaacatcgaaaattcggggcaaagcgttctctgacgggattagctgggagccgcagtgtaatacgagattccacgtcgtggagaagcggactggtcaactactgcctggaagatactattcgaaaccctttgtaacttttcatcagatcaacgcctttgaggaccaaggctgtgtgatcatcgatctgtgctgccaggataacggacggactctcgaggtttaccagcttcagaacctaaggaaggccggggagggactcgaccaggtccacaactccgcagccaagtcattccctagacggtttgtgctgcccctaaacgtctctctgaatgccccagaaggagacaacctctcccctctttcatatacgagcgcctccgcggtcaaacaggctgatggcacaatctggtgtagtcacgagaacctccaccaggaggacctagaaaaagagggcggcattgagttcccccagatttactacgacagatttagcgggaaaaaatatcactttttttacggttgcggctttcgccacttggtgggtgatagcctaattaaggtggacgtagttaacaaaaccctgaaggtgtggcgcgaggacggattttacccctccgaacctgtgtttgtgcctgctccagggactaacgaggaagatggcggcgtcatcctgtccgtcgttatcacgcctaaccagaacgagtcgaactttatcttggtcctggacgccaagaactttgaggagttaggacgcgccgaggtgcctgtgcagatgccctacggcttccatggcactttcatcccgatctag

SEQ ID NO: 180564 - DNA, 1638 bp, synthetic construct
  misc_feature 1..1638: note = Description of Artificial Sequence: Synthetic coding sequence
  source 1..1638: mol_type = other DNA
atgggcaacaccccccagaagaaggccgtgttcggccagtgccgggggttaccatgtgtagccccccttctgacaaccgtagaagaggcccctcgaggcatatcagccagggtatggggccacttccctaagtggctgaatggatctctgcttcggattggcccaggaaagtttgaattcggcaaggacaaatacaaccattggttcgacgggatggcgttacttcatcagtttcggatggccaagggcactgtaacatatagaagtaagtttctgcagtctgacacctataaggccaattccgctaagaacaggatcgttatttcggagttcggaaccttggccttacccgacccgtgcaaaaatgtgtttgagaggttcatgagcagattcgagttgcctggaaaggcagctgctatgacagacaacactaacgtgaactacgttcggtacaaaggcgactattatttgtgtacagagacaaatttcatgaacaaggtcgatattgagaccttggaaaaaaccgaaaaggtcgattggtccaagttcattgccgtaaacggcgccactgctcaccctcattatgacttagatgggaccgcttataatatgggcaactcttttggcccttatggcttctcttacaaagtgatccgagtgccacctgagaaggtcgacctaggggagacaatccatggggtgcaggtcatttgcagtatcgcttctaccgagaaggggaagccttcctattatcatagctttggaatgacccgcaattacatcattttcatcgaacagcccctcaaaatgaatctgtggaagatcgcgacgtcaaagatccggggaaaggccttctccgatgggatctcctgggaaccacagtgtaacacacgctttcatgttgtagagaagcgcactggccagctcctacccggaaggtactattccaagccttttgtgacctttcaccagatcaatgctttcgaagatcaagggtgcgtgatcattgacctctgttgccaagacaatggaaggacattggaggtataccaactacagaacttacgaaaggcaggtgaaggattagaccaggtgcacaattcagccgccaaatcttttccacggcggttcgtgctgcccctcaatgtttctctgaatgcccctgaaggtgacaacctctcacccctgtcttacacatccgccagcgcagtgaagcaggccgatggaacaatctggtgctcacacgagaatttgcatcaagaggacttggagaaggaaggcgggatcgaatttcctcagatatactatgaccggttcagcggaaagaagtaccactttttttacggatgcggcttcagacacctcgtgggggactcactcattaaagtggacgtggttaacaaaaccttgaaggtctggcgcgaagatggcttctacccctctgaaccagttttcgtgcccgcacccggcacaaacgaggaggacggtggagtgattctgtcggtggtcatcaccccaaaccagaacgagagcaatttcatcttggtcctagacgctaagaatttcgaggaactgggcagggcagaagtacctgtacagatgccttacggcttccatggcacgtttatacctatttag

SEQ ID NO: 180565 - DNA, 1638 bp, synthetic construct
  misc_feature 1..1638: note = Description of Artificial Sequence: Synthetic coding sequence
  source 1..1638: mol_type = other DNA
atgggcaacaccccccagaagaaggccgtgttcggccagtgccggggtctgccatgcgtcgcgcctctcctcaccaccgtggaagaggccccccgcgggatcagcgctagggtgtggggacatttccctaagtggctgaatgggagccttctgcgcatcggccccggtaagtttgagtttggcaaggacaagtataatcactggtttgatgggatggccctgctccatcagttcagaatggcaaaagggacagtcacctatcgctccaaatttctgcagagcgacacatataaggccaactctgccaagaatcgaattgtcatctcggagttcgggacgcttgctctccctgacccgtgtaaaaatgtattcgagaggttcatgagcaggttcgagctcccagggaaggcagctgcgatgactgacaatactaatgtcaactacgtgagatacaagggagactactacctctgcacagagaccaatttcatgaacaaggttgatattgagacactcgagaagaccgagaaggttgattggtccaaattcatcgctgtcaacggggctacagctcatccccactatgaccttgacggtactgcctataacatgggaaattccttcggaccttacgggtttagctacaaggtgatcagggtgcctcccgagaaagtcgaccttggagagacaatccacggagtccaggtgatctgtagcattgcttctacagagaaaggaaaaccctcctactatcactcctttgggatgacccgcaattatatcatcttcatagagcaaccgctcaagatgaatttatggaagattgctacctcgaaaatacgcggcaaagctttttctgacggcatctcatgggaacctcagtgcaatacacgcttccacgtggtggaaaaacggactggacaattgctgcccggcagatactattctaaacctttcgtgaccttccaccaaataaacgccttcgaggaccagggatgtgtaattattgatctgtgctgccaagacaatggcagaacactggaagtctaccaactgcagaacttgaggaaagccggggaaggtttggaccaggtgcataattctgcggccaaaagtttcccccggcgtttcgtgctgccactgaacgtcagcctaaacgcacctgaaggagataatctttctcccctttcctacacttcagctagcgcggtgaaacaggctgacggaactatttggtgcagtcatgaaaaccttcatcaggaggacctcgagaaggaaggaggaattgagttcccgcagatctattacgacagattcagcggaaagaaataccactttttttacggttgcggctttcggcatctggtcggtgactcgttaataaaggttgacgtggtgaacaaaaccctcaaggtgtggcgggaggatggcttctacccgagcgagcccgtgttcgttccagctcctgggaccaatgaggaggatggcggcgtcatcctgtccgtcgttatcacgcccaaccaaaatgaatcgaactttatcttggtactggacgccaagaactttgaggagctagggcgcgctgaggtgcccgtgcagatgccttatggcttccacggaacctttatccccatctag

SEQ ID NO: 180566 - DNA, 1620 bp, synthetic construct
  misc_feature 1..1620: note = Description of Artificial Sequence: Synthetic coding sequence
  source 1..1620: mol_type = other DNA
atgggcaacaccccccagaagaaggccgtgttcggccagtgccggggcctgccttgcgtggcacccttgctgaccacagtggaggaggccccccgcggaatctccgcaagagtgtggggccatttccccaaatggctgaatggctctctcctcaggatcggccccggaaagttcgaatttggcaaggataaatataatcactggtttgatggaatggcattacttcatcagttcaggatggccaagggcaccgtgacctataggtccaaatttctacagagcgatacttataaggcaaatagtgccaaaaaccgtattgttatcagtgaattcgggaccctcgcacttcctgatccgtgtaaaaacgtgttcgagcgatttatgtctagatttgagctgccgggcaaggcggcggccatgacagacaacactaacgtgaattacgtgcgatacaagggggattactacctgtgcaccgaaactaacttcatgaataaagtggacatcgagacgctggagaagaccgagaaggtggactggtccaagttcatcgcagtcaatggggccacagctcacccccattatgatcttgacgggacggcatacaacatgggaaactcttttggaccgtacggtttctcatataaggttatacgagtgcctcctgagaaagtggatctgggagaaactattcatggcgtgcaggtgatctgcagcattgcatcaacagaaaaggggaaacccagctattatcactcatttgggatgacccggaattacattattttcatagaacaacccctcaagatgaacctgtggaagattgccactagcaaaatccggggcaaggcttttagcgacggcatatcctgggagccccagtgcaacacacggttccacgtagtcgagaagcgcacaggccaactcttgccgggcaggtactacagcaaacccttcgtaactttccatcaaatcaacgcctttgaggaccaagggtgcgtgatcatcgacctgtgctgtcaggataacggcaggactctggaggtttaccagcttcagaacctgcgaaaggcaggcgaaggcctggatcaggtgcataactctgccgcaaagtccttccctagacggttcgtcctcccccttaacgtatctttgaacgcccccgagggagacaacctatcccctttgtcttataccagcgcgtcagcagttaagcaggccgacgggaccatttggtgttcacatgaaaatttacaccaagaggacctggaaaaggaaggaggcatcgaatttcctcagatatactatgatcgcttctccggaaaaaagtaccacttcttctacggctgcggttttcggcacttagtgggtgactctctaatcaaggtcgatgtcgtctggagggaagacgggttttacccttctgaaccggtgttcgtgccagctccggggactaatgaagaggacggcggtgttatcttatccgtggtcattacaccaaaccagaatgagagtaatttcatactcgttctggatgccaagaatttcgaagaactaggccgagcggaagtacctgtgcagatgccgtatggattccatgggacctttatcccgatttag

SEQ ID NO: 180567 - DNA, 1638 bp, synthetic construct
  misc_feature 1..1638: note = Description of Artificial Sequence: Synthetic coding sequence
  source 1..1638: mol_type = other DNA
atgggcaacaccccccagaagaaggccgtgttcggccagtgccggggattaccgtgcgtggcccccctgctcactactgttgaagaagccccgcgagggattagcgccagagtgtgggggcacttccccaaatggctgaacgggtccctgctgcggattgggccaggaaagttcgagttcggaaaagataagtacaaccattggtttgacgggatggcactgcttcatcaatttaggatggctaaggggaccgtcacttatcggtccaaatttctgcagtccgatacctataaggctaactcagctaagaaccggattgtgatttctgaattcggcaccttggccctgccagacccctgcaagaacgttttcgagagattcatgtctcgctttgagctgccaggcaaagcagccgcaatgactgacaacacaaacgtcaattacgtgcgttacaaaggagattattatctgtgcaccgagactaacttcatgaacaaagtggacattgaaactttggagaaaacggaaaaggtcgattggtccaagttcatagccgtgaatggggctaccgcgcatcctcattacgacctggacggcacggcctacaacatgggaaacagctttggcccttatggttttagctacaaggttattagggtccctccagagaaggttgacctgggagaaaccatccacggcgtccaagtgatctgttctattgctagcactgaaaaagggaagcccagctactatcatagctttgggatgaccagaaactacatcatcttcatcgaacagcctctcaagatgaatctatggaaaattgccacgtccaaaataaggggtaaagccttcagcgacgggatctcctgggaacctcaatgtaatacaagatttcatgtggtcgaaaagagaactggccagctgctgccagggcgatattattctaagcctttcgttacgttccatcagatcaacgctttcgaagatcagggctgcgtcattatcgacctgtgctgtcaagacaatggccggacactggaagtataccaactgcagaatctccgcaaagccggcgaagggctagatcaagtgcacaacagtgcagcgaagtcctttcctagaagatttgtgctgcctctgaacgtgagccttaacgcgccagaaggggataaccttagtcccctttcctacacttccgctagcgccgtaaaacaagccgatggcaccatttggtgctcccacgaaaacctgcaccaggaggatctagagaaggaggggggtatcgagtttcctcagatatactatgatcggttttcaggcaagaaatatcacttcttctacggatgtggctttcgccacctcgtgggggactctctgatcaaagttgatgtagtgaacaagactcttaaggtttggcgcgaagatggcttctatccctctgagcctgtgtttgttcccgccccgggcacgaacgaagaggatgggggcgtcatactcagtgtcgttataacgcccaaccagaatgagtcaaacttcatactggtgcttgatgcgaagaacttcgaggaactggggcgtgccgaagttccagtacagatgccgtatgggtttcacggcacgttcattccaatctag

SEQ ID NO: 180568 - DNA, 1221 bp, synthetic construct
  misc_feature 1..1221: note = Description of Artificial Sequence: Synthetic coding sequence
  source 1..1221: mol_type = other DNA
atgccccccgtgggcggcaagaaggccaagaagggcatcctggagagactgaacgcaggagaaatcgttatcggggacggcggctttgtttttgctttggagaaacgcgggtacgtcaaggccggcccatggacacccgaagccgccgtcgagcatccggaagccgtgaggcaactccatcgtgagtttttgcgagccgggagtaatgttatgcagacttttaccttttacgcgtctgaagacaaattggaaaaccgcgggaactacgtcttggagaaaatcagcggccaggaagtaaatgaggctgcatgcgacattgctcgacaagttgcagatgaaggtgatgcccttgtggcaggaggggtgtctcagaccccctcttacctttcctgcaaaagcgaaacagaagtgaagaaggtctttctgcagcagctggaggtattcatgaagaagaatgtagactttctgatcgccgaatacttcgaacatgtcgaggaagcagtttgggctgtggaaaccctgatcgcttcaggaaaaccagtggcagcaacgatgtgcatcgggcccgagggggacctgcacggcgtccctcccggagaatgcgccgtgcggcttgtgaaggcaggcgccagtataatcggcgtcaattgccatttcgacccgacaatctctctgaagacagtcaaactgatgaaggagggattggaagcagccaggcttaaagcgcacctgatgagccagccactcgcctatcacacccccgactgcaacaagcaaggattcatcgacctgcccgagttcccttttgggctggagccccgcgtggctacccgatgggacatccagaagtatgcccgggaggcctataatctgggggtccgatatattggaggctgctgcggattcgagccttaccacatacgcgcaattgcagaagagctcgcacccgaacgcggatttctgccgccggcatcagagaagcacggatcatggggtagtggcctggacatgcacaccaaaccctgggtgcgtgcaagggccaggaaggagtactgggaaaacctccgcatcgcctcaggccggccgtacaatcctagcatgtctaagcccgacgggtggggcgttactaagggtaccgctgagcttatgcagcagaaggaggcaacgactgagcagcagcttaaggagctttttgagaagcaaaaattcaagtcacaatag

SEQ ID NO: 180569 - DNA, 612 bp, synthetic construct
  misc_feature 1..612: note = Description of Artificial Sequence: Synthetic coding sequence
  source 1..612: mol_type = other DNA
atgccccccgtgggcggcaagaaggccaagaagggcatcctggagcggttaaatgcaggtgagattgtaataggcgacggcggattcgtgtttgcattggagaagcgaggctacgtcaaggccgggccctggactcccgaggccgctgtggagcacccagaagccggcgccagtatcatcggagtgaattgtcattttgatcccaccatatccctgaaaacggttaagctgatgaaggaaggcttggaagctgcgcggttaaaagcccatttgatgtctcagccactggcctatcacacacccgactgtaacaaacagggcttcatcgatttgcccgaattcccattcggcttggaacccgagttgccacccgacggaatcttcaaaaacactcccgaaagaccgacaacatggggatcgggaactctcgcgggcgcggtagacctgtctcccaccacctccgggcaactgcagcgctcatggccacaaaaaggcgcattctgtcaccagctgcagaagaacatggccgccggggaagtggtgtggacatgcaccccaaacccagggcttgaacagggccctggaaggaacacagggaggatctttggatag

SEQ ID NO: 180570 - DNA, 1092 bp, synthetic construct
  misc_feature 1..1092: note = Description of Artificial Sequence: Synthetic coding sequence
  source 1..1092: mol_type = other DNA
atggcccccgccggccggcccggcgccaagaagggcatcctggagcgtttagagtcaggcgaggtggtcatcggcgacgggagtttcctcattacactcgagaaacgcggttacgttaaagctggcctatggacaccagaggccgtcatagaacatccagacgccgttcgacagcttcacatggagtttctgagagcaggctcgaatgtgatgcaaacattcaccttctccgcttctgaggacaatatggagagcaaatgggaggatgtgaacgccgcagcctgcgacctcgctcgggaggttgcgggcaagggagacgctctagtggctggaggtatttgtcagacatctatttataagtatcagaaggatgaggctagaattaaaaaactgtttcggcagcagctagaagtgtttgcatggaaaaatgtcgactttctcattgcagaatatttcgagcacgtggaggaggcggtatgggctgtagaggtcctgaaagaaagcgatcggccagtcgcagtgaccatgtgcatcggcccagagggggacatgcacgacatcactcccggcgagtgtgctgtgcggcttgttaaagccggggccagtattgttggcgtcaactgtcgctttggacccgatacatcgttgaagaccatggagttaatgaaagaaggcttggagtgggcaggcctgaaggcccatctaatggtgcagccactagggttccatgctcccgattgtggaaaagaggggttcgtcgaccttccagagtatcccttcgggttagagtctcgggtcgctacacggtgggacatccagaaatatgccagagaggcctataatttaggagtgagatacattggaggatgttgcgggtttgaaccctaccacatcagggccatcgctgaagagctcgctcccgaacgcggatttttaccacccgcaagtgagaagcacggttcttggggcagcggcttggatatgcacaccaagccctggattagagccagagcacggcgggagtattgggaaaacctcctgcctgcttctggaagacccttttgccctagcctgtccaagcctgatttttag

SEQ ID NO: 180571 - DNA, 900 bp, synthetic construct
  misc_feature 1..900: note = Description of Artificial Sequence: Synthetic coding sequence
  source 1..900: mol_type = other DNA
atggcccccgccggccggcccggcgccaagaagggcatcctggagaggctcgagtcaggggaggtcgtaatcggcgatggctcattcttaattaccctcgagaaacggggctacgttaaggctgggctgtggactcctgaagccgtgattgaacaccctgatgccgtgaggcagttgcatatggagtttctgagggccgggtccaatgtaatgcagacgttcaccttctcagcctccgaagataacatggagtctaagtactttgaacacgtcgaagaggccgtctgggccgtggaagttctaaaagagtccgatcggcccgtggcagtaacaatgtgtatcggcccagaaggagacatgcatgacattacgccaggcgagtgcgcagtcagattggtgaaggctggagctagtattgtaggagtgaattgccgcttcggtcccgatacatcgttgaagacgatggaacttatgaaagagggtttggagtgggccggcctgaaagcacacctgatggtacaaccactcgggtttcatgcgccagattgtgggaaagaagggttcgtggatcttcctgagtaccccttcggtctggaaagcagggtggctactcggtgggacatccagaaatatgcccgcgaggcctacaatttgggcgtgcgatatattggggggtgttgcggatttgagccatatcatattcgggccattgcagaggaactggcaccggagcgcggcttcctcccccctgccagcgagaaacatggcagctggggaagtggtctggatatgcacacaaagccatggattcgggcgcgcgctaggcgcgagtattgggagaatctgttgcccgcttccggtcgacctttttgtccttctctgtcaaagccagacttctag

SEQ ID NO: 180572 - DNA, 639 bp, synthetic construct
  misc_feature 1..639: note = Description of Artificial Sequence: Synthetic coding sequence
  source 1..639: mol_type = other DNA
atgatcatcggcggcatcgaccacagcctgtacaccggcagcctgtggtatactcccatccgcagggagtggtactatgaggtgataatcgttcgggtcgaaattaatggacaggatctgaagatggattgtaaggagtacaactatgacaagtccatcgtcgacagtggcacaaccaaccttcgtctgcccaaaaaggtgtttgaagctgccgtgaagtcgattaaggccgcgagttctaccgagaagttccccgacggtttctggctgggcgaacagcttgtgtgttggcaggcaggcacaacaccgtggaatatctttccagtcatatctctttacctgatgggcgaggtgacaaaccagtcatttaggattactattctgccacaacagtacttgagatggaaaatgtggccaaggcccaagaccacagtgacctgtcatctcaccgtaatccacggacactgctatggatcgtgctatcacggcggacttctgcttagcctaattggccccgaaaacgaactggccctccttagcgccctggccatgtgtaccatgtccagtgggcggcagcggtggaaggcctgccacctgggccatgggcgtctgtggctgcaacacagtacagaccggtag

SEQ ID NO: 180573 - DNA, 1506 bp, synthetic construct
  misc_feature 1..1506: note = Description of Artificial Sequence: Synthetic coding sequence
  source 1..1506: mol_type = other DNA
atggcccaggccctgccctggctgctgctgtggatgggcgccggcgtgcttcccgctcatggcactcaacatgggatcaggctgccgttgcgaagtggactgggcggggccccccttggtttgagacttccccgtgaaaccgatgaagagccagaggagcctggcagaagaggttcgttcgtggaaatggtcgataacctacggggaaagtccggccaaggatactacgtcgagatgaccgtcggctccccccctcagaccctgaacatcctcgtagatacaggtagttccaacttcgctgtaggagcagccccccatcctttcttacacagatactaccagagacaactgtcctccacgtaccgggatttgcgtaaaggcgtatatgtgccctacacgcagggcaaatgggaaggggagctcgggacagatctggtttccatccctcatggacctaatgtcaccgtgcgggctaacatcgctgcgataacagagtccgacaaattttttattaatggatctaactgggaaggcattctgggactagcttacgccgaaatcgctaggccagatgactctctggaaccttttttcgactctctggttaagcaaacacacgtgccaaacctcttctccctgcagctgtgcggcgccggatttcctctgaaccaatcggaagtgctcgcgtctgtggggggttcgatgatcattgggggtattgatcactccctgtatacaggttcactctggtatactcctatccggagggagtggtattatgaagtgattattgtgcgcgtcgaaataaatggacaggaccttaagatggactgcaaagagtataattatgataagtcaatcgtggactcaggaaccacaaacctgcggctgccaaagaaggtcttcgaagctgcggtcaagtcaattaaagccgctagctccacagagaaatttcccgacggtttctggctgggcgagcagttagtttgctggcaggccggcactaccccatggaacatattcccagtaatcagtctgtatctgatgggggaggtgacaaatcagagtttccggatcacaatccttccgcagcagtatttgcgccccgtggaagatgtcgcgacctcccaggatgattgctacaaattcgccatcagtcagtcatcaaccggcacggttatgggtgctgtgatcatggagggcttttatgtggtttttgaccgggctcgcaagcggatcggatttgctgtctccgcttgtcacgttcacgacgagttcagaacagctgccgtggagggcccgttcgtgaccctcgatatggaagactgtggctataatattccacagacggatgagtcaacacttatgaccatcgcttacgtcatggcagcaatctgcgcactcttcatgcttcccctgtgtcttatggtgtgccaatggtgttgcctcagatgcctgcgccaacagcacgacgatttcgccgacgatatcagtctgcttaaatag

SEQ ID NO: 180574 - DNA, 1299 bp, synthetic construct
  misc_feature 1..1299: note = Description of Artificial Sequence: Synthetic coding sequence
  source 1..1299: mol_type = other DNA
atggcccaggccctgccctggctgctgctgtggatgggcgccggcgtactccctgcgcacgggacgcagcatgggattcgacttccgctccggtctggcctgggcggcgcacctctgggactgcggctacccagagagactgacgaggagccagaggagcccggacggaggggctcctttgtggaaatggttgacaatctcagagggaagtcaggacaggggtactacgtggagatgactgtgggatctccaccgcagacccttaatatcctagtcgatacaggctcttccaattttgcagtcggggctgcaccacacccgtttttacacagatactatcaaagacaactgtcctcgacctacagagaccttagaaagggggtttatgtgccttacacacaaggaaagtgggagggggagcttgggactgatctactgtgcggagccgggtttccgcttaaccagtccgaagtactggcatccgtcggcggcagcatgattatcggcggtatcgaccattcactctacactgggagcctatggtacacacctatacggagagaatggtactacgaggtaatcatcgtgcgggtagaaattaatggccaggacctcaaaatggattgtaaagagtataattatgacaaaagtatcgtagactctggaactactaatttacgtctgcccaagaaggtgtttgaagccgctgtgaaatctatcaaagcagcgtcctctaccgaaaaatttcctgacgggttttggctgggcgaacagcttgtgtgctggcaggctggcaccactccttggaatatctttcccgttatttccttgtacctcatgggcgaggtgacaaatcagtctttcaggatcaccattctaccacagcagtaccttcggcccgtggaggacgtggccacaagtcaggacgattgttacaagttcgccattagccagtccagtaccgggacggtaatgggggccgtgattatggaagggttctacgtcgtgtttgacagagctcgaaaacgaatcggcttcgcggtctcagcttgccatgtgcacgatgagtttcggaccgctgctgtcgagggccctttcgtcacattagacatggaagattgtggatacaacataccacagaccgacgagtctaccctgatgacgatcgcctacgtcatggccgctatttgcgcactgtttatgttacctttatgtctcatggtgtgccaatggtgctgtctgcggtgtctgaggcagcaacacgacgacttcgctgatgacatcagcctgttgaaatag

SEQ ID NO: 180575 - DNA, 1374 bp, synthetic construct
  misc_feature 1..1374: note = Description of Artificial Sequence: Synthetic coding sequence
  source 1..1374: mol_type = other DNA
atggcccaggccctgccctggctgctgctgtggatgggcgccggcgtgctgcccgcccatggcacacagcacggtattagactgcctctcagaagtgggttaggcggagccccactcgggctgcgcctgcctagagaaactgatgaagagccggaagaaccaggccgccggggttcctttgtggagatggtcgacaatctgcgcggaaaaagcggtcagggctattatgtcgagatgaccgtgggatctcccccacagacacttaatattctggtcgacacgggatcctccaactttgcagtgggtgcagccccgcaccccttcctgcaccgatactaccagaggcagctctccagtacctatagggacctgcggaagggcgtctacgtgccctatacccagggaaagtgggagggggaactcgggacagacctgccagacgattcattggagcctttcttcgattccctggttaaacaaacccacgtgccgaacctcttctccctccagctctgcggagccggctttcctctgaatcagagtgaagtgttagcctcagtgggaggttccatgatcatcgggggaattgaccactcactgtacactgggagcctgtggtatactccaatccgacgtgagtggtactatgaggtcatcatcgtgagagtagagataaacgggcaagatctgaagatggactgcaaggagtataattacgataagtctattgtcgatagcggtactacaaacctcaggctgcccaaaaaggtgttcgaggctgcagtgaagtccataaaggccgcaagcagtaccgagaagttccccgatgggttctggctcggagagcagttggtgtgctggcaagccgggaccacaccatggaacatcttcccagtgatcagtctctatttgatgggcgaggtgactaatcagtcgtttcgaatcactattctgcctcagcagtacttacgtcccgtcgaggacgtagccacttcccaggacgattgttataagttcgctatctcccagtcgtctacagggaccgtcatgggagcggtcataatggagggattttacgttgtattcgacagggccaggaagcggatcggcttcgcagtgtccgcttgccacgtccacgatgaattcaggaccgcagcggttgaggggccgtttgtcacactggatatggaggactgtgggtacaatatacctcagacagatgagtcaaccctcatgactatagcttatgtgatggccgctatctgcgctctgttcatgctgcctctgtgtcttatggtctgtcagtggtgctgcttaaggtgtttacgacagcagcacgacgacttcgctgatgacatcagcctgctgaagtag

SEQ ID NO: 180576 - DNA, 1431 bp, synthetic construct
  misc_feature 1..1431: note = Description of Artificial Sequence: Synthetic coding sequence
  source 1..1431: mol_type = other DNA
atggcccaggccctgccctggctgctgctgtggatgggcgccggcgtactgccagcccacgggacgcagcatggaatcagactgccgctccggtccggtcttggtggagcccctttaggcctgagactgccacgcgagacagatgaagagcccgaggaaccaggcaggcggggaagctttgttgagatggtagacaatctcagagggaaaagcggtcaaggatactacgtcgagatgactgtcggttccccccctcaaacgttgaatatcctggtcgacactgggagcagcaacttcgctgtgggtgccgcaccacaccccttcctgcacagatactatcagagacagctgtcctcgacctaccgggaccttagaaaaggcgtgtacgtcccatacacccagggcaaatgggaaggagagctgggtaccgacctggtgtccatcccgcacggcccaaatgtgacagtccgtgcaaatatcgcagcgattacagagtctgacaagttctttattaacggttcgaactgggaaggcattctcggactggcctatgctgaaatcgcaaggttgtgtggggctggcttccccttgaatcagtcagaagtcctggcgtccgtgggcggtagtatgattatcggcggcattgaccactctctgtacacggggtccctgtggtacacacccatacgcagagaatggtactacgaagtcatcatcgtgagggtcgaaataaatggccaagaccttaagatggattgcaaggaatacaattacgacaaatcaatcgtggattcgggaacaacaaatcttcgactgcccaaaaaagtgtttgaggccgctgtcaagtccattaaagcggcctcctccacagaaaagtttcccgatggcttctggttaggggagcaactggtgtgttggcaggctggcacaacaccctggaacatatttcctgtgattagtctgtatcttatgggggaggtgacaaatcagtcctttagaattacaatcctgccacagcagtatctccgtcccgtcgaggatgtagctaccagccaagacgactgctacaagttcgccatctcacaatcgagcactgggaccgtgatgggcgctgtgataatggaaggattctacgtggtattcgaccgggcacggaagcgcatcggatttgctgtgtctgcatgtcatgtgcacgacgagtttcgcactgccgctgtcgaggggccatttgtgactctggacatggaagattgcggttataacattccccaaacagatgaaagtaccctgatgacgatagcctacgtgatggccgctatctgcgccctgttcatgctgccgctgtgcttaatggtctgccagtggtgttgtctcagatgtctacgtcaacaacatgatgacttcgctgatgatattagtttgctcaaatag

SEQ ID NO: 180577 - DNA, 1131 bp, synthetic construct
  misc_feature 1..1131: note = Description of Artificial Sequence: Synthetic coding sequence
  source 1..1131: mol_type = other DNA
atggtgcccttcatctacctgcaggcccacttcaccctgtgcagcggttggagcagcacataccgcgaccttcgaaagggcgtgtacgtgccctatacccagggcaaatgggaaggagaactgggcacagatctggtgagcatccctcacgggcctaacgttacagtccgagccaacattgctgccatcacagaatcagataaatttttcattaacgggtccaactgggaaggcatcctcggactggcttacgccgaaattgccaggctatgtggggcgggcttccctctaaaccagagcgaggtgctggcatctgtaggaggctccatgatcattggtgggattgaccactcactgtacactggcagcttgtggtatacgccaatccgcagagagtggtattacgaagtaattatcgtgagagtggagatcaacgggcaggatctgaaaatggattgtaaggaatataattacgataagtccattgttgatagtggcactacaaacctgcggctgccaaaaaaagtattcgaggctgccgtgaagtcaataaaagctgcatccagcactgaaaagtttccagatggcttttggctcggcgagcaactggtctgctggcaagccggtaccactccctggaatatctttcccgtgatctccttgtacctgatgggggaagtcaccaaccagagctttcgcataactatactgccccagcagtacctgcgacccgtggaggatgtggctactagccaggacgactgctataaatttgcaatttcacaatcatcaacaggcacggtgatgggcgccgtgatcatggaggggttttatgtcgtttttgatcgggctcgcaaacggataggttttgccgtctcggcatgccacgtccacgatgaatttcgcacagccgccgtcgaaggaccgttcgtaaccctggacatggaagattgcgggtataacattccgcagacggatgaatcaacattgatgactatcgcttatgtgatggctgccatttgtgcactgtttatgctgcctctgtgcttgatggtgtgtcagtggtgctgtcttaggtgcctcaggcagcagcatgacgatttcgccgacgacatatccctcctgaagtag

SEQ ID NO: 180578 - DNA, 1191 bp, synthetic construct
  misc_feature 1..1191: note = Description of Artificial Sequence: Synthetic coding sequence
  source 1..1191: mol_type = other DNA
atgggcgccctggcccgggccctgctgctgcccctgctggcccagtggctcctccgggcagccccagagttggcccccgcacctttcacactccccctgcgagtggccgccgccacaaatcgcgtagtcgctcccacccccggcccaggaaccccagctgaacggcacgcagatggcctggcactggccctcgagccagcactggcctcccccgccggagcggccaactttctagccatggtcgataatctccagggggattccggacgtggttattatttagagatgctcatcggaacccccccacagaagctccaaatcttagttgatactggcagttctaattttgccgttgcgggcacccctcactcttatatcgacacgtattttgatacagagaggtccagcacataccgctccaaaggtttcgacgttactgtcaaatatacccagggaagctggactggctttgtcggagaggacctcgtaactatccccaagggattcaacacatcattcttggtcaatatcgccacaattttcgagtctgagaacttctttctgcctggaatcaaatggaatgggattctcggcctggcatacgcaaccctcgcaaaacctagcagtagcttggagacgttcttcgacagtttagtcacccaggccaatattcctaatgtgttctctatgcagatgtgtggggctggccttcctgtagccggcagtggaacaaatggtggttctcttgtgctgggtgggattgaaccttcgctctataagggggacatttggtatacccctattaaagaggaatggtattaccaaattgagattctgaagctggagatcggagggcagagcctcaacctcgactgccgggaatacaacgctgataaagcgatagtggacagtggcacaactttgcttagacttcctcaaaaagtcttcgatgctgtagtggaagctgtggcacgcgcctccctcatacccgagttctccgatggtttttggactggtagccagctggcgtgctggacaaatagtgagacgccctggtcctacttccctaagatatccatttatctcagggacgaaaatagtagcagaagctttcgtattactatccttccccagaaactgcaggttctccagtgcttgaagtttcctggtctgagtcagcagcggatgtag

SEQ ID NO: 180579 - DNA, 1557 bp, synthetic construct
  misc_feature 1..1557: note = Description of Artificial Sequence: Synthetic coding sequence
  source 1..1557: mol_type = other DNA
atgggcgccctggcccgggccctgctgctgcccctgctggcccagtggttactgcgcgcagcccctgaattggctcccgcaccttttaccctgcccctgcgtgtagctgcggccacaaatcgagtcgtcgcccccactcccggccccggaacacccgcagagcggcatgccgacgggttagcactggcactggaaccggccttggctagccctgccggggccgctaacttcttagccatggtggataacctgcagggtgatagcgggcgcggctactatctggaaatgcttataggcacgccgccacagaaactgcaaattctcgtagatacaggcagttctaacttcgctgtggcgggaacaccgcacagctatatagatacctacttcgatacagaacgatcatctacctataggagcaaagggttcgatgtgactgtgaaatacactcagggctcctggactggatttgtgggcgaggacctcgtgaccattcctaaaggcttcaacacctcttttcttgtgaatatcgctacgattttcgagagcgaaaatttttttctacctggaattaagtggaacggcattcttgggctagcttacgccactctcgccaaacccagctcttcattggagacgtttttcgatagcttagtcacccaggctaatatacctaatgtgttttctatgcagatgtgcggggctggtttgcctgtggccgggagcggaacaaatggtggatccctggtactgggcggtatagaaccgtccctttacaaaggagatatctggtacacgcccatcaaggaagaatggtactaccagatcgagattttaaaactggaaatcggaggccaaagtctgaatctggattgcagggaatataacgcagacaaagcgatcgtggatagcggaactacccttctgcgccttccgcaaaaggtctttgacgcagttgtggaagccgtggctcgggctagtcttattccagagttctcagacggattttggacgggaagccagttagcctgctggactaatagtgagacaccttggagctacttccctaagatctctatttatctgagggatgagaactccagccgttcctttcgaattacaatcctgccgcagttgtacatacagcccatgatgggcgcgggccttaactacgagtgctatagattcggaatctcccccagcaccaatgctctggtgatcggagcaactgtgatggaaggcttttatgtgatcttcgaccgggcacagaagagagtgggatttgcagccagcccttgtgctgagatagccggcgccgccgtgtctgagatcagtggtccctttagcactgaggatgttgctagtaactgtgttcctgcacagtcattaagtgagcccattttatggatcgtgtcatatgctctgatgtccgtctgcggggccattctcctggtgctgattgtgctcttactgctgccgttccgctgccagaggcgcccccgtgatcccgaagtagtgaacgatgaaagtagcctggtccgacatagatggaaatag

SEQ ID NO: 180580 - DNA, 1407 bp, synthetic construct
  misc_feature 1..1407: note = Description of Artificial Sequence: Synthetic coding sequence
  source 1..1407: mol_type = other DNA
atgggcgccctggcccgggccctgctgctgcccctgctggcccagtggctgcttagggccgccccggaactggcacccgcccccttcaccctccctctgcgcgtagccgctgccacaaatagagtggtggctcccacccccgggcccggtactccagcagagcggcacgcagatggcctcgccctcgctctggagccagcactcgctagtcccgcaggcgcagccaactttctggcaatggtggataatttacagggggactccggtcgaggctactatttggaaatgctcataggcacaccaccgcagaagctgcagatcctggtggacacaggcagcagcaattttgccgtcgccggcacccctcactcctatatcgacacgtactttgatactgagagatcctctacttacagaagcaaaggctttgatgttacagtcaagtatacccaaggctcctggactggctttgtgggagaagacctagttactatccctaaggggttcaatacctccttcctcgtgaatatcgccacaatttttgagtctgagaacttctttttaccaggcatcaaatggaatggaatcctgggtctcgcgtacgcgactctggctaaaccctccagcagcctggaaaccttcttcgatagtctggtgacccaggcgaacatacccaacgtgttttctatgcagatgtgcggagccggactacccgtggctggaagcggcacaaatggagggtcgcttgtattgggagggatcgaaccctctctttataagggcgatatctggtacacccctatcaaagaagaatggtattaccagatcgaaattctcaagttagagatcggtggtcagtcacttaatttggattgcagagaatataatgcggataaagccatcgtcgattctgggacaacactcctgaggctaccccagaaagtgttcgatgcagtcgtcgaagcggtcgccagggcttcactgctgtacatacaaccaatgatgggagctgggctgaactatgagtgctacagattcggaatctctccttctactaatgctctcgttatcggtgcgaccgtcatggaaggcttctatgtgatattcgaccgggctcaaaaaagggtcgggttcgcagctagcccttgtgccgagatcgctggggcagctgtgtcagagatttccgggcctttttccactgaagacgtggcgagtaactgcgtgcctgctcagtcactttccgagcccatattgtggatcgtgagctacgccctcatgagcgtgtgcggggcaatcctgctcgtcctgatcgtcctgttacttttacctttcaggtgccagcggcggccgagggacccagaggtcgtgaacgatgagtcctcgctggttcgacacaggtggaagtag

SEQ ID NO: 180581 - DNA, 1272 bp, synthetic construct
  misc_feature 1..1272: note = Description of Artificial Sequence: Synthetic coding sequence
  source 1..1272: mol_type = other DNA
atgctgatcggcacccccccccagaagctgcagatcctggtggacactgggagctccaactttgcagtggccggaacacctcatagctatatcgacacctactttgatactgaacgaagctctacttaccgctctaagggatttgacgtgactgtaaaatatactcagggtagctggaccggatttgtaggagaggatctggtgacgatccccaagggcttcaatacctcctttttagtcaatatcgctacaatcttcgaatccgaaaacttcttcctgcccggcattaagtggaacggtatactaggactcgcgtacgcaactcttgctaagccgtcaagttcacttgagacttttttcgattctctcgtaacccaagcaaatatcccaaacgtgtttagcatgcagatgtgcggagcggggcttcctgtagccggcagcggcacaaatggagggagtctagtgctgggcggcatcgaaccctccctgtacaagggtgatatctggtacaccccaattaaggaagagtggtattatcaaatagagattctgaagcttgagattggtggacaatcccttaatcttgactgtcgcgagtacaatgccgataaggcaatcgtcgattcagggacaacactcctgcggttgccgcaaaaggtgttcgacgccgtggtggaagccgtggcacgagcctccttgatacctgagttctcagatgggttttggaccgggtctcagctcgcttgttggactaattctgagactccttggtcatacttcccaaagattagtatttacttgagggatgaaaacagtagtagaagcttccgcataaccatacttccacagctgtatatccagccgatgatgggcgcggggctcaattacgagtgctacagatttgggatctcaccatccactaatgcgctggtaatcggagccaccgtcatggagggcttctatgtgatctttgacagagcgcagaagagggtcggattcgcagcctccccgtgtgctgagatagccggggccgctgttagcgaaatcagtggaccatttagtacagaggacgtggcaagcaattgcgtacccgcgcagagcttgtcagaaccaatcttatggatagtgtcctatgctctgatgtccgtctgtggggcaattttgcttgtcttgatcgtgctgctgttattaccttttagatgccagcggcggcctcgagacccggaggtggtgaatgacgaatcgagtctcgtgaggcacagatggaaatag

SEQ ID NO: 180582 - DNA, 576 bp, synthetic construct
  misc_feature 1..576: note = Description of Artificial Sequence: Synthetic coding sequence
  source 1..576: mol_type = other DNA
atgccccggagcctgtggctgggctgcagcagcctggccgacagcatgcctagccttaggtgcctgtacaaccctgggacgggggccctgactgcgttccagaactcttctgaaagggaggattgcaataacggcgagccccctcgaaagatcatcccagagaagaacagcctcagacagacatacaacagttgtgctaggctctgtttaaatcaggaaacggtctgtttggcgtcgactgctatgaaaaccgaaaattgtgtcgctaaaaccaaactcgcaaacggaacaagctctatgattgtccccaaacagcgtaagctctcagcctcttacgagaaggaaaaagagctttgcgtgaagtatttcgagcagtggtctgagtccgatcaggtcgagtttgtggagcacctgatttcacagatgtgtcactaccagcacgggcatatcaactcatacctcaagcctatgcttcagcgcgattttattacagctctgcccgcacgaggactggatcacattgcagaaaacatcctgtcctatctcgatgcaaaatccttgtgcgccgccgagtag

SEQ ID NO: 180583 - DNA, 1818 bp, synthetic construct
  misc_feature 1..1818: note = Description of Artificial Sequence: Synthetic coding sequence
  source 1..1818: mol_type = other DNA
atggaccccgccgaggccgtgctgcaggagaaggccctgaagttcatgtgcagcatgccaaggtcattgtggctcggctgcagctcactcgctgacagtatgccgagcttgcgctgcttgtataaccctggcaccggagctctgacagctttccagaactcaagtgagcgcgaggattgcaacaatggcgaaccccctcggaaaatcattcccgaaaagaacagtctgaggcagacctacaacagctgtgccagactgtgtctcaatcaggagacggtttgtctcgcatccacagcgatgaagaccgagaattgcgttgccaagaccaagcttgccaacggcaccagttccatgatcgtcccaaaacagcgcaagttaagtgcttcatatgaaaaggaaaaagaactgtgcgttaagtatttcgaacaatggagtgagagtgatcaggtcgagtttgtcgagcatctgatcagccaaatgtgccactatcagcacgggcatatcaatagttacctgaagccgatgctgcagcgggatttcatcaccgctctgcccgctagaggcctggaccacatcgcagaaaatatcctttcctatctagacgcaaaaagtctgtgcgccgccgagctggtctgcaaagagtggtaccgcgtgaccagtgacggaatgctctggaagaagctgattgagagaatggtcagaactgacagtttgtggaggggcctagccgaacgcaggggatggggtcaatacttgttcaagaataaaccgcccgacggcaacgctcctcccaacagcttctatcgagccctctaccctaaaattatccaggatatagagacaatagagtctaattggcgctgcggcaggcatagtttgcagcggatccactgtaggtctgaaacatctaagggagtttactgtctgcagtacgatgaccagaaaattgtgtccggcctgcgagacaatactattaaaatctgggacaaaaacacacttgagtgtaagagaattctgacgggccacaccgggtccgttctctgccttcagtatgatgagagggtcatcattaccggctctagcgatagcaccgtgagggtgtgggatgttaataccggggaaatgctcaacacccttattcaccattgtgaggcggttttacaccttcgatttaataacggcatgatggttacatgtagtaaggatcggagtatcgctgtgtgggacatggctagccctacagacatcactctgaggcgggtcctagtgggacacagggccgctgtgaatgtcgttgatttcgatgacaagtatatcgtttcagcaagtggagaccggacgattaaggtttggaatacatccacatgtgaatttgtcagaaccctcaacggtcacaagagaggcatcgcatgtttacagtaccgcgacagattggtggtgagcgggagttcggataatactataaggctttgggacatagagtgtggggcttgcctgcgcgttctggagggacacgaagagctggtgcgatgcatccgctttgacaacaaacggatagtctctggcgcctacgatgggaaaatcaaggtctgggatctcgttgccgccctggatccacgggccccggccggaactctgtgtcttcggaccctcgtggaacatagtggaagagtgttcaggttacagtttgatgagtttcagatcgtgagttcgtctcatgacgataccattttaatctgggacttcctgaatgaccctgccgctcaggctgagccaccgcggtctccttctagaacatacacatatattagcaggtag

SEQ ID NO: 180584 - DNA, 1695 bp, synthetic construct
  misc_feature 1..1695: note = Description of Artificial Sequence: Synthetic coding sequence
  source 1..1695: mol_type = other DNA
atgtgcagcatgccccggagcctgtggctgggctgcagcagcctggctgacagcatgccctcactaaggtgcctctataacccaggaactggcgccctgacagctttccagacatataattcctgcgcacgactctgcctgaaccaggagacagtttgcctcgcgtcaaccgctatgaagactgagaattgcgtggctaagactaaactcgcaaacgggacctcttccatgatcgtgcctaaacagcgtaagctcagcgcttcatacgagaaagagaaggaactgtgtgtcaaatattttgaacaatggagcgagagtgatcaggttgaatttgtggaacatctgattagccagatgtgccactatcaacacggtcacatcaactcttatctgaagcctatgctgcagagagactttataacagccctaccagcccgcgggctggatcacatcgcagaaaatatattgtcttatcttgacgctaaatctttgtgtgctgctgagctggtgtgcaaagagtggtaccgggtcacctcagatggcatgctgtggaagaaacttattgagcgaatggttcgtactgattccctttggagggggttagctgaaagacggggctggggccaatatctttttaagaacaaaccacccgacggaaatgctcctccaaacagtttttatagagccttatatcccaagatcatccaggacatcgaaactatcgaaagcaattggcgttgtggaaggcactccctgcagcgaatacactgtaggtccgagacctctaagggcgtctactgtttacagtacgacgatcagaagatcgtgagcgggctcagggacaataccatcaagatctgggacaagaataccctagaatgcaagaggatcctgacgggccacactggcagcgtactgtgtctccagtatgacgagcgagtaattatcaccggctccagcgacagtaccgttcgggtgtgggatgtaaatacaggtgaaatgttgaacacactcatacaccactgcgaggcagtgctgcatctgaggttcaacaacggaatgatggtgacctgcagtaaagaccggagtatcgccgtgtgggatatggcctctcccaccgacattacactccggagagtgctggtgggccacagagctgccgtaaatgtcgttgactttgatgacaaatatattgtgtctgctagtggggacagaacaattaaagtctggaataccagcacctgcgagttcgtgaggacactgaatggacacaagaggggcattgcatgtctgcaatatcgagacagactggtcgtgagtggcagcagtgacaacacaattcgtttatgggacattgagtgtggggcctgtctgagggtgctcgagggacacgaagagttggtgaggtgtatcagattcgataataaacggattgtttccggggcgtatgatggaaagatcaaggtgtgggacttagtcgcagcactagacccaagggcccccgctggaactctttgcttgcgtactttggtggaacactctggtagggtcttccggttgcaattcgacgaattccagattgtgagcagctcccatgacgacacaatccttatttgggattttcttaatgacccagcggcccaggccgaacctccacgatccccatccagaacttacacctacatatctcgctag

SEQ ID NO: 180585 - DNA, 1710 bp, synthetic construct
  misc_feature 1..1710: note = Description of Artificial Sequence: Synthetic coding sequence
  source 1..1710: mol_type = other DNA
atggaccccgccgaggccgtgctgcaggagaaggccctgaagttcatgaactcctccgagcgagaggattgcaacaacggcgagcctccgagaaagattatccccgagaaaaactcactgagacagacatataattcatgcgcccgcctctgcctgaatcaggaaacagtgtgtctcgcctctaccgccatgaaaacagaaaactgtgtagccaagacgaagctggcaaacggcaccagctcaatgattgtaccaaagcaacggaagctatcggcatcttacgaaaaagagaaagagctctgcgtaaagtacttcgaacaatggtcagaatccgaccaggtggagttcgtggaacacctgattagccagatgtgtcattaccaacatggccacatcaactcctatctgaagcccatgctgcagcgcgatttcatcactgcactgcctgcaagaggccttgaccatatcgctgagaatattctatcctacctggacgctaagagcttgtgcgcagccgaactggtgtgtaaggagtggtatagggtgaccagcgatgggatgctgtggaagaagctgattgaacgtatggtccgcacagattcgttgtggagaggcctggccgaaagaagaggctggggacagtacctgttcaagaacaagccccccgacggcaatgcccccccgaacagtttttaccgtgcgttgtatcccaagataattcaagacattgaaacaattgagtctaactggagatgtggcagacactccctccagcgcatccattgccgatcagagacctcaaagggcgtgtactgcctgcagtacgacgaccagaagatcgtgtccggactccgcgacaacacaataaagatatgggacaagaacactctagaatgtaagcgcattctaacaggccacactggaagtgtgctctgtctgcaatatgacgagagagttattataacaggctctagtgacagtacagtcagagtgtgggacgttaataccggtgagatgcttaacaccctgatacaccactgcgaagctgtcctgcatctcagattcaacaacggcatgatggtgacatgttccaaagacaggtctatcgccgtgtgggatatggcgagcccgactgacattaccctgcgaagggttctggtgggacacagagcagccgtgaatgtagtggactttgatgataaatacatcgtcagtgcctctggggatcgaactattaaggtgtggaacactagcacttgcgagttcgtgcggaccctgaatggtcacaagagggggattgcatgtctgcagtatcgggatagattagtggtttccggaagctccgacaatactatcaggctgtgggacatcgagtgtggcgcatgtcttagggttctggagggccatgaggaactcgtaaggtgtatacgctttgacaacaagaggatcgtctccggagcatacgatgggaagattaaagtgtgggatttagtggccgccctagacccccgagcacccgctggaactttatgcctgcgcacactcgtagagcactcaggacgcgtttttcgcctccagttcgatgagttccagattgtaagctctagtcacgatgacacaattctcatctgggacttcctcaacgaccccgccgctcaggccgaacctccacgaagtccctctagaacatacacatacatctcgcggtag

SEQ ID NO: 180586 - DNA, 126 bp, synthetic construct
  misc_feature 1..126: note = Description of Artificial Sequence: Synthetic coding sequence
  source 1..126: mol_type = other DNA
atggaccccgccgaggccgtgctgcaggagaaggccctgaagttcatgacttacaactcatgcgcccgactgtgcctgaaccaggagaccgtgtgtttagcttccaccgccatgaaaaccgaatag

SEQ ID NO: 180587 - DNA, 327 bp, synthetic construct
  misc_feature 1..327: note = Description of Artificial Sequence: Synthetic coding sequence
  source 1..327: mol_type = other DNA
atggtgaccctgctgcccatcgagggccaggagatccacttcttcgagatcctggagtcggagtgcgtgttgtacacgggttggatcgagagagctagtggctctagtatttacccagaagcgaaggccagactgccattggaagctttgctcggctccaataaggaaccaatgctgccaaaggagacagtgttgagtctgaaacggtacaacttgggtagcagtgctatgaagagaaatgtgcctgggcatgtcctgcagcggcccagctacctgacaaggatccaggtgacccttctgtgtaactctagcgccgaagcactgtag

SEQ ID NO: 180588 - DNA, 1521 bp, synthetic construct
  misc_feature 1..1521: note = Description of Artificial Sequence: Synthetic coding sequence
  source 1..1521: mol_type = other DNA
atggagcagctggacgtgttcatcagcatcaagcccaagcccaagcagccctccaaatccgtgatcgtaaagtccgtcgagcgcaacgccctaaatatgtacgaagctagaaagtgtctgctgggcctggagagctccggagtgacaatcgccactagtccgtctccagccagctgcccagccggactcgcatgcccatctttggacatcctcgctagcgccggtcttggtctgacagggctcggtttactcggccccactaccctgagcctgaacaccagtaccacaccgaactctttactgaatgctctgaactcaagcgtgtcccctcttcagagcccgagtagcggtaccccatcccccacactgtgggctccccctttggccaatacttcctcagccacaggcttctctgccattcctcacttaatgatcccttcaaccgcccaggccacgctgacaaatattctgctctctggggtacccacctatggacacaccgcaccatctcctccccctggattgacccccgtcgacgtccacataaattccatgcaaactgaaggcaagaagatttccgccgccttgaatgggcacgcccagtcaccagacatcaagtatggcgccatctctacctcctccctcggagaaaaggtgttaagtgcgaaccatggcgacccttccattcagaccagtgggtccgaacaaacttccccgaagagctcaccaactgagggctgtaacgatgccttcgtagaggttggaatgccgcggagcccctcacactctggtaacgcaggggatctcaagcaaatgatgtgtccctcaaaagtgtcctgcgcgaaacgccagaccgtggagctcttgcaggggacaaagaacagccatctgcattccactgatcgactgctcagtgatcccgagctgtcagcgaccgagtctccgctcgccgataaaaaagcccctggatccgagcgagccgcagagagagccgctgcagcccagcagaattctgaaagggcgcacttggctcctcgctcttcttatgttaatatgcaagccttcgactacgagcagaagaaactgttggctacgaaggccatgctgaaaaagccagtcgtgacagaggtgaggacacctacaaatacatggtctggattagggttcagcaagtctatgcctgcagagactatcaaagaactgaggagggctaaccatgtgagttataaaccaactatgacaacaacttatgaagggagcagtatgagtctcagcaggagcaattcccgagagcacctggggggtgggtccgagagtgacaattggagggatcgcaatgggattgggcctggtagccacagcgagttcgccgcctcaatcggtagtcccaagagaaagcagaacaagagcagcgaacggtgcgtactttgcacattattgggcatcccaaggctggagtgtgtctatcttgggtggagcatcacagactgcggactgagtgatttcaaatgcctggtttag

SEQ ID NO: 180589 - DNA, 2925 bp, synthetic construct
  misc_feature 1..2925: note = Description of Artificial Sequence: Synthetic coding sequence
  source 1..2925: mol_type = other DNA
atggccgcccagggcgagcccggctacctggccgcccagagcgaccctggaagcaatagtgagcggagtacagattctcccgtccctggcagcgaggatgacctggtggctggggcaaccctgcactcacctgagtggtccgaagaacggttccgcgtcgatagaaaaaagttagaggccatgctccaagcggccgccgaaggaaaaggtcgcagtggcgaggacttcttccagaaaattatggaggaaactaacactcagattgcgtggcccagcaagctgaagataggcgccaaatctaagaaagacccacacattaaagtctctggaaagaaagaggatgtgaaagaagccaaggaaatgattatgtccgtgctggatacaaagtcaaacagggtgactttaaagatggacgtgtcccacacagagcacagccacgtgattggcaaaggtggtaataatattaaaaaagtgatggaagaaaccggttgtcacatacattttcctgattctaaccgcaataaccaagccgaaaagagtaatcaggtttctatcgccggtcaacctgcgggcgtggaaagcgccagagtacgaattcgtgaactgctccccctcgttctgatgtttgaactacctattgctggaatactccagcccgttcccgacccaaattccccgagcatccagcatatttcacagacgtataatatatcagtgtcctttaaacagcggtcaagaatgtatggggccacggtgatagtccgcggatctcagaacaacactagtgcggttaaagaaggcaccgccatgcttctggagcacctggctgggtccttggcaagcgcgatccccgtttccacacagctggacatcgctgcccagcaccacttgttcatgatgggacgtaacggcagtaatataaaacacatcatgcagagaactggcgcacagatacacttccctgatccctctaacccccagaagaaatctacagtgtacttacagggaactatcgagtccgtatgcctggctcgccagtatctgatgggctgtttacccctggtgctgatgttcgacatgaaagaagaaatagaagtggacccacagtttatagcgcagctgatggaacagctcgacgtgttcatttctattaagccaaagcctaaacagccttcaaagagcgttatcgtaaagtctgtggagcggaatgctctgaatatgtatgaagcaagaaaatgcctgcttggacttgagtccagcggggtgactattgccacttcccccagtcctgccagctgcccagccggattggcctgtcctagcctcgatattttggcttcagctgggttaggactcaccggcttgggcctgctcggacccaccaccctttctctgaacacctcaactacacctaacagtcttctgaacgcactgaattcgtcagtgtcacctctgcaatctccatcctcaggaacgcccagtccgacactgtgggcccctcctctggctaatacaagctccgcgaccggcttcagcgcgatccctcacctgatgatccccagcaccgcccaggcgacccttacaaatattcttttgagtggagtaccaacttatggccacacggctccaagcccgccacctggcctgacccctgtggacgtacatatcaactcaatgcaaacggaaggtaagaaaattagtgctgcccttaacgggcatgctcagtcccccgatattaaatacggagctattagcacctcctctttaggtgagaaagtgcttagcgccaaccacggcgatccttcaattcagacttctggtagtgaacagacgtctcccaagtcctctcctacggagggttgcaatgacgcgttcgtggaagtgggcatgccaaggtcaccctctcactctggtaacgccggagacctgaagcaaatgatgtgtccatctaaggtgagttgtgccaaacggcaaacggtggagctccttcagggcaccaagaatagccatctgcactcaactgaccgcttgctttccgaccccgagttgagcgcaaccgaaagccctctcgctgacaaaaaggcacccggatccgagcgggcagcggaacgggccgccgccgctcaacagaactccgaacgggcccacctggccccccggagctcgtatgtcaatatgcaggcattcgattacgagcagaagaaacttctggccaccaaggcaatgctgaagaaaccagtcgtaacagaagttcgcacccccaccaatacgtggtccggcctgggattcagcaagtctatgcccgcggaaactatcaaagagttgcgaagggcaaaccacgtaagctataaacccaccatgacaacaacctatgagggatcaagtatgtccctgagcagatctaacagcagagaacacctgggaggggggagtgagtctgacaattggcgcgaccggaatggcatcggtcctgggtctcattccgaattcgccgcaagtatcggcagcccaaagagaaagcaaaataaaagcaccgaacattacctaagttcaagcaactacatggactgcattagtagtttgacaggttccaacgggtgcaacctgaacagttctttcaaaggctccgatcttccagagctttttagcaagttaggccttgggaaatacactgacgttttccaacagcaggaaatcgacttacagactttcctgaccctgactgaccaggaccttaaggagttgggcatcaccacatttggcgcccgtcgcaagatgctgcttgccatatcagaactgaataaaaaccgacggaagctgtttgagagccccaacgccagaacgtcattcctggagggcggtgcaagtggtaggctgccccgtcaatatcattccgatatcgcgagcgtgtccggacgatggtag

SEQ ID NO: 180590 - DNA, 2928 bp, synthetic construct
  misc_feature 1..2928: note = Description of Artificial Sequence: Synthetic coding sequence
  source 1..2928: mol_type = other DNA
atggccgccgaggaggtgctgcagaccgtggaccactacaagaccgagatagagagactcacgaaagagttgacggagacaacccacgagaagattcaagccgctgaatacgggctcgtggtgctagaggaaaagctcacgcttaagcagcaatacgatgaactggaggccgagtacgactctctgaaacaggagctggagcagttgaaggaagccttcggccagtcatttagcattcatcgcaaggtggccgaggatggagagacccgcgaagagaccctcctccaggaatcggcaagcaaagaggcatactatttgggtaagatcctcgagatgcagaacgaactgaaacagtcccgggctgttgtgactaacgtccaggcagaaaatgaaagactaacggccgtggtccaggacttgaaagagaacaacgaaatggtggagttgcagagaatcagaatgaaagatgagatccgggagtacaagttccgggaagcccgactcctgcaggattacacagagctggaggaagaaaatattactctgcaaaaactcgttagtaccctcaaacagaatcaagttgaatatgaaggactgaaacatgagattaaaagattcgaagaagaaacagtgctcttaaactctcagcttgaggatgccatacggctgaaggagattgcggagcaccagttggaggaggctctagagactcttaagaacgaacgcgaacagaaaaataacctgcgtaaagagttgagccaatacatctcccttaatgacaatcacatcagcatctctgtcgacggtctaaaattcgccgaagatgggagtgaacctaacaacgatgataaaatgaacgggcacatccatggtccgctggttaaactgaacggagactaccgtacaccgaccctgcggaagggggaaagcctgaaccctgtgtcggacctgttctcagagctgaacattagtgagattcagaagctgaaacaacaactcatgcaggtggagagagagaaagctatcttgcttgctaaccttcaagaatcacagacacagctggagcacacgaagggagcactgacagaacaacacgaacgggtgcaccggttaactgagcatgttaacgctatgcggggcctccagagttctaaggaattgaaggcagagctcgatggtgagaaaggccgcgacagtggcgaggaagcccatgactacgaggtggatatcaacggtctcgagatcctcgagtgtaagtaccgtgtagctgtgactgaggtgattgatctaaaagcagaaattaaggctctgaaggagaagtacaataagtccgtggagaactatacagacgaaaaagccaaatatgagtcgaaaattcagatgtacgacgaacaggtcaccagtcttgagaagacaaccaaggagagtggagagaagatggcacacatggagaaagagctgcagaaaatgactagcatcgccaacgaaaaccactcaacattgaacactgcccaggatgaactggtcacattctcagaggaactggctcagctgtatcaccacgtttgtctgtgcaacaatgagacgccaaatagagtcatgctggattactacagacagagcagagtcaccagatcgggctccctcaaagggcctgatgatcccagaggactgctcagccccaggcttgcaagacgcggcgtgagttcgccagtggagacccgcacatcttccgagcccgtggcaaaggaatcaacagaagcgtccaaggaaccttctccaactaagacccccaccatctccccagtgattacagccccacccagttccccagtactcgatacatccgacattcggaaggagccaatgaacatctacaatttaaacgctatcatcagggatcagatcaaacacctgcagaaagccgtggatcggtctctccagcttagcagacagcgcgctgctgcaagagagctcgcacctatgattgacaaagacaaagaagctctaatggaggagattttaaagctgaagtcactcctatcaacgaagcgcgagcaaattgcaacactcagggctgtcctgaaggcgaacaaacagactgcggaggtggccttggccaacctgaaaaataagtatgagaacgaaaaagctatggtgacggaaaccatgactaagttgcgaaatgaactgaaagctctcaaggaggacgcagccaccttctccagtctgcgtgccatgttcgcgaccaggtgcgacgaatacgtgacacagttagatgagatgcaacgtcagctcgctgcagctgaagatgaaaagaaaaccctcaatacccttctcaggatggctatccagcagaaactcgccttgacacaacgcctcgaagacctggagtttgatcatgagcaaagcagaaggagcaagggaaagttgggcaagtccaagattggctccccaaaggtttccggcgaagcatccgtgacggttcccacgattgatacctacctcctgcactctcaaggcccccagacccccaacattcgtgtgagttctgggacacagcgcaaaaggcaattctcaccttcactttgcgaccagtctagaccaaggacttctggcgcctcgtacctccaaaatctgctcagagtgccacccgatcccacaagcactgaatcttttctgttaaaaggccctccatcaatgtcagagtttatccaggggcataggctaagtaaagagaaacgcctgactgtggcaccgccagattgccagcaacccgctgcaagcgtgccgccacagtgctcgcaactagccggacgtcaagactgtccaaccgttagcccagacaccgccctgccggaagagcagcctcattcatcttcccagtgcgcaccactccattgcctgagcaaaccaccgcacccttag

SEQ ID NO: 180591 - DNA, 2484 bp, synthetic construct
  misc_feature 1..2484: note = Description of Artificial Sequence: Synthetic coding sequence
  source 1..2484: mol_type = other DNA
atggccgccgaggaggtgctgcagaccgtggaccactacaagaccgaaattgagagattgaccaaggagttgactgaaactacccacgaaaaaattcaggccgccgagtacgggctggtggtcttggaggagaaactcactcttaagcagcagtatgatgagctggaggccgagtacgacagtctgaagcaagagctggagcaactcaaggaagcatttggacagtcattttcaattcataggaaagtcgctgaggatggggagaccagagaggagacactactgcaggagtcggcctctaaggaggcctactaccttggcaagattctggagatgcagaacgagctgaagcagtctcgagcagtggtcacgaacgtgcaagctgagaacgagcgtctgacagccgtagtacaggacctgaaggagaataacgagatggtggagcttcagcgaatccggatgaaagatgagatcagggaatataagtttagggaagcaagattgctgcaggactataccgagctcgaggaggagaatatcactcttcagaagctggtatctacactcaagcagaaccaggtggagtacgagggcttaaagcacgagatcaagaggttcgaagaagagactgttcttttgaattcacagttagaggatgcaattcgactcaaggaaatcgctgagcaccaactggaagaggcgctggaaacactgaaaaacgagcgcgagcaaaagaataacctgagaaaagagttgagccagtacatctccctgaacgacaaccacatttcaatctcggtggatggcttgaagtttgccgaggacggcagcgaacccaacaacgatgataagatgaacgggcacattcatggtccattagtaaaattgaacggtgattatagaaccccgaccttgaggaagggcgagagtctgaacccagtatcagatctgttcagcgagctgaacatctctgagatccagaagttaaaacagcaacttatgcaggtcgagcgcgaaaaagccatcctgctggctaacctgcaggagtcccagactcaactcgagcatactaagggggcactcactgagcagcacgaaagggttcaccgcctaactgaacacgtgaacgccatgcggggactccagagctccaaagaacttaaagccgaactggacggggagaagggtagggatagtggtgaggaagctcacgactatgaagtggatattaatggattggagatacttgaatgcaaatacagagtcgccgtgaccgaagtgatcgatctcaaagccgagattaaggccctcaaagaaaagtacaataagtcagtcgagaattacaccgacgagaaggctaaatatgagtcaaagattcagatgtatgatgagcaagtgacttccttggagaagactaccaaggagagtggcgagaagatggcacatatggagaaggagctacaaaaaatgacctcaattgcaaatgaaaaccactccacactaaatacggcccaggatgaattggtcacattctctgaagagttggcccagctataccaccatgtgtgcctttgcaataacgaaactccaaatcgggtgatgctggactattataggcagtcacgcgtgacaagaagcgggtccctgaagggtccagatgacccaagagggctcttaagccctaggttggcccgccggggtgtgagttctcctgtggagacccggacctcctctgagcctgtagctaaggagtccacagaggcgtcaaaggagccttcacccaccaaaacgccaactatctcccccgtgatcactgctcctccttcttcccccgtcctggacaccagcgacatccgcaaggagccaatgaacatctataatctgaacgcgattattagggaccagattaaacacctccagaaggccgtcgaccgcagcttgcagttgtctagacaaagggcagcagcccgggagctcgccccaatgatcgataaggacaaggaggcactcatggaagagatactcaaacttaaatcccttctctcaaccaagagagagcagattgcaacgctgcgagctgtcttgaaggccaataagcagaccgctgaggtggctctggccaacctgaaaaataagtatgaaaacgagaaagctatggtaacggaaactatgacaaagctgcgcaatgaattaaaagccctaaaagaggacgctgccacgttctcttcactgagggccatgtttgccactagatgcgatgaatacgtcacccagctcgacgaaatgcagcggcagctggccgctgctgaggatgaaaaaaagacactcaacactctcctaagaatggcaatacagcagaaactggctttgactcagcggctcgaggatctggaatttgaccacgaacagtctcgccgctcaaagggcaaactgggtaagtcgaagatcgggagcccaaaaactatctttactttccccctctag

SEQ ID NO: 180592 - DNA, 2508 bp, synthetic construct
  misc_feature 1..2508: note = Description of Artificial Sequence: Synthetic coding sequence
  source 1..2508: mol_type = other DNA
atggccgccgaggaggtgctgcagaccgtggaccactacaagaccgaaatagaacgtctgacgaaagagcttaccgagaccacacacgagaaaattcaagccgcagaatatggtctagtagtactggaagagaagttgaccctgaaacaacagtacgacgagctggaggccgaatacgattccctgaagcaggagctggagcagttaaaggaggctttcggccagtctttttctatacaccggaaggtggccgaggacggagaaactcgcgaggagacactgctgcaggaaagcgcatccaaagaggcgtattatttaggaaagatcctggagatgcaaaacgaattaaagcagtcgagagccgtggtcacgaatgtacaggcagagaatgaacgactgaccgccgtcgtgcaggatctgaaggagaataatgagatggtggagctgcaacggatccgaatgaaagacgaaatccgcgagtacaagtttcgagaggcacgcctgctccaggactataccgaactcgaggaagagaatattacgctacaaaagctagtgagcactctgaagcaaaaccaagtagaatatgagggactgaaacatgaaatcaaacgcttcgaggaggaaacagttttgctcaacagtcagctggaggacgctatccggctgaaggagattgcagaacaccagctcgaggaggctctcgaaacattgaagaatgaacgggaacagaagaacaatcttcgtaaggagctatcccagtacatcagcctaaatgacaaccacatctctatcagcgtcgatggcttgaagtttgcagaggacgggtcagagcccaataacgacgataagatgaacgggcacatccacggcccactggtgaaactcaacggcgactaccggacccccactctcaggaagggggaatctctgaatccagtgagtgatctgttctctgagctgaacatatctgagatccagaagctcaagcagcagctcatgcaggtagaaagggagaaagcgattcttctggctaatctacaggaatctcagacccaactggagcacactaaaggggctctaactgaacagcacgaacgggtacataggctgacggagcatgttaacgcaatgagaggcctccagagcagcaaagaactgaaggccgaacttgacggcgaaaagggacgggattcaggggaggaggcccatgactacgaggtggacattaacggcctcgagatactggaatgcaagtatagagtagcagtcaccgaagtgattgacctgaaggccgaaatcaaagcgttaaaggagaaatataacaagtcggtcgagaactacactgacgaaaaggcaaagtacgagagtaaaatccagatgtacgacgagcaggttacatcccttgagaagactaccaaagaatctggcgagaaaatggctcatatggaaaaagaactccagaaaatgactagcatagccaatgaaaaccactccaccttaaataccgcccaggacgaactggtgactttctctgaagagctggcccagctgtaccaccatgtctgtctgtgcaacaatgaaactcctaatcgcgtgatgctcgattattatcggcagagcagagtcacacgcagcgggagtctgaaggggcccgacgaccctcggggacttttatcccccaggctggccaggcgtggcgtgtcctctcctgttgaaacgaggacatctagcgaacccgttgccaaggaaagtaccgaagcctccaaggagccttcaccaacaaaaaccccaaccatcagcccggtcatcacagcccccccgagtagccccgtgctggatacttcagacatcaggaaggaaccaatgaacatctacaacctgaacgccatcattcgggatcaaataaagcacttgcagaaggctgttgaccgctcactccagctgagcaggcagagagctgcagcccgggagctagcccccatgatagacaaagataaggaagcgcttatggaggaaatcctcaagctcaaatcactgttgagcacaaagagggagcagatcgccactttaagggctgtgctcaaggcaaataagcagaccgccgaagttgctttggctaacctcaaaaataagtacgagaatgagaaggcaatggtcactgagacaatgacaaagctgagaaatgaacttaaggcacttaaggaggatgccgctacgttcagctcattacgcgccatgtttgcaactcgctgtgacgagtacgtaacacagcttgatgaaatgcagcgccagttggcggccgcagaagacgagaagaagacactgaatacactgcttcgtatggctattcagcagaaactcgccctcactcaaagacttgaagatctggagtttgaccacgagcagtcacgccgttctaagggcaaactgggcaagtccaagattggaagcccaaaaattgtatcatcactgcttcccccttataggcactcagctcataattag

SEQ ID NO: 180593 - DNA, 2568 bp, synthetic construct
  misc_feature 1..2568: note = Description of Artificial Sequence: Synthetic coding sequence
  source 1..2568: mol_type = other DNA
atgagcgcccccagcgaggaggaggagtacgcccggctggtgatggaggcccagcctgagtggctgcgggcagaagttaagagattatcccatgagctagccgaaacaaccagggagaagatccaggcggcggagtatggcttggcggttctggaagagaaacaccagctaaaattacagttcgaggagttagaagtcgactatgaagccatacgctcagagatggagcaactgaaggaggccttcggtcaggcccataccaaccacaagaaagtggccgctgatggtgaatccagggaagaaagcctgatccaagagagcgccagcaaggaacagtattatgtccggaaggttctcgagctgcaaaccgagctgaagcagctgcggaatgttctaactaacacacaaagcgagaacgaacggctggccagtgtggcgcaggagttgaaagaaattaaccagaatgttgagattcagcgaggccgcctccgtgacgatatcaaagagtataagttccgtgaagctcgcctcctgcaggactacagcgaacttgaggaggaaaacatctcactgcaaaaacaagtctctgtattaaggcaaaatcaagtagaattcgaggggcttaagcacgagatcaaacgattggaggaggaaacagagtatctcaactctcaactagaggacgctattcgcctgaaggagatttctgaacgccaactggaggaggctctcgaaaccctgaagacggaaagggaacaaaagaactctctacggaaagaactttcccactacatgtcaatcaacgactcattctacacaagtcacctccacgtgagcctcgacggtctgaagttttctgacgacgccgcggagcccaacaatgacgctgaggctttggtcaacgggtttgagcacggtggtctggccaaactgcctttggataacaagacgtctactccgaaaaaagaaggcctcgcaccaccaagccctagcctggtgagcgacctgttgagtgagttaaacatctcagaaattcagaagctgaagcaacagcttatgcaaatggagcgcgaaaaagccgggctcctggccacactgcaggatacacagaaacagctggagcacaccagaggcagtctttctgagcagcaggagaaagtgactagattgaccgagaatttatctgcgttgagacggttgcaagcttccaaggagcggcagacggccttagacaatgaaaaggatcgggattcccatgaggatggagactattacgaagtcgatatcaacggtccggagatccttgcctgcaaataccacgtggccgtggccgaagctggtgaacttcgagaacaacttaaggcattgcgcagtacccacgaggctagggaggcccagcacgctgaagaaaaggggcggtacgaggccgaaggccaagcccttacggaaaaggtttctctgctggagaaggcatcccggcaagatagagagctgctcgctagactggaaaaagagctgaaaaaagtgtccgatgtggcaggagaaacccagggatcgttgagcgtcgcgcaggatgagctcgttacgttttctgaggaacttgcgaacctttaccatcacgtttgcatgtgtaacaacgagactcccaatcgtgtgatgctcgactattatcgtgaaggtcaaggaggagcagggcggacatctcctggcggccgaacatcccctgaggcgagaggacggcgctcccccatccttttacccaaggggctgttggcacctgaagctggccgagccgatggcggcacgggagactcctcccccagtcctggctcatctctgccgagcccactctcagacccgagaagagaacctatgaatatatataatctcattgccatcatcagagaccagattaaacatctgcaggctgccgtcgacaggacgactgagctctcgagacagcggatcgcatcccaggagctgggtcctgctgtcgacaaggataaggaggcactgatggaagaaatcctcaaattgaaaagcctcctgagcacaaagcgggaacaaataactactctgcgcacagtcctgaaggctaacaaacaaactgccgaggtggctcttgccaatctcaagtccaagtatgaaaacgaaaaagctatggttactgaaacaatgatgaagctcaggaacgagctgaaagcccttaaagaagacgcagcaacattttcctctctcagggcaatgtttgctacccgatgtgacgagtatatcacccagctggatgaaatgcaaagacaactggcagccgcagaagacgaaaaaaaaacacttaatagcctactgaggatggccattcagcagaaattggctctgacccagcggcttgagctgcttgagcttgatcatgaacaaacccgtcggggcagggctaaggcggctccaaagactaagcctgctaccccctccgtgtcccacacatgtgcttgcgctagcgaccgggctgagggcaccgggctcgccaatcaggtgttctgcagcgagaaacacagcatttactgcgactag

SEQ ID NO: 180594 - DNA, 2475 bp, synthetic construct
  misc_feature 1..2475: note = Description of Artificial Sequence: Synthetic coding sequence
  source 1..2475: mol_type = other DNA
atgagcgcccccagcgaggaggaggagtacgcccggctggtgatggaagcacagcccgagtggctccgcgcagaagtgaagagactgtcccacgagctggccgaaaccacccgagagaagattcaagctgctgagtacggtctagccgtgctggaagagaagcaccagttgaagttgcagttcgaagagttggaggtagactacgaggctatccgttccgagatggaacagctgaaggaggcctttggccaggcccacactaaccacaaaaaggtcgccgccgatggagagtcacgagaagagtcacttattcaggaatcagctagcaaagaacagtattacgtccgcaaagttctcgaactgcagacagaactcaagcaacttcgaaacgtgctcaccaatacacagtctgagaacgaacgcttagctagcgtcgcccaggaactgaaggaaatcaatcagaacgtcgagatccagaggggtcggctgagggatgacattaaagagtacaagttcagagaagcccgcctcctccaagattattcggagctagaggaagagaacatcagcctgcagaagcaggtgagtgtgctccgacagaaccaggtcgaattcgagggactgaagcacgagattaagaggctcgaggaggagacagagtatctgaactcccaacttgaagacgctattcgactaaaggaaatctccgaaaggcaattagaggaagccctcgaaactctgaagacggaacgggaacaaaaaaactccctgcgaaaagagctgtcccactacatgtccattaatgactcattttatacctcgcacctccatgttagtctcgatgggctgaaattcagtgacgacgccgccgaacctaataacgatgcggaagcgctagtgaatggttttgagcatgggggtctggctaagctgccactggataacaagaccagcactccaaaaaaggaaggcctggctccgccatcaccctccttggtgtccgacttgttatctgaactgaacatttctgaaatccagaagctaaaacagcaactaatgcagatggaaagagaaaaggctggcctcctggccaccctccaagacacgcagaaacaactggagcataccaggggctcactaagtgaacagcaggaaaaggtgacacgtctcacagagaatctgtcagccttgcgtcgcttgcaggcttctaaagaaagacagacagctcttgataacgagaaggatagagacagccatgaagatggtgattattacgaagtcgacattaatgggcccgaaattctggcatgtaagtatcatgtggcggtcgccgaggccggtgagctgcgtgagcagctgaaggccctcaggtcaactcacgaggcacgggaagcccaacacgcggaggagaaaggcagatacgaagccgaaggtcaggccttgaccgaaaaagtgagcctccttgaaaaggccagtcgtcaagatagggaactgttagcccggctggaaaaggagctgaagaaagtgtctgatgttgccggagaaacacagggatccctttctgtggcccaggacgaactggtcacattctccgaagaactcgcgaacctgtaccaccacgtgtgtatgtgcaacaacgaaaccccgaatcgggtcatgctcgattattatcgtgaggggcaaggaggtgcaggacgtacatccccaggtggcaggacctctccggaggcgcggggacggcggagtcctattctgctgcccaaaggactcctcgctcctgaggcgggtagggctgatggcggcacaggggactcttcccccagcccagggagtagcttaccgtcacccttgtcagaccctcggcgggaacctatgaatatctataatcttattgccattatccgggatcagataaaacacctacaggcggccgtcgaccggacaaccgaattaagccggcaaaggatagcaagccaggagttaggaccggccgtggacaaagacaaggaagccttgatggaggagattctgaaattaaagagtctccttagcaccaagagagagcaaattacaaccctgagaaccgttctgaaggctaacaagcagactgcagaggtggccctagccaacctaaagtctaaatacgagaacgaaaaggcaatggtgaccgaaactatgatgaagctgagaaacgaacttaaggcattgaaggaagatgccgccactttctcatccctgcgcgcaatgttcgctactcgttgtgatgagtacattacacagctcgacgaaatgcaacggcagttagctgccgccgaggacgagaagaagaccctgaactcgttgttgagaatggctatccaacagaaactggctctcacacagagactcgaactgcttgagctggatcacgaacagacgaggcgtggacgcgctaaagcagcaccaaagactaagccggctactccttctctgtag

SEQ ID NO: 180595 - DNA, 1107 bp, synthetic construct
  misc_feature 1..1107: note = Description of Artificial Sequence: Synthetic coding sequence
  source 1..1107: mol_type = other DNA
atgtggcccctgtggcggctggtgagcctgctggccctgagccaggccttacccttcgagcagcgtgggttttgggattttacactggatgacggccctttcatgatgaacgatgaagaggcgagcggagctgatacctccggagttctggatcccgacagcgtgacccctacgtactccgccatgtgtccattcggctgtcactgccaccttcgagtggtgcaatgtagtgacctgggcctgaaatctgtgcccaaggagatttcccctgacacaactctgttagacttgcagaataacgacatttcagagctcaggaaagacgacttcaaggggttgcagcatctgtacgctttagtgctggtcaacaataaaatctcaaagattcatgaaaaagccttctctcctcttagaaagttgcagaaactgtatatatctaaaaaccatctggtagaaattccccccaaccttccgtctagtttggtcgagctgcgcattcatgacaaccggattcgcaaggttccgaagggcgtcttctccgggctccgcaacatgaactgcattgagatgggcggcaaccccttggagaacagcggctttgagcccggtgcctttgatggtctgaagctcaactatctccgaattagcgaagccaagctgacaggcatacctaaagacttacctgaaacattaaacgaactccatctggatcacaataaaatccaagccattgagctggaagatctgctccgctactctaagctgtatcgcctggggcttggccacaaccaaattcggatgatcgagaacgggtctctctcattcctgcctactctgcgcgaacttcacctggataacaacaaactcgcgcgcgtgccctccgggcttcccgacctgaagttgcttcaagtggtgtacctacactcaaataatatcactaaggtcggtgttaacgatttctgtcctatgggatttggcgtgaagcgggcatattataatggtatttcgctgttcaataaccccgttccttactgggaagtccagccagctaccttccggtgcgtgacggatagactagccattcaattcggcaactacaagaagtag

SEQ ID NO: 180596 - DNA, 924 bp, synthetic construct
  misc_feature 1..924: note = Description of Artificial Sequence: Synthetic coding sequence
  source 1..924: mol_type = other DNA
atgtgccccttcggctgccactgccacctgcgggtggtgcagtgctctgatcttgggctgaaatctgtccctaaggaaatcagccctgacacgacccttctcgacctccagaataacgacatcagtgagctgaggaaggacgacttcaagggacttcagcacctatatgctctggtgctcgtgaacaacaagatttcgaagatccacgagaaggctttttctcctcttaggaagctccagaagctgtacatctctaaaaaccatctcgtcgaaatcccgccaaatctgccttccagcctggtggagctgcggattcacgataaccgcatccgcaaggtcccaaaaggggtattttctggccttcgcaacatgaattgcatagagatgggcgggaatccgctcgaaaatagtggctttgaaccaggggctttcgacggactcaagttaaactacttgagaattagcgaggctaagctaaccggaatcccgaaggaccttccagagaccttgaacgagttgcacctggaccacaacaagatacaggccatcgaattggaggacctgctgagatattccaagctgtaccggctagggctgggccacaaccagatcagaatgatagaaaacggtagtctgtcatttctccctactttaagggaactccacctcgataataacaagttggctagagttccatcgggactaccagacctgaaactattgcaggtagtgtacctgcactccaacaacattacaaaggtgggggtgaatgatttctgcccaatgggattcggagtcaaacgggcctattacaatggcatctccctgtttaacaaccccgtcccatactgggaagtccaacccgctacatttaggtgtgtaacagaccgcttggccatacaatttggcaactacaagaaatag

SEQ ID NO: 180597 - DNA, 924 bp, synthetic construct
  misc_feature 1..924: note = Description of Artificial Sequence: Synthetic coding sequence
  source 1..924: mol_type = other DNA
atgtgccccttcggctgccactgccacctgcgggtggtgcagtgcagcgatctaggactgaagagcgttccaaaggagatctcacctgatacaaccctcctcgatctgcagaataatgatatcagtgagctgcgcaaagacgacttcaagggcctgcagcatctctatgcactcgtgctggtgaataataagatcagtaagatacacgaaaaagctttttcgccactgaggaaactgcaaaaactctacatctctaaaaatcacctggttgaaatcccgcctaatttaccctcctccttggttgagctaaggatacatgacaaccggatacgcaaagtgcccaagggcgtgttttcaggcttaaggaacatgaattgtattgagatgggaggaaacccacttgaaaactctggatttgagccaggcgctttcgacggtctaaagcttaattacctccggatcagcgaggccaagcttactgggattcccaaagacttgcccgaaaccttaaatgagttgcatctggaccacaataagattcaggcaatcgaactggaggacctgctacgatactctaagctgtaccgtctgggactgggacacaaccagattaggatgatcgaaaacgggagtctctccttccttcccaccctgcgggagctgcacctcgacaataacaaactcgcccgagtgccatcaggcttgcctgacctgaagttactgcaggtggtgtacctgcacagcaataacattaccaaggtcggggttaatgacttctgccctatgggcttcggcgtgaaacgggcatactataacgggatctctctcttcaataaccctgtgccctactgggaagtgcagccagccactttccgctgcgttaccgataggctcgcgattcaatttggcaactacaagaagtag

SEQ ID NO: 180598 - DNA, 717 bp, synthetic construct
  misc_feature 1..717: note = Description of Artificial Sequence: Synthetic coding sequence
  source 1..717: mol_type = other DNA
atgtggcccctgtggcggctggtgagcctgctggccctgagccaggctctgccatttgagcagaggggattttgggattttacgctggacgatggccccttcatgatgaatgacgaagaagcctcgggcgcagatacatcgggtgtcctggacccagattcagttactcctacatattctgctatgtgtcccttcggctgccactgccacttgagagtggtgcagtgtagcgatctagggctcaagtcagtgccaaaggagatttcccctgacactactctactggacctacagaataacgatatatcagaacttagaaaggacgatttcaaaggtctccagcatctatacgttcggagctgggaggaacctgccggattgcagcagagggctggcgtgcgggctttggtgctcgtcaataataagatctccaagatccacgaaaaggcatttagcccactgcgcaaattacagaagctttacattagcaagaatcatctggtggaaattcctcctaatctgccctcctctctggtggagttgagaattcatgataaccggattcgcaaggtgcccaaaggggtcttttcaggcctgaggaacatgaactgcattgaaatgggcggtaacccattggaaaatagcgggtttgagccaggcgcatttgacggactcaaactcaattacctgagaataagcgaggctaagttaacctag

SEQ ID NO: 180599 - DNA, 1257 bp, synthetic construct
  misc_feature 1..1257: note = Description of Artificial Sequence: Synthetic coding sequence
  source 1..1257: mol_type = other DNA
atgatccagctgaccgccacccccgtgagcgccctggtggacgagcccgtgcacattcgcgccactgggctcattccatttcaaatggtttcctttcaggcaagcctggaggacgagaacggggacatgttttattctcaagctcattacagagctaacgagttcggagaggttgacttaaatcacgcttccagtctaggcggcgattacatgggggtccacccgatgggcctcttttggtcattgaagcctgaaaaattgttgacacgtctgttaaagcgcgacgtgatgaaccgccccttccaggtgcaagttaaactgtatgacctggaactgatcgtgaataacaaggtcgccagcgctcctaaggccagcctcaccctggagcggtggtacgtcgctcctggtgtgacccggattaaggtgcgggagggtcgtctccgaggagcactgttcttgccacctggggagggattgtttcccggcgtgatcgatttgtttggcggactggggggcctgcttgaatttcgagcaagcctccttgcttctcgtggctttgcttctctcgctctcgcgtatcacaactatgaggaccttcccagaaaaccagaggttacggacctggagtatttcgaggaagccgcaaacttcctgctgcgacatccaaaagttttcggctcaggtgtgggcgtggtgtcggtgtgccagggagtgcagatcggcctgtcgatggctatttatctgaagcaggttactgcaacagttctgatcaacggaacaaactttccatttgggatcccacaggtgtaccatgggcagattcaccaacccctacctcattctgcacagctgataagcactaacgctttaggacttcttgagctgtaccgcacattcgagactacacaggtgggtgccagccagtatctctttccaatcgaagaggcccagggtcaattcttgtttatcgtcggtgagggcgataaaaccatcaacagcaaggcccacgctgaacaggccatcggacagttgaagcggcatggtaagaataattggaccctcttgagttaccccggggctggtcacctaattgaacctccgtatagccccctttgttgtgcttccaccacacatgatctgaggttgcactggggcggggaagtgatcccccatgctgcggcccaggagcatgcatggaaagagattcagagattccttaggaaacacttgattcccgacgtcacatctcagctgtag

SEQ ID NO: 180600 - DNA, 1257 bp, synthetic construct
  misc_feature 1..1257: note = Description of Artificial Sequence: Synthetic coding sequence
  source 1..1257: mol_type = other DNA
atgatccagctgaccgccacccccgtgagcgccctggtggacgagcccgttcacattcgggccacggggctgatccctttccagatggtctctttccaagccagcctcgaagatgaaaacggtgacatgttctatagccaggcacactacagagctaatgagttcggtgaagtggatcttaatcacgcaagtagccttggcggagactatatgggcgtgcacccaatgggactgttttggtcactgaaaccagagaagctgctcaccagactgctcaaaagagatgtcatgaatcggccctttcaagtgcaggttaagttatacgacctcgaacttattgtaaataataaggtcgcttcagctccaaaagccagtttaacattggagcgttggtatgttgcgcctggcgttactagaatcaaagttcgagagggcaggttacgcggagcattgttcttgcctccaggagagggtctttttcccggtgtcatcgacctttttggtggcttgggcggactccttgagtttagagccagcctgctggcttcccgagggttcgccagtttggccctggcctatcataactacgaggatctgcctaggaaaccggaagtgactgatctggaatacttcgaagaagcagccaacttcttgctgcgccatcccaaagtcttcggaagtggcgtgggggttgtgagtgtgtgtcagggcgtccagatcgggctgtcaatggcaatttatctgaagcaggtgaccgcaacagtgctgattaatggcaccaacttccccttcgggattccacaggtataccacgggcaaatccaccaacccctgcctcatagcgcccagttgatatccacaaacgcactcggattgttggaactgtaccgtacatttgagactacacaagtgggtgcgagtcagtacctgtttccaatcgaagaagcccagggacaatttctctttatcgttggagaaggcgataaaactattaattccaaggcccacgccgagcaggccattgggcagctgaaacgccacggaaagaataactggacccttctgtcctatcctggtgccggtcacctaattgaaccaccttacagccccctgtgttgcgcctctactacccacgatctccggttgcattggggcggcgaggtgatcccgcatgccgctgcacaggagcatgcctggaaggaaatccagaggttcctgcgaaaacacctgatacctgacgtaaccagccaactctag

SEQ ID NO: 180601 - DNA, 891 bp, synthetic construct
  misc_feature 1..891: note = Description of Artificial Sequence: Synthetic coding sequence
  source 1..891: mol_type = other DNA
atgaacgccgagcccgagcggaagttcggcgtggtggtggtgggcgtcggccgggccggatcagtacgcatgagggacttgaggaatccccacccttctagcgcctttctgaatctgatcggatttgtgagcaggcgtgagctgggttccatagacggggtgcaacagatatccctcgaggatgcactgtccagccaagaagtcgaggtagcgtatatctgtagtgagtctagttcccatgaggactatatcaggcagtttttgaatgccgggaagcatgtgctggtggagtaccctatgactctatcccttgccgcggcacaggagctttgggagctcgcggagcagaaaggaaaagtgctgcacgaagagcatgtcgaactgctgatggaggagttcgcctttttaaagaaagaagtcgtcggtaaggacttgttaaaaggctctctgctgtttaccgccggaccactcgaagaggagaggtttgggtttcccgctttttctggcatatcccgactcacatggttggtttctctctttggggagctcagcctagtttctgcaactttggaggagcggaaggaagatcaatacatgaagatgaccgtctgcctggaaacggagaagaaaagtccgctctcctggatcgaggaaaaaggacccggcctaaaaaggaaccggtatctctcattccattttaaatccggctccctagagaacgttcccaacgtgggtgtgaacaagaatatcttccttaaggaccaaaatatctttgtccagaagctgctcggacagttcagcgagaaggagctggccgctgagaaaaaaaggatcctccattgtctcgggctggcggaggagatccagaaatattgttgctcccggaaatag

SEQ ID NO: 180602 - DNA, 891 bp, synthetic construct
  misc_feature 1..891: note = Description of Artificial Sequence: Synthetic coding sequence
  source 1..891: mol_type = other DNA
atgaacgccgagcccgagcggaagttcggcgtggtggtggtgggcgtgggtagagccggctcagtgcgaatgcgggatctgcgtaatccccaccccagcagcgcattcctcaacctgatcggctttgtctcccggcgcgagctcggaagtatcgatggcgtacagcaaattagcttagaggacgcattatcctcgcaggaggtcgaggttgcctacatctgcagtgagtcttcatcccacgaggattatatcaggcaatttcttaatgcggggaaacatgtcctcgttgagtaccctatgactctcagtttggcagcggcccaggagctgtgggagttggccgagcagaaagggaaggtgttgcacgaggagcatgtggagctattgatggaagagttcgccttcctgaagaaggaagtggtcggaaaagatctgctcaaggggtctctgctgtttaccgcaggcccgcttgaggaggaacgttttggttttcccgccttttccggtatctcaagacttacatggctggtgtccctgtttggtgagttgtcacttgttagcgccaccttagaagaaagaaaagaagaccaatatatgaagatgacggtctgtctagagaccgagaaaaagtctcctctttcttggatcgaagaaaaggggcccgggctcaagcgtaaccgctatctctctttccacttcaaaagcgggagcctggagaatgtgcccaacgtgggagtgaacaaaaatattttcttgaaagaccagaatattttcgtgcagaaacttctgggccagttttcagagaaagaattggccgctgagaagaaaaggattctgcattgcttgggactggccgaagagattcagaagtattgctgctcccggaagtag

SEQ ID NO: 180603 - DNA, 309 bp, synthetic construct
  misc_feature 1..309: note = Description of Artificial Sequence: Synthetic coding sequence
  source 1..309: mol_type = other DNA
atgaacgccgagcccgagcggaagttcggcgtggtggtggtgggcgtaggacgcgctgggtctgtgcgcatgcgtgatttgcgaaacccacatccttccagtgccttcctcaatctcatcggctttgtctctcggcgcgaactcggaagcattgacggcgtgcagcagatttcactcgaagatgccctctcttcccaggaggttgaggtggcttatatctgctctgagtcatcaagtcacgaggactatatcagacaatttttgaatgccggcaagcatgtgttagtcgagtaccccatgacactctag

SEQ ID NO: 180604 - DNA, 621 bp, synthetic construct
  misc_feature 1..621: note = Description of Artificial Sequence: Synthetic coding sequence
  source 1..621: mol_type = other DNA
atggccgtgaagaagatcgccatcttcggcgccaccggccagaccgggctcaccactttggcccaggcagttcaggcaggctacgaagttaccgtgcttgttcgcgacagctccaggctcccctccgaggggccccgccccgcccatgttgtggtgggggacgtgctccaggcagctgacgttgacaaaaccgtggctgggcaagatgcagttatcgtgcttcttggcaccagaaacgacctttcaccgaccaccgtgatgtcggagggtgctaggaatatcgtagccgcaatgaaggctcacggtgtggacaaggttgtggcttgcaccagtgctttcttattgtgggacccgacgaaagtcccgcctaggctgcaggccgtgactgacgatcatatacggatgcacaaagtgttgcgggagtccggcctgaagtatgttgcagtcatgccccctcatatcggtgatcagccgctcaccggagcttatacggtgacactcgacggccggggaccaagtcgcgtgataagtaaacatgatctgggacatttcatgctacgttgtctgacaactgacgagtatgacggccatagcacctatccaagccaccagtatcaatag

SEQ ID NO: 180605 - DNA, 399 bp, synthetic construct
  misc_feature 1..399: note = Description of Artificial Sequence: Synthetic coding sequence
  source 1..399: mol_type = other DNA
atgggcagcctgatgctgctgttcgtggagaccacccggaacagcagcgcttgtatttttcctgtgatcctgaacgaactctcaagcaccgtggagacaatcacacattttccagaggtaactgatggtgagtgtgtatttccttttcattataagaacggcacttattatgattgtatcaaaagtaaagcccgacacaagtggtgtagcttgaacaagacgtacgagggctattggaagttttgcagtgccgaagacttcgcaaactgtgtcttccctttctggtatcgcaggcttatctattgggagtgcaccgacgatggagaggcgtttgggaaaaaatggtgtagcctgacaaaaaacttcaataaggatcgcatctggaagtactgcgagtag

SEQ ID NO: 180606 - DNA, 429 bp, synthetic construct
  misc_feature 1..429: note = Description of Artificial Sequence: Synthetic coding sequence
  source 1..429: mol_type = other DNA
atggccgccgccgccgagggcgtgctggccacccggagcgacgagccagcccgtgacgatgccgcagttgagactgccgaggaagctaaagaacctgccgaagctgatatcaccgaactgtgccgtgatatgttctctaaaatggccacctatctgaccggcgaactcactgcaacaagcgaagattacaaattgttggaaaacatgaacaaactcacttcccttaaatatctagaaatgaaagatatcgctattaacatctccaggaacttgaaggacctgaatcagaagtatgccggattgcaaccctatctggatcagatcaatgtaatcgaggaacaggtggccgcgttagagcaggcagcatataagctggatgcctatagtaaaaagttagaggccaagtataaaaaactagagaaacggtag

SEQ ID NO: 180607 - DNA, 225 bp, synthetic construct
  misc_feature 1..225: note = Description of Artificial Sequence: Synthetic coding sequence
  source 1..225: mol_type = other DNA
atgaacaagctgaccagcctgaagtacctggagatgaaggacatcgctattaacatttcaaggaatctcaaagatttgaatcagaagtatgccggccttcagccctatttagatcaaattaatgtaatagaggaacaggtggcagcgctggagcaagcagcttacaaattggacgcttacagcaagaagttagaggccaagtacaagaagctggagaaacgatag

SEQ ID NO: 180608 - DNA, 225 bp, synthetic construct
  misc_feature 1..225: note = Description of Artificial Sequence: Synthetic coding sequence
  source 1..225: mol_type = other DNA
atgaacaagctgaccagcctgaagtacctggagatgaaggacatcgcgatcaacatttcacgaaacctaaaagacctgaatcaaaagtatgctgggctgcagccctacctggatcagatcaacgttatcgaggagcaggtagcggctctggaacaagccgcctacaaactggacgcttattcgaagaaactagaggctaagtataaaaagcttgagaagaggtag

SEQ ID NO: 180609 - DNA, 300 bp, synthetic construct
  misc_feature 1..300: note = Description of Artificial Sequence: Synthetic coding sequence
  source 1..300: mol_type = other DNA
atgttcagcaagatggccacctacctgaccggcgagctgaccgccacaagcgaagactacaaactgctcgagaacatgaacaaacttacaagtctcaagtacctggagatgaaagatatagctataaacatttccagaaatctgaaggatctgaaccagaaatacgcaggcctgcagccctacctggatcagatcaacgttatagaagaacaggtcgccgccttggaacaggctgcctacaaactggatgcctacagtaagaagctggaggccaagtataaaaagttggagaaacggtag

SEQ ID NO: 180610 - DNA, 609 bp, synthetic construct
  misc_feature 1..609: note = Description of Artificial Sequence: Synthetic coding sequence
  source 1..609: mol_type = other DNA
atggccagccagggccggcggcggcggcccctgcggcggcccgagaccgtcgtgcccggtgaagctaccgagaccgacagcgaacgttccgcctcaagcagtgaggaagaggaactgtatcttggcccttccggaccaactaggggccgccccacaggcctcagagttgcaggggaggcggcggagacagactccgaaccagagcccgaacccgagcctactgccgccccacgggatctcccgccacttgtggttcaacgcgaatctgctgaagaggcatgggggacagaggaagcgccagcccctgcacccgcacggtctcttctgcagctccggcttgctgaaagccaggcaaggcttgaccacgatgtggctgccgctgtcagcggcgtttatcggcgggcgggacgcgatgtagcagcacttgccagcagacttgcggccgcacaggcagcggggctggcggcagcacactccgtgcgtctggccaggggggacctgtgcgcgttggccgaacggttagacatagttgctggttgtcggttactgcctgatatccggggcgtccccggtaccgagccggaaaaagatccaggcccccgcgcctag

SEQ ID NO: 180611 - DNA, 1632 bp, synthetic construct
  misc_feature 1..1632: note = Description of Artificial Sequence: Synthetic coding sequence
  source 1..1632: mol_type = other DNA
atggcccacgcccacatccagggcggccggcgggccaagagccggtttgttgtgtgcattatgtcaggggcacggtctaaactggctctctttctgtgcgggtgctacgtggtggcattaggcgcacatactggggaggaatcagtggctgaccaccacgaagctgaatactacgtggcagcagtgtatgagcacccgagcattctgtcattgaatcctctcgccttgatctcacgacaggaagccctggaacttatgaaccaaaatctggatatctacgagcaacaggtgatgacagccgcccagaaagatgtgcagatcatcgtattccccgaggacggcattcatgggttcaactttaccagaaccagtatctacccttttttagactttatgccatccccccaggtagtcagatggaacccctgccttgaaccacacagatttaacgatacggaggtcctccagcgcctgtcctgcatggctattaggggggatatgttcttggttgcgaatctcggcacgaaggagccctgccacagctctgatccaagatgccccaaggacgggcgatatcagtttaacaccaatgtcgttttttctaataacggtacattggtggatcgatatcgaaaacacaatttgtactttgaggccgccttcgacgtgcccctgaaagtggatctaatcacctttgatacaccctttgctggtcgcttcggaatatttacatgttttgatatccttttttttgaccctgccatccgggttctgagagattacaaggtcaaacatgtggtctaccccacagcctggatgaatcagctgccgctgttagccgctattgaaatccagaaggcctttgcggtagccttcggaattaatgtgctggcagcgaatgtgcatcatccagtgctgggtatgaccggatcgggcatacacacgcctctggaatcgttctggtaccacgacatggagaacccaaagagtcacctgataatcgcccaggtcgctaaaaaccccgtgggattaatcggggccgagaacgccactggcgagacggatccttcacatagtaagtttttgaagattttatctggcgatccctactgcgagaaagatgcccaggaagttcactgcgatgaagcaaccaagtggaatgttaacgcaccccctaccttccactcagagatgatgtatgacaacttcaccctggtgcccgtgtggggcaaggagggatacctccatgtgtgttctaacggactgtgctgctacttgctgtacgaacgacctactctctccaaggagttgtacgcacttggggtttttgacggcctgcacacagtgcacggtacatactacatccaggtgtgtgctctggtccgatgtggagggcttgggtttgacacttgtgggcaggaaatcactgaggctaccgggatattcgagttccacctgtggggaaacttctccacaagttacatctttccactgttccttaccagcggcatgactttagaagtacccgatcaactaggctgggaaaatgatcattacttcctgagaaaatcaagattgtctagcgggcttgtgactgctgccctgtacggccggctgtacgagcgagactag

SEQ ID NO: 180612 - DNA, 1572 bp, synthetic construct
  misc_feature 1..1572: note = Description of Artificial Sequence: Synthetic coding sequence
  source 1..1572: mol_type = other DNA
atgagcggcgcccggagcaagctggccctgttcctgtgcggctgctatgtggttgctctaggggctcacaccggggaggagtccgtcgccgaccaccacgaggccgaatattacgttgcagctgtgtatgagcacccctccatcctgagcctgaacccattggcgcttatctcacggcaagaagccttggagctcatgaatcagaatctggacatatatgagcagcaggtcatgacggctgcccagaaagacgtgcagatcattgtgttcccagaagacggaattcacggctttaacttcactcgaacttcgatctacccttttctggattttatgccatctccacaagttgtgagatggaacccttgtctagagcctcacaggtttaacgacacagaagtgctgcagaggctttcctgtatggcgatacgtggcgatatgttcctcgtggcgaatttagggacaaaggaaccatgtcactcgagcgatccccgatgccctaaggacggcagatatcaatttaatacaaatgtggtcttcagcaataatggaaccctcgtagatagatatcggaagcataacctgtacttcgaggcagcattcgacgtaccactgaaggtggatttaatcacgtttgataccccatttgcaggacgctttggtatcttcacttgttttgatattctgttttttgaccccgccatcagggtgttgcgggactataaagtgaagcatgtcgtgtaccccaccgcctggatgaaccagcttcccctgctggccgccattgagatccagaaggccttcgctgtcgcgttcggtattaatgttctcgcggctaacgtccaccatcctgtgctcggtatgaccggaagtggaattcatacgcctctagagtccttctggtatcacgacatggagaatcctaagtcgcacctgatcattgcgcaggtggcgaagaatccggtgggtctcataggggctgagaacgctactggggaaactgaccctagtcactctaagtttctgaaaatcctgagcggagatccatactgtgaaaaggatgcccaagaggtacattgcgacgaagccacaaaatggaatgtgaacgcccctcccacattccattctgaaatgatgtacgacaatttcaccctagtaccagtgtggggaaaagagggctacctccacgtttgtagtaatggactgtgttgttacctgctttatgaacgaccgacgttgtctaaggagctttacgctctaggtgtctttgatggactgcacacagttcacggcacctattatatacaagtctgtgcactggtaaggtgcggcggcttaggcttcgacacgtgcgggcaggaaattacagaagccactggtatcttcgaattccatctgtggggaaatttttcaactagctatattttcccacttttcctgacgtctgggatgacccttgaagtgcctgatcaactgggctgggagaacgatcactatttccttcgcaagtccagactgagcagtgggcttgtgacagctgctctgtacggacggctttatgagagggattag

SEQ ID NO: 180613 - DNA, 1638 bp, synthetic construct
  misc_feature 1..1638: note = Description of Artificial Sequence: Synthetic coding sequence
  source 1..1638: mol_type = other DNA
atggcccggaaggagacccagctgatcatcaagatgaaccacctggccagattcgtggtctgcattatgtcaggggctcgctctaagctggcactattcctgtgtgggtgttatgtggtggctctcggggctcacacgggagaagagagtgttgcggaccaccatgaggcggaatattacgtggcagccgtctatgaacaccccagtattctgagtcttaatcccctggcactgatctcccgccaggaggcactcgaactgatgaatcagaatttagacatctatgagcagcaggtgatgaccgctgcccagaaagatgtgcagattatcgtgtttcccgaggacggaatccatggattcaatttcacaaggactagcatctaccccttccttgatttcatgccctctccgcaagtggtgaggtggaatccctgcttagaaccacatagatttaacgatacggaggtcctgcagagattatcttgtatggccatccgcggggatatgttcttggtggcaaatctgggcaccaaggagccatgtcacagcagtgatcccaggtgtcccaaagacgggcggtaccagttcaacactaatgtggttttttcaaacaatggaacactcgttgacaggtaccggaagcacaacctgtactttgaggcagctttcgacgttccactgaaggttgatttgatcacctttgacactccctttgctggccgatttggcatttttacatgctttgatatcctcttttttgatccagccatccgggtgttaagggattataaagtcaagcacgtcgtgtacccaactgcatggatgaaccagctgccgcttttggctgccatcgaaatccagaaggctttcgcagtggcatttgggataaatgttctggcagccaatgtgcatcatcccgtgctgggaatgaccggaagcgggattcataccccactggagtctttctggtatcatgatatggaaaatcccaagtctcatctgatcatcgctcaggtggcaaaaaatccagtgggcctcatcggcgctgaaaacgccaccggcgagacagacccctctcatagtaagtttctaaagatcctctctggcgatccttactgtgagaaagacgcccaggaggtgcactgtgacgaggccaccaagtggaacgtgaacgccccacctacatttcatagtgaaatgatgtatgacaactttaccttagtacccgtctggggaaaagagggatatctccacgtatgctccaacggattgtgttgttatctgctgtatgagcggccaactctgtcaaaagaactgtacgcattgggggtctttgacggtcttcacacagtgcacggcacatattacattcaggtatgcgctctcgtccggtgtggcgggctgggcttcgatacttgcggacaagagatcaccgaggccaccgggatcttcgagttccatctctggggcaatttctcaacatcctacatctttcccctttttctcaccagtggaatgacgttagaagtgcctgatcagctggggtgggagaatgatcattatttcctgcgtaaatcacgcttaagcagtggcctcgtgactgccgccttgtacggacgactgtatgagcgggactag

SEQ ID NO: 180614 - DNA, 1638 bp, synthetic construct
  misc_feature 1..1638: note = Description of Artificial Sequence: Synthetic coding sequence
  source 1..1638: mol_type = other DNA
atgcccgagggcggcggcaccagccggcggctgctgcccatgcagagcagattcgtcgtatgcattatgtcaggcgctcgcagtaagctggccctctttttgtgcggatgctacgtcgttgctctgggcgcacacactggcgaggaatctgtggcggaccatcatgaggctgaatactacgttgccgcggtgtatgaacacccatcaattctgagtttgaatcccctggctctgataagtcgccaggaggcgcttgaacttatgaatcagaatctggatatctatgagcagcaagtgatgactgcagcacaaaaggatgtgcagatcatcgttttccccgaggatggcatccacgggttcaactttacccgaacaagtatctacccatttcttgacttcatgcccagcccccaagtggtcagatggaatccatgtctggagccacatagatttaacgacaccgaagtgctccaacgactgtcgtgtatggccatacgcggcgacatgttcctggtggcgaatctgggcacgaaggagccttgccacagtagcgacccccgttgccctaaagacggtaggtatcaattcaacaccaacgtagtattcagtaacaacggaactttggtggaccgatatcgtaaacacaacctctacttcgaagccgcattcgacgtgccacttaaggttgacctgatcactttcgataccccctttgcaggacgattcggtatctttacttgttttgacatcctgtttttcgacccagccattcgtgtcctgagggattataaggttaagcatgtggtgtaccccacagcttggatgaatcagctgccactccttgctgccatcgaaatccagaaggctttcgcggtcgcctttggaatcaacgtactggcggccaatgttcatcaccccgtcttaggtatgactggcagcgggattcacacgccacttgaaagcttctggtaccacgacatggaaaatcctaagtcccatttgattatagcccaagtggcaaaaaatcctgtcggcctaattggggccgaaaatgcgaccggagagacagatccttcccattccaagtttctgaaaattctgtccggagatccttactgcgaaaaagatgcacaggaagtgcactgcgatgaagccacgaaatggaatgtgaatgccccccccacctttcattccgaaatgatgtatgataattttactttagtgcccgtctgggggaaggaggggtatctgcatgtgtgcagcaacgggctatgctgctatttgttatatgagaggcctaccctgtccaaggaactctatgccctgggtgtgttcgatggtctgcacacagtacatggaacctattacatccaagtttgcgctttagtgaggtgcggtggcctcggcttcgatacttgcggtcaggaaatcaccgaagctaccggaatctttgaatttcatttatggggcaacttcagcaccagctatatctttcccctctttctgaccagcggcatgactcttgaggtgcctgatcagctgggctgggaaaatgatcattatttcctgcgtaagagccggctgtcctcaggcctggtcacggcagccctgtacggccggctttacgagagagattag

SEQ ID NO: 180615 - DNA, 585 bp, synthetic construct
  misc_feature 1..585: note = Description of Artificial Sequence: Synthetic coding sequence
  source 1..585: mol_type = other DNA
atgccccggaacctgctgtacagcctgctgagcagccacctgagccctcacttcagtacgagcgtgacctcggccaaggttgctgttaacggggttcaactgcattaccagcagacaggcgaaggtgaccatgccgtgctcctgctaccaggcatgctgggaagcggcgagaccgattttggcccgcagttaaaaaacctcaataaaaagctgtttacggttgtggcctgggaccctcgagggtatgggcattccaggccacccgatagagatttccccgctgattttttcgagagagacgcgaaagatgctgtggacctgatgaaggccctgaagttcaaaaaggttagcctgctgggctggtcagacggcgggataaccgcgctcatcgccgccgcgaagtacccttcctatatacataaaatggtaatctggggagcaaatgcctatgtgacagacgaagatagtatgatttacgaaggcattcgcgacgtgtccaagtggtctgaaagaactaggaaacctctggaggcactgtacggctggagtctgaccctgtctccaggctggaacgctatggcctag

SEQ ID NO: 180616 - DNA, 825 bp, synthetic construct
  misc_feature 1..825: note = Description of Artificial Sequence: Synthetic coding sequence
  source 1..825: mol_type = other DNA
atgccccggaacctgctgtacagcctgctgagcagccacctgagccctcacttttccacatccgtgacttctgccaaagtcgcggtgaacggcgtccagttgcactaccagcagactggcgaaggcgaccacgctgtactgctcctcccaggcatgctaggcagcggcgaaacagatttcggcccgcagctaaaaaacctgaacaaaaaactattcacggttgtggcctgggacccccggggttatggccatagccggcctcccgaccgagactttcctgcagacttttttgaaagagacgccaaagatgcggttgatctgatgaaggcattaaagttcaagaaggtcagcttgctgggatggtccgacggtggaatcacggccctgattgccgctgctaagtaccccagctacattcataaaatggtcatatggggtgcaaatgcctacgttacagacgaggactctatgatctacgagggaattcgcgatgtgtccaagtggtccgaacgcaccagaaaaccacttgaggcgctttatggatatgactactttgccaggacatgcgagaaatgggtggatggcatcaggcaattcaaacacctgcctgatgggaacatttgtcgccacctgcttccgagagtccagtgccccgctttgattgtgcatggcgaaaaggacccattggtgcccagatttcacgccgacttcatacacaagcatgtgaagggctctagactgcacctgatgccagaaggaaagcataatctgcatctgagatttgcagatgagttcaataaactggccgaagatttccttcagtag

SEQ ID NO: 180617 - DNA, 876 bp, synthetic construct
  misc_feature 1..876: note = Description of Artificial Sequence: Synthetic coding sequence
  source 1..876: mol_type = other DNA
atggtggccgtgctgggcggccggggcgtgctgcggctgcggctgctcctgtctgccctgaagccgggaatccatgtgcccagggccggtccagcagctgctttcggaacatccgtgactagcgcaaaggtggccgtaaacggggtgcagttgcactaccagcagacaggtgaaggcgaccatgccgttctgctgttgccaggaatgctggggtcaggcgaaacagacttcgggccacaactgaagaacttgaacaagaaactgtttaccgtggtcgcctgggaccctcgcggctatggacacagtcggcccccagatcgggattttcctgccgacttctttgagagggacgctaaggacgctgtcgatctgatgaaagctctcaaattcaagaaagtgtccctgctgggatggtccgacggtggaataactgcactgattgccgccgccaaatacccctcctatattcacaagatggtaatttggggagccaacgcgtacgtgaccgatgaggatagcatgatttatgagggaatccgcgacgtaagcaaatggagcgaacgaacaaggaaaccactggaagctttatatggttatgactacttcgctaggacctgcgagaagtgggtggacggcattaggcaattcaagcacctccccgacgggaatatatgcagacatctgctgccgagagtgcagtgcccagcattgatagtgcacggcgagaaagatcctctcgtgccccgcttccacgccgattttatccacaaacacgttaaggggtctcgactgcaccttatgccagaaggaaagcataacctgcacctgcgcttcgccgatgagttcaacaaattggccgaggacttccttcaatag

SEQ ID NO: 180618 - DNA, 264 bp, synthetic construct
  misc_feature 1..264: note = Description of Artificial Sequence: Synthetic coding sequence
  source 1..264: mol_type = other DNA
atgtactgcctgcagtggctgctgcccgtgctgctgatccccaagccactgaatccagcactgtggttcagccattcaatgtttatggggttctatcttctgtcctttctgctggaacgcaagccttgcactatttgcgcactggtttttctggcggcactgtttttaatctgttattcttgttgggggaattgtttcctttaccattgttccgattctcccctacctgagtccgcccatgaccctggtgtcgtaggcacctag

SEQ ID NO: 180619 - DNA, 264 bp, synthetic construct
  misc_feature 1..264: note = Description of Artificial Sequence: Synthetic coding sequence
  source 1..264: mol_type = other DNA
atgtactgcctgcagtggctgctgcccgtgctgctgatccccaagcctctgaatccagcgctgtggttctctcacagtatgttcatgggcttctatctgctttccttcctcctcgagcgtaagccctgtaccatctgcgcactcgtgtttctggctgccctcttcctgatatgctactcttgttggggcaactgctttctgtaccactgctcagactcaccccttccggaatcagctcacgatccaggagttgttggtacttag

SEQ ID NO: 180620 - DNA, 264 bp, synthetic construct
  misc_feature 1..264: note = Description of Artificial Sequence: Synthetic coding sequence
  source 1..264: mol_type = other DNA
atgtactgcctgcagtggctgctgcccgtgctgctgatccccaagcccctcaatcccgccctgtggttctcacattccatgtttatgggtttttatctgctgagtttcctcctggagaggaaaccctgcacaatatgcgcgctggtcttcctcgccgcactatttcttatctgttactcatgttggggcaactgtttcctttaccattgtagcgatagccccttgcccgaatctgcccatgatcccggagtggttggcacctag

SEQ ID NO: 180621 - DNA, 264 bp, synthetic construct
  misc_feature 1..264: note = Description of Artificial Sequence: Synthetic coding sequence
  source 1..264: mol_type = other DNA
atgtactgcctgcagtggctgctgcccgtgctgctgatccccaagccattgaatcccgcgctgtggttcagccacagcatgttcatgggcttctacctgctcagctttctgctggagcgcaaaccttgtaccatttgtgcattggttttccttgctgcgctgttcctgatctgttattcctgctggggaaattgcttcttatatcattgctctgattccccacttccggaatccgcccacgaccccggcgtagtggggacttag

SEQ ID NO: 180622 - DNA, 264 bp, synthetic construct
  misc_feature 1..264: note = Description of Artificial Sequence: Synthetic coding sequence
  source 1..264: mol_type = other DNA
atgtactgcctgcagtggctgctgcccgtgctgctgatccccaagcctttgaacccggcactatggttttcccatagcatgttcatgggtttctatctgttgagcttccttcttgagcggaaaccctgtactatctgcgctttggtgttcttggcagctttgttccttatttgttattcatgttgggggaattgctttctgtaccactgcagcgatagccccctccccgaatccgctcacgatcctggcgtagtggggacatag

SEQ ID NO: 180623 - DNA, 189 bp, synthetic construct
  misc_feature 1..189: note = Description of Artificial Sequence: Synthetic coding sequence
  source 1..189: mol_type = other DNA
atgtactgcctgcagtggctgctgcccgtgctgctgatccccaagcccctgaaccccgccttatggttctcacatagcatgttcatgggtttttacttgcttagtttcctgttagaaagaaaaccatgtactatatgtgctttagtatttttggccgccctctttctgatctgctattcttgctggtag

SEQ ID NO: 180624 - DNA, 264 bp, synthetic construct
  misc_feature 1..264: note = Description of Artificial Sequence: Synthetic coding sequence
  source 1..264: mol_type = other DNA
atgtactgcctgcagtggctgctgcccgtgctgctgatccccaagcctctcaaccccgccctgtggttttcacactcgatgtttatggggttctacctgctgagtttccttctcgagaggaaaccttgtacaatttgcgcccttgtatttctggctgccctgtttctcatttgctattcatgctggggaaattgcttcctctatcattgttccgactctccgttgccagaatcagcccatgaccccggtgttgttggaacttag

SEQ ID NO: 180625 - DNA, 264 bp, synthetic construct
  misc_feature 1..264: note = Description of Artificial Sequence: Synthetic coding sequence
  source 1..264: mol_type = other DNA
atgtactgcctgcagtggctgctgcccgtgctgctgatccccaagcctcttaatcctgccttgtggttcagccatagcatgtttatgggtttctacttactcagctttctgctggaacgaaagccctgtaccatctgtgccttggtattcttagctgctttatttctcatctgttactcatgctggggcaactgttttttgtatcactgtagcgattctcccctgccggagtcagcccacgatcccggagtcgtgggtacctag

SEQ ID NO: 180626 - DNA, 237 bp, synthetic construct
  misc_feature 1..237: note = Description of Artificial Sequence: Synthetic coding sequence
  source 1..237: mol_type = other DNA
atgtactgcctgcagtggctgctgcccgtgctgctgatccccaagccactcaatcctgccctttggttctctcattcaatgttcatggggttctatctgttaagctttttgttagagcgaaaaccctgtacaatctgcgcgctcgtgttcctagcagctttgtttctgatctgttactcatgctggggaaattgtttcttatatcattgtagcgattcaccgttgccggagtcctag

SEQ ID NO: 180627 - DNA, 24 bp, synthetic construct
  misc_feature 1..24: note = Description of Artificial Sequence: Synthetic coding sequence
  source 1..24: mol_type = other DNA
atgtactgcctgcagtggctgtag

SEQ ID NO: 180628 - DNA, 1368 bp, synthetic construct
  misc_feature 1..1368: note = Description of Artificial Sequence: Synthetic coding sequence
  source 1..1368: mol_type = other DNA
atgagcagcagcggcctgaacagcgagaaggtggccgccctgatccaaaaactcaactccgatccacagttcgtgctcgcccaaaatgtgggcactacacacgacttacttgacatttgtctcaaacgtgcgacagtccagagggcccaacacgtttttcagcacgccgtgcctcaagagggcaagcctattaccaaccagaaatcttcaggccgatgctggattttctcctgtctgaacgtgatgagactcccattcatgaagaaactaaatattgaagagttcgaattttctcaaagctacctattcttctgggacaaagttgagcgatgttatttttttctgagcgctttcgttgacaccgcccagcgcaaagagcccgaggacggccgcctggtgcaatttctgttgatgaaccctgcaaatgacggcgggcaatgggacatgctagtgaacatcgtggaaaagtacggcgtcatcccaaagaagtgttttcccgagagttatactactgaagccactcggcggatgaacgacattttaaatcacaaaatgagggagttttgcattagactcaggaacctcgtgcactctggggccactaaaggtgaaatctcagcaacccaggatgtcatgatggaggagatcttccgtgtagtgtgtatctgtctggggaatcctcccgagacttttacctgggagtacagagacaaagataaaaactaccagaagataggacctattacacctttggagttctatcgcgagcatgtgaagccattatttaacatggaagacaagatttgcctggtgaatgacccaaggccccagcataagtataataagctttacacggtggagtacctgtctaacatggtcgggggacggaagaccctgtacaataatcagccaatagattttcttaagaagatggtcgccgcctcaataaaagacggcgaggccgtctggttcgggtgcgatgtgggtaagcatttcaacagtaagctgggcttgtccgatatgaatctatatgaccatgagctggtatttggggtctccctaaagaacatgaataaagccgaaagactaacattcggagaatcccttatgacccatgccatgacattcacagccgtaagcgaaaaagatgatcaggacggcgctttcacaaaatggcgagttgaaaatagttggggtgaggaccatgggcacaaggggtacctgtgcatgactgacgagtggtttagcgagtatgtctatgaagtggtggtggatcggaaacacgtacccgaagaagtgctggcagtcttagagcaggaacccattattctgccagcctgggaccccatgggggcgctggcagaatag

SEQ ID NO: 180629 - DNA, 1107 bp, synthetic construct
  misc_feature 1..1107: note = Description of Artificial Sequence: Synthetic coding sequence
  source 1..1107: mol_type = other DNA
atgtgcagcagcaccccctgcccccggcgggccagccagagccccacccgaagggcccaggttgagagatgctatttttttttatcagccttcgttgataccgcgcaaagaaaagagccagaggacggaagactggtccaattcttgctgatgaaccccgctaatgacgggggccaatgggatatgttggtaaatatagtcgaaaagtatggcgttattcccaaaaaatgttttccagagtcatacaccactgaggccacacggcggatgaacgacattctgaatcacaaaatgcgcgaattctgcataagactgagaaacctggtgcactccggcgccaccaagggggagattagtgctacacaggacgtgatgatggaggagatttttcgcgtcgtatgtatttgccttgggaatcctcctgaaactttcacatgggagtaccgagacaaagacaagaattatcagaaaataggccctatcactcccctggagttctatcgggagcacgtgaagcctcttttcaatatggaagacaagatctgcctggtgaatgatcccaggccacaacacaaatataacaagctttatacggttgaatatctctccaatatggtgggcgggcggaagactctgtacaacaaccagcctatcgacttcctaaagaagatggttgccgcttctatcaaggacggtgaagccgtctggttcggctgtgatgtaggtaaacattttaacagcaaattgggacttagcgatatgaatctgtatgatcacgagttggtgtttggcgtgagcctcaagaacatgaataaagcagaaagattgacattcggcgagtcccttatgactcatgcgatgaccttcactgctgtgtcggaaaaggatgatcaagatggtgccttcaccaagtggcgggtggaaaactcttggggtgaggatcacggccacaaaggatatctgtgcatgactgatgaatggtttagtgagtatgtgtacgaggttgtggtagataggaaacatgtgcccgaagaggttctggccgtgctcgaacaagagcctatcatccttccagcatgggaccccatgggagcactggccgaatag

SEQ ID NO: 180630 - DNA, 2241 bp, synthetic construct
  misc_feature 1..2241: note = Description of Artificial Sequence: Synthetic coding sequence
  source 1..2241: mol_type = other DNA
atggccggcagccggggcgccggccggaccgccgcccccagcgtgcgcccagaaaagaggcggtccgagccagagttggaacccgagcccgagcccgaaccacctctgctctgcacatccccactctcccatagcaccggatcagactccggtgtttcagatagtgaagagagcgtgtttagtggccttgaggactccggctccgatagctccgaagatgacgacgaaggagacgaggaaggggaagacggtgcactggacgatgagggccacagtgggatcaagaagacaacagaggagcaggtccaggcttcaacgccctgccctaggactgagatggcttcggcaaggattggtgacgaatacgcagaagactcaagcgatgaggaagacatacgtaatacagtgggtaacgttccgctcgaatggtatgatgactttccacacgtcgggtatgatttggatgggcgaaggatttataaacctctgcgcacccgggatgagttagaccagttcctagacaaaatggatgacccagactattggaggacagtgcaagatcctatgaccgggcgagacctgcggttaaccgacgagcaggtcgccttggtccggaggttacagtctggtcagtttggcgacgtcggattcaatccttacgaaccagctgtggatttcttctcaggagatgtgatgatccaccccgtgactaacaggcccgcagataagaggagtttcatcccctccttggtcgagaaggaaaaagtgtccaggatggtacatgccatcaagatgggctggattcagccgcggcgaccaagagatcccactccctcattctacgatctttgggcacaagaggaccccaacgcagtcctgggcaggcacaaaatgcacgtaccagctcctaagctggctcttccaggacatgctgagtcctataatccccctccagaatatctgctttctgaagaagagcgccttgcctgggaacaacaagaacctggtgagcgcaagctcagctttctaccacgaaaatttccgtctctgagagctgtgccagcctacggcagatttattcaggagagatttgagagatgcctcgacctgtatttatgcccgaggcagcggaagatgcgagttaatgtggaccctgaggacctaataccaaaacttccccggcccagggatctccagccctttcccacttgccaggccctggtctatcggggacactctgacctggtcaggtgcctgagtgtgagtcctggcggccaatggctagtcagcgggtcggatgacggttcactccgactatgggaggtagcaacggcccgctgcgtgcggacagtgcctgttgggggcgttgtaaagtcagttgcctggaatcctagcccagccgtgtgccttgtagcagcggccgtggaggacagcgttctcctgctcaaccctgccctgggcgatcgactcgtggccggctctaccgatcaactgctcagtgcttttgtccctccagaggaacctccactccagccggcgcgttggctagaggcttctgaggaggagcgccaagtgggcctacgcctgaggatctgtcatggcaagcctgtaacgcaggtgacatggcatgggcgcggggattaccttgcagtcgtcttagcgactcaaggccatacacaagtactgatccaccaactcagtaggcgccggagccagagcccttttaggaggtcccacggccaagtgcagagggtggcctttcaccctgcccgaccatttctgctggtggcttcacaaagatcagtcaggctctatcacctgctgagacaggagctcaccaagaaactgatgcctaactgtaagtgggttagctctttggcagtacacccagctggggataacgtgatatgcggcagctacgactcaaaacttgtgtggtttgacctcgacctctccaccaagccctaccggatgctccgtcaccacaagaaggctcttcgagcggtggcatttcatcccagatatcctctgtttgccagcggtagcgatgatgggtcggtgatcgtctgccatgggatggtttacaatgacctgctgcagaaccctttgctcgtaccggtgaaagtgttaaaagggcacgttctgactagagatttgggcgtgttggacgtgatcttccaccctacacagccttgggtttttagcagcggggctgacggcacggtccgcctgtttacttag

SEQ ID NO: 180631 - DNA, 1083 bp, synthetic construct
  misc_feature 1..1083: note = Description of Artificial Sequence: Synthetic coding sequence
  source 1..1083: mol_type = other DNA
atgaactacaccgagagcagccccctgcgggagagcaccgccatcgggtttactcctgaacttgaaagtattatccccgtgccatcaaataagacaacctgtgagaattggcgagaaattcaccatcttgtattccatgtggcgaatatttgcttcgctgtcggtctggtgatcccaactactctgcacctgcacatgatatttctgaggggcatgctgactctgggctgcactctgtacatcgtgtgggctactctctatcgttgtgcgctggatatcatgatctggaatagtgtgtttctgggcgtcaacattctgcatctgtcttatctactctataagaagcgacccgttaaaatagagaaggagctgtcaggcatgtatcggcgactgtttgagcctctgcgagtcccaccagatctgttccgaaggctgactggccagttttgcatgatccagactctgaagaaggggcagacatacgcggccgaggacaagacatccgtggatgatcgcctatctatcctcctgaagggcaaaatgaaggtgtcctatcgtggtcatttcctccacaacatttatccttgtgccttcattgatagcccagagttccgctctacccagatgcacaaaggcgagaaattccaagtaaccattatagcagatgataactgcagattcctctgttggagccgggaaaggttgacctacttccttgagagcgaacctttcctgtacgaaattttccggtacttgatcggaaaggacataacaaacaaactctatagtctcaatgacccaacccttaatgataagaaagccaagaaactggagcaccagctgtctttatgcacccagataagcatgctagaaatgaggaactccatcgccagttcttctgacagtgatgacggattgcaccagtttttacgggggacttcatcaatgtcatctctccacgtatcttccccccaccagagggcatccgcaaaaatgaaacctatagaggagggcgctgaggatgacgatgacgtgttcgaaccagcctctcccaataccctcaaggtccaccagctcccttag

SEQ ID NO: 180632 - DNA, 1083 bp, synthetic construct
  misc_feature 1..1083: note = Description of Artificial Sequence: Synthetic coding sequence
  source 1..1083: mol_type = other DNA
atgaactacaccgagagcagccccctgcgggagagcaccgccatcggctttactcctgagttagaatccattatcccagtgcccagtaataagaccacctgcgagaattggcgtgagatccatcatctggtcttccacgtagcgaatatttgttttgctgtggggttggtcattcccaccaccttgcatttgcacatgatcttcctaagggggatgttgactcttgggtgcacactctatattgtctgggctaccctgtaccgctgcgccctggatattatgatctggaacagtgtcttcttaggagttaacatccttcacctgtcatacctgttgtataagaaaaggcctgtcaaaattgagaaggagctgtccggaatgtataggcgactcttcgagcctctccgcgtgcctcctgatttgtttcgacgcctgacggggcagttctgtatgattcaaactctaaagaagggacagacatacgctgcagaggataaaacgtccgtggacgacaggctatccatactgcttaaaggaaagatgaaagtgtcatatcgtggtcattttcttcacaatatctatccttgtgcatttattgactcccctgaattcaggtccacccagatgcacaaaggcgaaaagttccaggttaccattattgctgatgacaattgtcgattcctgtgctggtcccgagaacggctgacatatttcttggagtccgagccgtttctatacgaaatattccgctacctaatagggaaggacataacaaataaactctactccctgaatgacccgacccttaacgataagaaggctaagaagctagagcaccaactgagcctgtgcactcaaatttcaatgttggagatgaggaactctattgcctcatcgtccgacagcgacgatgggttacatcaattcctgagagggacatcatccatgtcatcactgcacgtgagttctccccatcagcgcgcaagtgccaaaatgaaacccattgaagaaggggcagaagatgacgatgatgtgttcgaacctgcatctccgaacactcttaaggtgcaccagttaccctag

SEQ ID NO: 180633 - DNA, 1083 bp, synthetic construct
  misc_feature 1..1083: note = Description of Artificial Sequence: Synthetic coding sequence
  source 1..1083: mol_type = other DNA
atgaactacaccgagagcagccccctgcgggagagcaccgccatcggattcactccggagctggaatccatcatccctgtgcctagcaataagactacttgcgaaaactggagagaaatccatcacttggtgtttcacgtcgcaaacatttgcttcgccgttgggctcgtgataccaactacactgcacttacacatgatattcttgcgcgggatgctcacactgggttgtacgctttacatagtgtgggccaccctgtatcgatgtgcactggatattatgatctggaattccgtgttccttggtgtcaatatcctccacctttcctacctgttgtataagaagcggcccgtgaaaatcgagaaggaactgtcagggatgtatcgacggctctttgaacccttgcgggtacccccagatttgtttagacgcctaacaggacagttttgcatgatacagaccttaaaaaaagggcagacctatgccgctgaagacaaaacgagcgtcgacgatcggctgtcgatcctcctcaagggcaagatgaaggtctcttaccgggggcattttctccataacatttacccatgcgcctttatagattcccctgaattccggtccacacagatgcacaagggcgagaagtttcaggtgactataattgcagacgataactgccgcttcctttgctggagcagggaacgactgacctactttttagagagtgaacccttcctttacgaaatatttagatatctcattggaaaggacattaccaataagctgtattctcttaacgatccaacattgaatgataagaaagcaaaaaagctggagcaccagctctccctgtgcacacagattagcatgctggaaatgagaaattctatcgcatcctcatccgactcagatgatggactacaccaatttctcagaggaaccagctccatgtccagccttcacgtatccagcccacatcagcgggcaagtgctaagatgaagcctattgaggagggagcagaggacgacgatgatgtttttgaaccagcatccccaaatactctcaaagtccaccagctgccatag

SEQ ID NO: 180634 - DNA, 783 bp, synthetic construct
  misc_feature 1..783: note = Description of Artificial Sequence: Synthetic coding sequence
  source 1..783: mol_type = other DNA
atggaccggcacagcagctacatcttcatctggctgcagctggagttgtgcgccatggccgtgttactgacaaagggggaaatcagatgttattgcgacgccgcgcactgtgtagcaacaggctacatgtgtaagtccgagctttccgcatgttttagtagactgctcgacccacagaatagtaactcccctctgacacacgggtgcctagattcactggcctcgactacggatatctgtcaagctaagcaggccagaaatcattccggcacaacgatccctacacttgagtgctgccatgaagatatgtgtaactatcgcggattgcatgatgtgctgtctcccccccgcggcgaagccagcggccaaggcaaccgttaccagcacgatggctctcgcaaccttattacgaaagtacaggaactcaccagcagcaaagaactgtggtttcgagccgccgtgattgcagttcctatagcaggtggactaatattggttctgctgattatgttagcgctgaggatgctcagaagcgagaataaaagattgcaagatcagaggcagcagatgctgagcagactgcactattcattccatggccatcattcaaaaaagggtcaggtagctaagttggaccttgaatgtatggtgccagttagtgggcacgagaactgttgcctcacctgtgataagatgcgccaagccgacctgtccaatgacaagatcctatcccttgtgcactggggtatgtactcaggtcacgggaaacttgaatttgtttag

SEQ ID NO: 180635 - DNA, 744 bp, synthetic construct
  misc_feature 1..744: note = Description of Artificial Sequence: Synthetic coding sequence
  source 1..744: mol_type = other DNA
atggaccggcacagcagctacatcttcatctggctgcagctggagttgtgtgcgatggcagtactcctcacgaaaggggaaatccgctgctactgtgacgccgcacactgcgtggccaccggctatatgtgtaagagcgagctcagcgcatgcttttctcggttattagacccacagaatagtaattcacctcatatatgccaagctaagcaggcccgaaatcattcggggacaacgatccctactctagagtgctgccacgaagacatgtgtaactatcggggcctgcacgacgtgcttagccctcccaggggcgaggcaagcggccaggggaaccgatatcagcatgacgggagtcggaatctgataacaaaagtacaggagttaacatccagcaaagaactgtggttccgcgctgcggtgattgcggtgcctatagctgggggtctgatccttgtgctgcttatcatgctagcattacgtatgctgcgctccgaaaacaaacgcctccaagaccagcggcaacaaatgctgtcccgcctccattattcattccatgggcatcatagtaaaaagggccaagtggcgaagctggatcttgaatgcatggtgcctgtgtcaggtcacgaaaactgctgtctgacctgtgacaagatgaggcaggcagatctcagcaatgataagattctgtccctggttcattggggcatgtattctggccacggcaaactggaattcgtgtag

SEQ ID NO: 180636 - DNA, 2058 bp, synthetic construct
  misc_feature 1..2058: note = Description of Artificial Sequence: Synthetic coding sequence
  source 1..2058: mol_type = other DNA
atgctgtggttcagcggcgtgggcgccctggccgagcggtactgcaggagaagtcctgggatcacctgctgcgtgctcttgctcctaaattgctcaggcgtccctatgagcctcgcatcttcattcctaaccggaagcgtagccaagtgtgaaaatgagggtgaggtgctccaaataccatttattactgacaatccttgcataatgtgcgtgtgccttaacaaggaagtaacttgtaagcgggaaaagtgccccgtgttgtcacgcgattgtgcgcttgcaatcaagcagcgtggggcctgttgcgaacagtgcaaggggtgcacatacgaaggcaacacctacaattctagtttcaagtggcagagccctgcagagccttgtgtccttaggcagtgtcaggagggtgtggtgacagagtcaggcgtccgatgtgtggttcactgtaaaaatccgctcgagcacctgggcatgtgttgtcctacctgtccaggctgtgtgtttgagggagtgcagtatcaggagggcgaagaatttcaaccagaaggcagcaagtgtacgaaatgtagctgcaccggtgggcgcacccaatgcgtgcgggaggtatgccctattctgtcctgcccccagcatctgtcacatatccctccggggcagtgctgtcctaagtgtctgggtcagaggaaggtgttcgatttgccttttggaagttgcctctttaggtctgatgtctatgacaatgggtcttcctttttatacgataattgtactgcgtgtacatgccgagacagtacggtagtgtgcaagcgaaagtgcagtcacccaggtgggtgtgaccaggggcaggaggggtgttgtgaagagtgtctgttacgggtaccccccgaggatattaaggtctgtaagttcgggaacaagatcttccaggacggagaaatgtggtccagcataaactgcacaatatgcgcctgtgtgaagggccgtacggagtgcaggaataagcagtgcataccgatctcctcctgcccgcaaggcaagatcctgaacaggaaaggctgctgtcccatctgtacagagaaaccaggcgtctgtaccgtctttggggaccctcattataatacattcgacggccgcacctttaacttccagggtacctgtcagtatgtgctgaccaaagattgttccagtcctgcgagcccctttcaggtactcgtaaagaacgacgctagacgcaccagatcattctcttggaccaagagtgttgagctggtgttgggggaatccagagtgtctctgcaacaacatctgacagttcggtggaacggaagccggatcgcccttccatgccgggctccgcactttcacattgatcttgacgggtatttgcttaaagtgacgaccaaagccgggctggagataagttgggacggcgactcttttgtcgaggtgatggcagctccccatctgaaaggtaagctgtgcggactgtgcggtaactataacggccataagcgagacgatttaataggaggagatgggaattttaagttcgacgtcgacgactttgccgagtcatggcgcgtagagtcaaacgagttctgcaatcgcccccagcgaaaacccgtgccagagctttgtcaaggcaccgtcaaggtgaagttgagagcacatcgggaatgccagaagctgaaatcatgggaatttcagacgtgccacagcacagttgattatgctacgttttaccggagctgcgtcactgacatgtgcgagtgtcccgtgcacaagaactgctactgtgaatcgttcttggcgtacacaagagcgtgtcagcgcgagggaataaaggttcactgggaacctcaacaaaactgcgcagcaacgcagtgtaagcatggagcagtttacgacacatgcggccccgggtgtattaagacctgtgacaattggaacgagataggtccttgtaataaaccgtgcgtggcaggttgtcattgtccagcaaacctggttcttcataagggcagatgtattaaaccagtgttgtgtccccagcggtag

SEQ ID NO: 180637 - DNA, 2058 bp, synthetic construct
  misc_feature 1..2058: note = Description of Artificial Sequence: Synthetic coding sequence
  source 1..2058: mol_type = other DNA
atgctgtggttcagcggcgtgggcgccctggccgagcggtactgccgccggtctccaggcattacatgttgcgtgctgctgcttctgaattgttccggcgtgccaatgagcctggcctcatcattcctgacagggagtgtggctaaatgtgaaaacgagggggaggtactgcaaataccctttattacagataatccctgtatcatgtgtgtgtgtctgaacaaggaagtcacatgcaagcgcgaaaaatgtcccgttctgagccgcgactgtgccttggccattaaacagcgaggggcctgctgtgagcagtgcaagggctgcacctacgagggaaatacttacaacagttcattcaagtggcagagccctgccgagccatgtgttctgcgccagtgtcaggagggggtggttaccgagagcggggtgcgctgtgttgtacactgtaagaatccactcgagcacttgggtatgtgctgccctacttgccctggatgtgtcttcgagggagtgcagtaccaggaaggcgaagagtttcaacccgagggatccaagtgcacaaaatgctcgtgtactggggggcggacgcagtgtgtgcgcgaagtctgcccgattctgtcctgcccccagcacttaagtcacatcccccccggccaatgttgtccaaaatgtctcggacaaagaaaagttttcgatctcccattcggctcctgcctttttcgttcagacgtctatgacaatggctcttccttcctgtacgacaactgtacagcttgtacttgtcgagatagcacagtcgtgtgtaagagaaagtgcagccatccaggagggtgcgaccaaggacaggagggatgctgtgaagaatgtctgctgcgagttcctcctgaagacattaaggtttgcaagttcggtaacaaaattttccaagacggcgagatgtggagtagtattaactgcaccatctgtgcctgcgtaaaggggcggacagaatgccgaaacaagcagtgtattcccatcagttcatgcccacagggaaagattcttaatcggaaaggatgctgtccaatctgtacggaaaagcccggggtctgtacggtatttggtgatccccactataataccttcgacgggcgcactttcaattttcagggaacgtgccaatacgtccttaccaaggattgttctagccccgcttcaccattccaagtccttgtcaaaaacgatgctagacgcacccgcagtttctcttggaccaagtctgtcgaactagtgctgggggagagcagagtgtctctacagcagcacctgacggtgcgatggaacggctcccggatagctctcccctgtagggcgccccacttccatatcgacctcgatggatatctcctcaaagtaacaaccaaggccggccttgagatcagctgggacggcgatagctttgtcgaagtaatggccgctccacatcttaaggggaaactttgcgggctttgcggcaattataatggacataagcgggacgacctcatagggggcgatggcaattttaaatttgacgtcgatgactttgctgagagctggcgtgtggaaagcaacgaattttgcaatagaccacagcgcaagcccgttcctgagctctgccaaggcaccgtgaaagtcaaactgagagcccatcgcgagtgccagaaattgaagtcatgggaattccagacctgtcattcaactgtggactatgcgaccttctaccgatcttgtgtgaccgacatgtgtgagtgcccggtacacaagaattgttactgcgagagctttctggcctatacgagggcgtgccagagggaaggcataaaagtacattgggagccacagcagaattgtgccgcgacacaatgcaaacacggcgccgtgtacgatacgtgcggacccggatgcatcaaaacctgcgataactggaatgaaattggcccatgcaacaagccctgtgtcgccgggtgccactgccctgcaaatctcgtgctgcataaagggcgttgcataaagcctgtcctgtgcccacagcggtag

SEQ ID NO: 180638 - DNA, 2028 bp, synthetic construct
  misc_feature 1..2028: note = Description of Artificial Sequence: Synthetic coding sequence
  source 1..2028: mol_type = other DNA
atggacaccaagagcatcctggaggagctgctgctgaagcggagccaacaaaagaagaaaatgtcccccaataactataaagagcgactattcgtgttgacaaaaacgaatctgtcatattacgagtacgacaagatgaagaggggatcccggaagggtagcatcgagattaaaaagatccggtgcgtggagaaggttaatttggaggagcagacacctgttgagaggcagtacccctttcagattgtgtacaaggatgggctactttacgtctatgcttccaacgaagaatctagatctcagtggcttaaagccctgcagaaggagataagagggaacccacatctccttgttaagtaccattccggatttttcgtggacggcaaatttttatgctgccagcaaagttgtaaagctgctccaggatgtactctttgggaagcatacgcgaatcttcatacagccgtgaatgaagaaaaacaccgtgtccctacattccctgatagagtattgaaaatcccaagggcagtacccgtgcttaagatggatgctccgtcctccagtaccacgctagcacagtacgataatgagagcaagaagaactatggctcacaacctccctcatcatcaacctccttggcacagtatgactctaactcaaaaaaaatttacgggtctcagcccaatttcaatatgcagtatataccgagggaggattttccagattggtggcaagtgcgcaagctgaagagcagtagctcgtctgaagatgtggcttcctcaaatcagaaagagcggaacgtaaaccataccaccagcaaaattagctgggaattccccgaatcaagcagttcagaggaggaggaaaatttagacgattacgattggttcgccggcaatatttccagatcccagagcgagcagttgctaaggcaaaaaggaaaggagggtgcctttatggttaggaactccagccaagtcggtatgtacactgtttcactgttttccaaggccgtgaacgataaaaagggcacagtgaagcattaccatgtccacactaacgccgaaaataagttgtatctggcagaaaattactgcttcgatagtattcctaagctaatccactaccatcagcataactcagctggaatgattacacggctgagacatccagtgtctacgaaggccaacaaggtacctgactccgtctcactcggaaatggcatctgggaactgaaacgagaggagatcaccctgttaaaagaattgggctctggtcagttcggggttgtccaactggggaagtggaagggccagtacgacgtggctgtcaaaatgatcaaggagggaagcatgtcggaggatgaattcttccaggaggctcagacaatgatgaaattgtcccacccaaagttggtgaagttctatggggtctgcagtaaagagtacccaatttacatcgtgacagaatatattagtaatggatgcctgctcaactatttaaggtcacatggcaaaggcctggagccttcccaacttttggagatgtgctacgatgtgtgtgaggggatggcctttctggagtcacatcagtttattcatcgcgatctggcagctagaaattgtctagtcgatcgggatctgtgcgtaaaagtgtccgatttcgggatgacgcggtacgtcctcgacgatcagtatgttagcagcgtggggacgaaatttcccgtaaagtggagcgccccagaggtgtttcattactttaaatattcaagcaaatcggatgtgtgggcctttgggatcctaatgtgggaagtattcagcctaggaaagcagccctacgacctatacgataattctcaggtggtactcaaggtcagccaggggcaccggctttacaggccacacctggcaagcgacactatttaccagattatgtactcatgttggcatgaactgcccgagaagagaccaacctttcagcagctcctaagcagtatcgagcctctgagggaaaaggacaagcattag

SEQ ID NO: 180639 - DNA, 2028 bp, synthetic construct
  misc_feature 1..2028: note = Description of Artificial Sequence: Synthetic coding sequence
  source 1..2028: mol_type = other DNA
atggacaccaagagcatcctggaggagctgctgctgaagcggagccagcagaagaaaaaaatgagcccaaacaactacaaggagcggctttttgtcctcactaaaactaacctgagctattatgaatatgacaagatgaagaggggaagtagaaagggttctatcgaaattaaaaaaattagatgcgtcgaaaaagtgaatctggaggaacagactccggtggagagacaatatccattccagatcgtatacaaagacggcctcttatatgtttatgcctcaaacgaagagtcccggagccagtggctgaaggcacttcaaaaagagatcaggggtaatccacatctgctggtgaaataccatagtggcttctttgttgacggaaaattcctctgctgccagcagtcttgcaaggctgccccagggtgcacactgtgggaagcttatgccaaccttcataccgctgtgaacgaggaaaagcaccgggtgcctacattcccagacagggtgctgaagattccacgcgccgtcccagtactgaagatggacgcaccttcatcgtccaccacactggcacaatacgacaatgaatccaaaaagaactacggttcacagcccccaagttccagcacctccctggctcagtatgattccaattctaaaaagatctatggttcccagcctaattttaacatgcagtatattccgcgggaggattttcctgattggtggcaagttagaaaactcaagtcttcttcctccagcgaagatgtggcgtccagtaatcaaaaggaaaggaatgtgaaccataccacttcaaagattagctgggagttcccagagagcagttccagtgaggaggaggagaacttggatgactacgattggttcgccgggaacatatcaaggtctcagtctgagcagcttttgaggcagaagggtaaagaaggagccttcatggtccggaatagttcccaggtcggaatgtacaccgtttctcttttcagcaaggcagtcaatgataagaagggtaccgttaagcactaccacgttcatactaacgccgagaataaactgtatttagcagagaattactgtttcgacagtattccgaagcttatccattatcatcagcacaattcagcaggcatgatcacacggctccgccaccccgtctccacgaaagccaacaaggtgccagatagtgtctctctgggtaacggaatatgggagctgaagagagaggaaatcactttattgaaagagcttggctctggccaatttggagtggtccagctggggaagtggaaagggcaatacgatgtcgccgttaagatgatcaaggaaggatctatgagcgaagacgagttcttccaagaggcacagactatgatgaagctgtctcacccaaaattggtgaagttttacggcgtgtgtagcaaggagtaccccatctatatcgttactgagtatatttctaacggctgcctgctgaactatctgcgaagtcatggcaaaggcctcgaaccatctcagctactcgaaatgtgttatgatgtctgcgaagggatggcatttctggagagtcatcagtttatacatcgagatctggcggcccgcaattgcctggtcgatcgggatctgtgtgtcaaggtgtcagatttcggcatgacccgctacgttctggacgatcagtacgtcagctccgtgggaactaagtttccggtgaaatggagtgcccctgaggtcttccactatttcaaatacagtagtaaaagcgacgtgtgggccttcggcattctgatgtgggaagtgttcagccttggcaagcaaccttacgacctgtatgacaactctcaggtcgtgctgaaagtgtcccaagggcatagactgtataggcctcatctcgctagtgatactatctaccaaattatgtatagctgttggcacgaattacctgagaaaaggcccaccttccagcaattactctcgtccatcgagcccctgcgggaaaaagataagcactag

SEQ ID NO: 180640 - DNA, 2028 bp, synthetic construct
  misc_feature 1..2028: note = Description of Artificial Sequence: Synthetic coding sequence
  source 1..2028: mol_type = other DNA
atggacaccaagagcatcctggaggagctgctgctgaagcggagccagcagaagaagaaaatgtctcctaataactacaaggaacgtctcttcgtgctgaccaagacgaacctctcttactatgaatacgataaaatgaagagggggagtcggaagggatcgattgagatcaagaagatcaggtgcgttgagaaggtcaacttagaggagcagaccccagtggagagacagtatccttttcagatcgtttacaaagatggattgctgtatgtttatgcgtctaatgaggaaagtcgatctcaatggctcaaggcacttcaaaaggagataaggggcaacccccacctgttagttaaataccacagcgggttcttcgtggacggcaaattcttgtgctgccagcagtcatgtaaggcagcgccaggctgcaccctgtgggaggcatacgctaacctgcacactgccgtgaacgaggaaaagcaccgcgtgccgacttttccggacagagttctcaagatcccccgtgccgtaccggtattgaagatggacgcaccaagctcgagcacaaccttagcccagtacgataatgaatcaaagaagaactacggaagccagccccccagttcatcgacatcccttgcacagtatgactccaacagtaaaaaaatttatggctcccagcccaactttaacatgcaatatattccccgtgaggatttcccagactggtggcaagtaagaaagctcaagagcagctcatcctccgaggacgtggcgtcttctaatcagaaagaaaggaacgttaaccataccaccagcaaaattagctgggaattccctgagtcttccagctccgaagaggaagagaatctggacgactatgattggtttgctggcaacattagcaggtcccagtcagagcagttattaaggcaaaagggcaaggagggcgcattcatggtgcgcaacagctctcaagtggggatgtacaccgtctctttgttcagtaaagccgtgaacgacaaaaaaggcactgtcaagcattatcacgtccacactaatgctgaaaataaactctacctggccgaaaattactgttttgatagcattcctaagctcatacactaccaccagcataattcagccggtatgattacaagactgcggcatccagtatccacaaaggctaataaggtcccagactctgtgagccttggaaatgggatctgggaactgaagcgagaagagataactctgttaaaggagctgggctctgggcagtttggcgtggtgcagctcggtaagtggaagggacagtatgatgtggccgtgaagatgatcaaagagggttcaatgagcgaggacgagttctttcaggaggcccagactatgatgaagttatcccacccaaagctagttaaattctacggagtttgctccaaagaatacccaatctatatagttactgagtatattagcaatggctgcctcctgaattatctgagaagccatggcaaagggttagagcccagtcagctgttggagatgtgttatgatgtctgcgagggaatggcttttctcgagagccaccaattcattcatagagatctggcggcaaggaattgcctcgtcgacagggatctttgcgtgaaggtgagcgatttcgggatgacaaggtatgtcctggatgaccaatacgtgagttcagtggggacaaaattccccgtgaagtggagcgcccccgaagtctttcattattttaaatattcctctaagagcgacgtatgggcatttggaatcctcatgtgggaggtctttagtctgggaaaacagccatatgacctgtacgacaattcacaggtcgtactgaaagtgagtcaaggccacagactgtacagacctcaccttgcctctgatacaatctatcagatcatgtacagttgttggcacgagctgccagaaaagcgccccacgtttcagcagctgctgtccagtattgaacccctccgggagaaagacaaacactag

SEQ ID NO: 180641 - DNA, 525 bp, synthetic construct
  misc_feature 1..525: note = Description of Artificial Sequence: Synthetic coding sequence
  source 1..525: mol_type = other DNA
atgaccgagctggagtaccccaagggcagcagcatcatgcccgccgccggcactatgtacctcactacatcgacaggttacccttacacgtaccataacggagtcgcctactttcacacccccgaagttactagtgtgcctccaccatggccctcccggagcgtctgttcaagccctgtgatggtggcacaacccatataccagcaaccagcttaccattaccaagctaccactcaataccttcctggacagtggcaatggagcgtgccccagccgtcagcctcaagtgctcccttcctgtaccttcaacccagtgaggtgatataccagcctgttgagatcgcccaggatgggggttgcgtacctccacccctctcgctgatggagactagtgttcccgagccctacagcgaccatggcgtgcaggccacataccaccaagtttatgccccatccgcgataacaatgcccgcacctgtgatgcagccagaacccataaagacggtctggagcatccattactag

SEQ ID NO: 180642 - DNA, 888 bp, synthetic construct
  misc_feature 1..888: note = Description of Artificial Sequence: Synthetic coding sequence
  source 1..888: mol_type = other DNA
atggagaccgagagcggcccccagaccagcaaccagatgcagaccgacagtttgtcacctagcccgaatccagtatctcccgttccactgaataatcccacatccgcccctcggtacggcacagtgatccccaatcggattttcgtcggagggatcgactttaaaaccaacgagtcagatctcaggaaatttttttcacagtacggcagcgtcaaggaagttaaaatcgtcaatgatagagccggtgtgagtaaaggctatggattcgtgacgtttgaaacacaggaagacgcgcagaagatattacaggaagcagagaagttaaattacaaagataagaagttgaacatcggccctgctatccggaagcagcaggttggaattccaagaagctctatcatgccagccgccggaaccatgtacctcaccacaagcacagggtatccgtatacataccataatggtgtagcttacttccacacccccgaggtcacatcagtgccccctccctggccttcacgaagtgtgtgcagctctccagttatggttgctcagcccatttaccagcagcccgcttaccactatcaagctaccacgcaatatcttccgggtcagtggcagtggtcagtaccacagccctcagcctcttcagccccctttctgtatctccagccctctgaagtcatctaccagcccgttgagatagctcaggacgggggttgtgtgcccccacctttgtctttgatggagacatctgtgccggagccgtattcagatcacggcgtacaggccacctaccaccaggtttacgctccgtccgctatcactatgccagcccctgtgatgcaaccagagcctattaaaactgtctggtccattcactattag

SEQ ID NO: 180643 - DNA, 852 bp, synthetic construct
  misc_feature 1..852: note = Description of Artificial Sequence: Synthetic coding sequence
  source 1..852: mol_type = other DNA
atgcagaccgacagcctgagccccagccccaaccccgtgagccccgtgcccctgaataacccaacatctgcacctaggtacggcactgtgatcccgaatagaatctttgtggggggcatcgactttaaaacaaatgaatctgatttgagaaagtttttttcacaatatggaagtgtgaaagaggtcaagatcgttaacgacagggccggagtttcgaagggttacgggtttgtcacattcgaaacgcaggaggacgcacaaaagatactgcaggaggcagaaaaactgaactacaaggacaaaaaactaaacataggtcccgctattcggaagcagcaagtgggcatccctaggagcagtattatgcccgccgcaggcaccatgtacctgactacatcaactggctatccttatacgtaccataacggcgtcgcttactttcacacacccgaagttacgtcggttccacctccctggcccagccggtccgtgtgcagttctcccgtcatggttgcccagcctatataccagcagcctgcgtaccactatcaggctactacacaatatcttcctgggcagtggcagtggagcgtaccacagccttccgcctcctcagccccgttcctgtacctgcaaccctcagaagttatttatcaaccagtcgagatcgcacaggacggaggttgtgtcccccctcccttgtcccttatggaaactagcgttcccgaaccttattcagaccatggggtccaggcaacctaccaccaagtgtacgctccctctgccattactatgccagcccccgtgatgcaacccgagcctatcaagaccgtctggtcaattcactactag

SEQ ID NO: 180644 - DNA, 852 bp, synthetic construct
  misc_feature 1..852: note = Description of Artificial Sequence: Synthetic coding sequence
  source 1..852: mol_type = other DNA
atgcagaccgacagcctgagccccagccccaaccccgtgagccccgtgccgttaaacaaccccacgtcagcaccccgatacggcactgtgatccctaatcggatttttgtgggcggtattgacttcaagactaacgaatccgacctccgcaagttcttttctcaatatggttccgtgaaagaggttaaaatcgtgaacgacagggccggtgtctcgaagggctacggctttgtgaccttcgagactcaggaagatgcccagaagatcctgcaagaagctgagaagcttaattacaaagacaagaaactgaatattggaccagcaatcagaaaacaacaggtaggtattcccaggtctagtattatgccagcagccggcaccatgtatctgacgacctccaccggatacccatatacctatcataatggggtcgcatacttccatactcctgaggtgacatcagttcctcccccatggcctagtcgctctgtatgctctagtccagtcatggtggcgcagcctatttaccagcagccagcctatcattaccaagctactacccagtacttaccaggacagtggcagtggagcgtgccgcagcccagcgcctcctccgccccttttctgtacctgcagcccagtgaagttatctatcagccagtcgagatcgctcaggatggtgggtgtgtgccaccacctctctccctgatggagacgagcgtcccagagccgtattcagaccacggtgtccaagccacttaccaccaagtctacgctccaagcgcaattaccatgcccgcccccgtgatgcagcccgaacctattaaaacagtgtggagcatccattattag

SEQ ID NO: 180645 - DNA, 414 bp, synthetic construct
  misc_feature 1..414: note = Description of Artificial Sequence: Synthetic coding sequence
  source 1..414: mol_type = other DNA
atgctgagcggccggctggtgctgggcctggtgagcatggccggccgggtgtgtctctgtcaaggatccgccgggtccggtgcgataggtcctgtggaagctgcaattaggaccaaactggaggaggcactatccccggaagttctggagttaaggaacgaatctgggggtcatgccgtgcccccaggatctgaaacacactttcgggtcgcggttgtgtcttctcggttcgaaggattaagcccgctgcagaggcacagactggtacacgcggccttggcggaagagttaggtgggccggtccacgcgctcgccattcaggcccggacaccggcccagtggagagagaatagtcagttagacacctcgccaccatgcctcggggggaacaaaaagaccttagggaccccgtag

SEQ ID NO: 180646 - DNA, 414 bp, synthetic construct
  misc_feature 1..414: note = Description of Artificial Sequence: Synthetic coding sequence
  source 1..414: mol_type = other DNA
atgctgagcggccggctggtgctgggcctggtgagcatggccggcagggtttgcttgtgtcaggggtctgcaggctcaggggcaataggccccgtagaggctgcaatccggacgaagctggaagaagctctcagtccagaggtcctagagttgcgcaatgagagtggcggacatgccgtgcctccaggtagcgaaacccattttagagtcgccgtggtatcgagcaggtttgaaggcctaagtccgcttcagagacataggttagtccatgccgctctcgccgaagaactggggggccccgtccatgctctggcgattcaagcccgaacacctgcacaatggagggaaaactcacaactggatacctctcctccgtgtctggggggcaacaaaaagacactgggcacgccctag

SEQ ID NO: 180647 - DNA, 414 bp, synthetic construct
  misc_feature 1..414: note = Description of Artificial Sequence: Synthetic coding sequence
  source 1..414: mol_type = other DNA
atgctgagcggccggctggtgctgggcctggtgagcatggccggcagggtctgcctgtgccagggcagcgccggcagcggcgcaatcggacctgttgaggccgcgataagaacgaaactagaggaggccctgtcccccgaagtgcttgaactcagaaacgagtctgggggacatgccgttccgccaggatcagaaacacacttccgagtagccgtagtttccagcagattcgaggggttgagcccacttcagaggcaccgactggttcatgctgccttggctgaggagctgggaggccccgtgcacgccctcgctattcaagctcgaactccagcacagtggcgggaaaactctcagctggatacgtctccgccgtgtttgggcggtaacaaaaagaccctcggcactccctag

SEQ ID NO: 180648 - DNA, 459 bp, synthetic construct
  misc_feature 1..459: note = Description of Artificial Sequence: Synthetic coding sequence
  source 1..459: mol_type = other DNA
atggccagcgccaagagcctggaccggtggaaggcccggctgctggaaggggggtcaactgccctgacttacgccctggtccgtgcggaggtaagttttcctgctgaagtagcacccgtgaggcagcaggggtcagtggcgggcgcccgggcaggcgtcgtgtccctcctgggttgccgctcttcatggaccgctgccatggagctgagcgccgaatacctgagagaaaaactgcagcgggatttggaagcagaacacgtggaggtggaagacactacgttgaataggtgttcgtgttcctttcgggtattggtcgtttctgccaagtttgaaggaaagcccctgttacaacgccaccggctggtgaacgcctgtctcgccgaagaactaccacacattcacgctttcgagcaaaaaactctgactccggatcagtgggcccgagagcgccaaaaatag

SEQ ID NO: 180649 - DNA, 306 bp, synthetic construct
  misc_feature 1..306: note = Description of Artificial Sequence: Synthetic coding sequence
  source 1..306: mol_type = other DNA
atggccgcctggagccccgccgccgccgcccccctgctgcggggcattaggggtttaccactgcaccatcggatgttcgcgactcagacagaaggagagttacgggtcactcagatactgaaagaaaaattccctcgagcaactgctattaaagtcactgacatctccggcacaaagaggagaaatcagagagacgcatggattgctgatatttacctttgtccccaaacattaaccaccccatggcttcacagatgttgctgcttacggccatggatgaatttcacagatatcattctcccatag

SEQ ID NO: 180650 - DNA, 324 bp, synthetic construct
  misc_feature 1..324: note = Description of Artificial Sequence: Synthetic coding sequence
  source 1..324: mol_type = other DNA
atggccgcctggagccccgccgccgccgcccccctgctgcggggcattagggggctccctctccaccacaggatgttcgccacgcagactgaaggggaactccgggttacacagattctgaaggaaaaatttcctcgcgctaccgctataaaagtgaccgacataagcggaggctgcggcgccatgtatgagatcaagattgaatctgaagagttcaaggaaaaaagaacagtgcagcagcatcaaatggtgaatcaggcacttaaggaggagatcaaagagatgcatggcctgaggatattcacctccgtaccgaaaagatag

SEQ ID NO: 180651 - DNA, 1200 bp, synthetic construct
  misc_feature 1..1200: note = Description of Artificial Sequence: Synthetic coding sequence
  source 1..1200: mol_type = other DNA
atggcccagcggcagccccacagccccaaccagaccctgatcagcattactaacgacacagagtcctccagctctgtggtgtcgaacgacaacactaataaagggtggtccggtgacaactcgccgggtattgaggcgctctgcgcgatttatattacttacgcagtgatcatttccgtggggatcctaggaaacgctatcttgatcaaggtgttcttcaagactaagtctatgcagaccgtccctaacatcttcataacctcattagccttcggagatttgctattacttctgacctgcgtacctgtggacgccactcactacctcgccgagggatggcttttcggaagaattggatgcaaagtcctaagttttatccgcctaaccagcgtgggcgtcagcgtctttacacttacgatcttaagcgccgaccggtataaagctgtcgtgaagcctcttgaacggcagccatctaacgcgatccttaaaacttgcgtgaaagccggctgtgtttggattgtaagcatgatctttgccctgcccgaggctatcttttccaacgtctatacctttcgcgatccaaacaaaaacatgacctttgaatcttgcacttcttatccagtatcaaagaagctactgcaggaaatccatagcctactgtgctttctcgttttctacattatccctctgagtatcatttcagtgtactattctctgatagcaaggactttatataaaagcactctaaatatcccaaccgaagaacagagtcacgcccggaaacagatcgagtcaaggaagcgcatcgcacgaaccgtgctagtccttgtggccctcttcgctttatgctggctcccgaatcacctcctatatttataccatagtttcacaagtcagacatacgttgacccctccgctatgcatttcattttcaccatcttctcaagggtgctggctttttcaaactcatgtgttaacccatttgccctgtattggttgtctaaatctttccaaaagcacttcaaggcccaacttttctgttgcaaggcagaaaggccagagccgcctgtggccgatacatcgttgacgaccctggcagtcatggggaccgtgccgggaactggcagtatccagatgtcagaaatatcagttacctccttcaccgggtgctctgtgaagcaggccgaagatagattctag

SEQ ID NO: 180652 - DNA, 303 bp, synthetic construct
  misc_feature 1..303: note = Description of Artificial Sequence: Synthetic coding sequence
  source 1..303: mol_type = other DNA
atgcgggccctgaccctgctggccctgctggccctggccgccctgtgtatcgctggtcaagccggagctaaaccttccggcgcggaaagcagtaaaggggccgcgtttgtttccaaacaagagggcagcgaggtggtcaagcggccacggaggtatctttaccagtggctgggagcgcctgtgccttaccctgaccctttggagccccgccgggaggtgtgtgagctgaatccagattgcgatgagttggccgaccacatcggattccaggaggcatacaggcggttctacggacctgtgtag

SEQ ID NO: 180653 - DNA, 957 bp, synthetic construct
  misc_feature 1..957: note = Description of Artificial Sequence: Synthetic coding sequence
  source 1..957: mol_type = other DNA
atggccgcccagggctgcgccgccagccggctgctgcagctgctgttgcaactgcttctgctgttgctcctcttagctgccgggggtgcacgggcgcggtggcgcggagaaggcacctcagcccacctccgggatatcttcctgggaagatgtgcagagtacagggccctccttagtcccgagcagcggaataagaactgtaccgctatctgggaagcctttaaggtggccttagacaaggatccctgctccgtcctcccgtccgattacgacctgttcatcaatctatcacgccactcgatccccagagacaagtccctcttttgggagaattcccacttattggttaattcattcgccgacaacactagacgcttcatgcctttgtcagatgttctgtatggtagagtggccgacttcctgtcttggtgtcggcaaaagaatgactcaggccttgactaccagtcctgtcctactagcgaagactgcgagaataaccctgtggattcgttttggaaacgtgcctctatccaatacagcaaagattcctccggggttattcacgttatgcttaatggcagtgagccgaccggagcttaccctattaaaggattcttcgccgattatgaaattcccaatcttcaaaaggagaagattacccgcattgagatctgggtgatgcatgaaatcggcggacctaacgtcgaaagctgtggcgaggggtctatgaaggtcctggagaagagacttaaagatatgggcttccaatactcctgtataaacgactatagaccggtcaagttgctccagtgcgtggatcactctactcacccagactgcgcgctgaagtctgcagccgccgctacacagaggaaagccccatcactgtacactgagcagcgggccgggctgattatacctttgttccttgttctggcttcaaggacccagctttag

SEQ ID NO: 180654 - DNA, 543 bp, synthetic construct
  misc_feature 1..543: note = Description of Artificial Sequence: Synthetic coding sequence
  source 1..543: mol_type = other DNA
atggccagcaccagctacgactactgccgggtgcccatggaggacggcgataagagatgtaagcttctgctcggtattggaatcctggttcttctcataatcgtcattctgggcgttcctctgatcatattcaccataaaagctaactcagaagcatgtagggatggccttagagcagttatggaatgccggaatgttacgcacttattgcagcaagagctcaccgaagcccagaaaggatttcaggatgtcgaggcacaggccgctacatgcaatcatacagttatggctctaatggcttcgcttgatgccgagaaggctcagggtcagaaaaaggtcgaggagctagaaggagagattacaacgctcaaccataagctgcaagacgcatctgctgaggtggaacgtctgcgacgcgagaatcaggtacttagcgtccgtattgcggacaaaaagtattatcctagtagccaggatagctcttccgccgctgctccccagttactaatcgtactgctagggctcagcgcactgctgcaatag

SEQ ID NO: 180655 - DNA, 651 bp, synthetic construct
  misc_feature 1..651: note = Description of Artificial Sequence: Synthetic coding sequence
  source 1..651: mol_type = other DNA
atggccagcaccagctacgactactgccgggtgcccatggaggacggggataagaggtgtaagttgctattggggatcggaatcttagtgcttctgataattgtcatcctgggtgtgcccctgatcatattcaccatcaaggccaattccgaagcatgcagagatgggcttcgggctgtgatggagtgccgcaacgttacgcatcttttgcaacaggagcttacagaggcacagaaaggattccaggacgtcgaggcccaagcagcaacatgcaaccataccgtcatggccctcatggcctccctggatgccgagaaagctcaagggcaaaagaaggtcgaggagctagagggcgagatcacaaccttgaaccataagctacaagacgcaagtgccgaggtggagcgacttcgccgcgagaaccaggtcctgtcagtccgcatcgccgataagaagtattatccatcgtcacattttccctctacaccacagtctcgccttcagacacagctgacaaccctgaaaatagagatggacgaggctaaggctcagggcacacagatgggagccgagaatggggccctgaccggtgcactgggatgcaaaggggtgggacgtgaccgatctggccgctctctgggcgagtcttag

SEQ ID NO: 180656 - DNA, 1179 bp, synthetic construct
  misc_feature 1..1179: note = Description of Artificial Sequence: Synthetic coding sequence
  source 1..1179: mol_type = other DNA
atggtgctgctgagcatcctgcggatcctgttcctgtgcgagctggttctgttcatggagcatagggcgcagatggccgaaggcggacagagttctatcgctctgctcgctgaggctcccaccttgcccttgatcgaagaactgctggaggaatctcccggagagcagccccgcaagccccgcctgctcggccacagcttgcgttatatgctcgagttgtatcgccgctcggccgactctcacggccatccaagagagaacagaaccattggagcaacaatggtccggttggttaagccactgactaacgtggctaggccccataggggtacatggcacatccagattttgggctttccgcttagacctaacagggggctgtaccaattggtccgggctacagtagtttatcggcaccaccttcaactgactcggttcaatttatcttgccacgtcgaaccctgggttcagaagaaccccactaatcactttcccagctctgaaggggacagttctaagccctctctgatgagcaacgcctggaaggaaatggatataacacagctcgtgcagcagcgtttctggaataataaaggccatcgcatccttcggctgaggttcatgtgtcagcagcagaaggactctggagggctggaactctggcacgggacttcttcgcttgacattgcgtttctcctgttgtactttaatgacacccataagtcaattaggaaggccaaattcttgccccgaggtatggaagaatttatggagcgcgaatccctcctgcgcaggacaaggcaagccgatggtatcagcgcagaggtcaccgctagctcatctaagcactcaggtcccgagaataaccaatgtagtttgcatccatttcagatctcctttagacagctcggctgggatcattggatcatcgcgccccctttttacacccccaactattgtaaggggacctgtttgcgcgtgctgagagatgggctcaatagccctaaccatgcgattatacagaatctgatcaaccagctggtggaccagtctgtcccaaggccttcttgcgtaccctacaagtacgtcccgatttcagtgctcatgatagaagccaatgggagcattctctacaaggaatacgaagggatgattgcagagtcgtgtacctgtcggtag

SEQ ID NO: 180657 - DNA, 1419 bp, synthetic construct
  misc_feature 1..1419: note = Description of Artificial Sequence: Synthetic coding sequence
  source 1..1419: mol_type = other DNA
atggccggcgccagccggctgctgttcctgtggctgggctgcttctgcgtgtcattggcgcagggagagcgcccgaaaccaccttttccggagcttagaaaggcagtgcccggagataggaccgcaggggggggtccggactcggagcttcagccacaggacaaggtaagcgagcatatgcttcggctttacgatcgctattcaaccgtgcaggcagcccggacaccagggtccctagaaggcggtagccagccctggaggccaagattgctccgggagggaaatactgtccgctcctttcgcgccgcggccgcagaaaccctggagcggaagggactctacatttttaacctcacttccctcactaaatccgagaacatcctgagtgccaccttatatttctgcattggagagctggggaatattagtctaagttgcccagtatccggggggtgctcccaccacgcccagcgcaaacacattcagatagatcttagcgcctggactttaaaattttctcggaaccaaagccagctgctcggtcacctatcagtagacatggccaagagccaccgcgatattatgagttggctgagtaaagatataacgcagttactgagaaaggctaaagaaaatgaggaattccttatcgggtttaatataacctccaagggtaggcagctgccaaaacggagacttccattccccgagccttatatccttgtatacgccaatgacgccgctataagtgagcccgaaagcgtggtgtcttctctgcaaggccatcgcaactttcccaccggcaccgtccccaaatgggattctcacattagggctgctctatccatagagcgccggaagaaacgaagtaccggggtcctcttgccgctccagaataacgagctccctggagctgagtatcaatacaagaaggatgaggtgtgggaagaacgaaaaccctacaagactctgcaagcccaggcccctgaaaagtctaaaaacaagaagaaacagcgcaaaggtccccatcgcaaaagccagacccttcaatttgacgaacagactctgaagaaggctaggcgaaaacagtggatcgaacctaggaattgcgcccgtaggtatctgaaggtggatttcgccgacatcggatggtccgagtggattatctcacccaagagcttcgacgcctattactgttcgggggcctgtcaatttcccatgcctaaatccctgaagccatctaatcacgcaaccatccagagcatcgtcagagcagtcggcgttgtgcccgggattcctgaaccttgctgtgtgccagagaagatgtcttccctgtccatcctatttttcgacgaaaataagaatgtggtcctgaaagtgtatccaaatatgacagtggagtcatgcgcttgcaggtag

SEQ ID NO: 180658 - DNA, 213 bp, synthetic construct
  misc_feature 1..213: note = Description of Artificial Sequence: Synthetic coding sequence
  source 1..213: mol_type = other DNA
tgcttcttctactacctgaagagcctgaagcccagcaaccacgccacaatacaaagtattgtacgcgctgttggagtcgtgcctggaatacctgaaccctgttgtgtaccagaaaaaatgagcagcctctccatcctatttttcgatgagaataaaaacgtagtgcttaaggtgtaccccaacatgactgttgagagctgcgcgtgtagatag

SEQ ID NO: 180659 - DNA, 1227 bp, synthetic construct
  misc_feature 1..1227: note = Description of Artificial Sequence: Synthetic coding sequence
  source 1..1227: mol_type = other DNA
atgatccccggcaaccggatgctgatggtggtgctgctgtgccaggtgctcctgggaggcgcttcacacgcaagcctcataccagagactggaaagaaaaaagtggcagaaatccagggccatgctggcgggcgccgctcaggccagtctcacgagctgctgagagatttcgaggcaactttgttgcagatgtttgggctgcggcggcgtccacaaccttcgaagtccgcggtgattcctgattatatgcgtgacttgtacaggctgcagtccggcgaagaagaggaggagcagatacattccactgggcttgagtacccagagcgacccgcttcccgagctaacacagtaagaagcttccaccatgaagagcatctggagaatattcctggtactagcgaaaattcagccttccgcttcttgtttaatctgtccagcattcctgaaaatgaagtcatttcatctgcagaattacgactgtttagggaacaggtagaccagggacctgattgggaacgaggattccaccgcattaatatatatgaggttatgaagccccctgcagaagtggtgcctggacatctgatcacgcgcctgctggatacaaggctcgtacatcacaatgtgacacgctgggaaacattcgatgtctcaccagctgtgctgaggtggactcgggaaaagcagcctaattacgggctagcaatagaggtgacccatttgcatcagacccgcacccaccagggccagcatgtccgtattagccgtagcctgcctcaggggtctggcaactgggctcagttgcggccattgttggtgacctttggccacgacggtcggggacatgccctgactcggcggcgcagggctaagcggagtcctaagcaccattctcagagagccaggaagaagaataaaaactgccggcggcatagcctgtatgtagatttctctgacgtcgggtggaacgattggatcgtggctcccccagggtaccaggctttttattgtcatggggattgccccttcccactggcagatcacttaaactcgacgaaccacgctattgtgcagaccctggttaattctgttaacagctccatccccaaagcctgctgcgtcccaacagagctaagcgctatctcaatgctttatttagacgaatatgataaagtcgtcctgaaaaactatcaggagatggtcgtagaggggtgtgggtgccgatag

SEQ ID NO: 180660 - DNA, 1227 bp, synthetic construct
  misc_feature 1..1227: note = Description of Artificial Sequence: Synthetic coding sequence
  source 1..1227: mol_type = other DNA
atgatccccggcaaccggatgctgatggtggtgctgctgtgccaggtcctcctgggaggggcctctcacgcctcactcattccagaaacaggcaaaaagaaagtcgccgagatccaaggccatgccgggggtagacgttctggacagagccacgagctgctgcgcgacttcgaggccacactgctgcagatgtttggacttcgccgccgcccccaacctagcaagtcagccgttatcccagactacatgagagatctttatagactgcagtctggagaagaggaggaggagcagattcacagtaccggcctagaataccccgagaggccagctagccgtgccaatactgtgcgaagtttccaccatgaagagcacttagaaaacatccccgggacatcagagaatagcgctttccgtttcttgtttaatctttccagcatccccgaaaatgaggtaatctcaagtgctgaattgcgattgtttagagagcaggtggaccaggggcccgactgggaaagagggttccataggatcaacatatacgaggtaatgaagccccctgctgaggttgttcctggccacctgatcacacgactgctggatactcgcctggtccaccataacgtcacaaggtgggaaactttcgacgtttcgcccgccgtcctgcggtggactagggagaagcagcccaattacggcttggccatagaggtaactcacctgcatcagacgcgcactcatcaagggcagcacgtaagaatttcaaggtcccttccccagggttcaggaaactgggcccagctccgacccctcctggtgactttcgggcacgacggtcgggggcacgccctgactcgtagaagacgcgcaaaacgatcacccaagcaccacagccaaagggctcgtaaaaaaaataaaaattgtcggcgccactctttatatgtggactttagcgatgttggttggaacgactggatcgtcgctccgcctggttaccaggctttttattgccatggcgactgtccctttcctctggcagatcatctgaatagcacaaatcacgccatcgtacagacactggttaatagtgtcaacagctctattccgaaggcttgctgcgtgccaacagagctgtccgccatcagcatgctctacttagacgagtacgacaaggtggtcctcaagaactatcaagaaatggtagtggagggttgcggttgcagatag

SEQ ID NO: 180661 - DNA, 1227 bp, synthetic construct
  misc_feature 1..1227: note = Description of Artificial Sequence: Synthetic coding sequence
  source 1..1227: mol_type = other DNA
atgatccccggcaaccggatgctgatggtggtgctgctgtgccaggtcttactcgggggcgctagtcacgcttctctcattccagaaaccgggaaaaaaaaagttgcagagatacagggacacgccggaggtaggaggtccggacagtcacacgaacttctgcgtgactttgaagccacccttttgcagatgtttggtttgcgtcgcagaccacagcccagcaaatcagcggtaatccccgattacatgcgtgacttgtaccgcctccagtctggagaggaggaggaggaacagatccactcgacaggtctggagtatcccgaaagacccgcctctcgcgccaacaccgtgcggagcttccatcatgaagaacatctcgaaaacatccccggaacgtcagaaaattcagcatttcgcttcctctttaacctatctagcatcccggaaaacgaggttatcagttctgccgaacttcgacttttccgagagcaggtggaccaaggccctgattgggaaagaggcttccatcgcattaacatttacgaggtgatgaagccacctgccgaagtggtgcctggccacctgattacccgcctgctggacactcggcttgttcatcataatgtaactcggtgggagacatttgatgtaagcccagcggtcctccgctggacaagagagaagcagcctaattacggtctcgccatcgaggttacacacttgcatcaaaccaggactcaccagggacaacatgtgcggatttccaggtcactcccacagggcagtggaaactgggcacagcttcggcccctgctcgtcactttcgggcatgatggacgcggccacgctctgacacggcgccgaagggcaaagcggtccccaaaacaccacagccagagagctcgcaagaaaaataaaaactgcaggcgccattccttatacgtggacttttccgatgtcggctggaacgattggatcgtagccccccccgggtaccaggccttttactgccacggcgattgtcccttccctctggctgaccacctgaacagcacaaatcacgcaatcgtacagacacttgtcaacagcgtgaattcgtctatccctaaggcgtgctgcgtgcccaccgagttgtcagctatatctatgctctaccttgatgaatacgacaaggtagtactcaagaactaccaagaaatggtggttgaggggtgtgggtgtcgctag

SEQ ID NO: 180662 - DNA, 1227 bp, synthetic construct
  misc_feature 1..1227: note = Description of Artificial Sequence: Synthetic coding sequence
  source 1..1227: mol_type = other DNA
atgatccccggcaaccggatgctgatggtggtgctgctgtgccaggtccttcttggcggcgctagtcatgcttccctgattccagagacaggcaaaaagaaggtggctgagatccagggccacgcagggggcagaaggagtggccaaagtcacgagctcctccgcgactttgaagccaccttgctccagatgttcggcctacgtcggcgccctcagccttcgaaaagcgctgtgattccagactacatgagagacttgtatagattgcagtccggagaggaagaggaagaacagattcactccaccggtctggaatatccagagcgccccgccagcagggcaaacaccgtgagatcttttcatcatgaagaacatctggagaatattcctggcacctctgagaattccgcatttaggtttctgtttaatttgtcctcaataccggaaaacgaggttatctcgagcgccgaactgaggcttttcagagagcaggtagaccagggtccagactgggagcgagggtttcaccgcattaacatatacgaggttatgaagcctccggccgaggttgtgccgggacatttgataacaagactgcttgacacccgccttgttcaccacaatgtcacccgttgggaaacctttgatgtaagtcccgccgtgctccggtggacccgtgaaaagcagccaaactacggtctggctattgaggtgacgcatctgcaccaaacccgaacacaccaggggcaacacgtccggatctctagatcattgccccagggcagcgggaattgggcccagctccgcccactcctggttactttcgggcacgacggacgcggccacgcactaactagacgccggagggccaaaaggagtcctaagcaccactcccagagggctaggaagaagaataagaattgcaggcgacatagcttgtatgtggatttttcagacgtgggatggaatgattggatcgtcgcaccgcctggataccaggccttttactgccacggcgactgtcccttccccttggcggatcatctgaatagcaccaatcatgcgattgtgcagacactggtaaattcagtgaactcgtctattcctaaagcatgttgcgtgcccacagaactgagcgccatcagtatgctctacctggacgaatatgataaggtggtgctgaaaaactaccaggaaatggtggtcgagggctgcgggtgtcgctag

SEQ ID NO: 180663 - DNA, 333 bp, synthetic construct
  misc_feature 1..333: note = Description of Artificial Sequence: Synthetic coding sequence
  source 1..333: mol_type = other DNA
atgatccccggcaaccggatgctgatggtggtgctgctgtgccaggtgcttctggggggtgcgagccacgcatcattgatccccgaaaccgggaaaaagaaggttgccgaaattcaagggcatgctggcggccgtcggtccggccagagccacgagctgctgcgagactttgaagctactctattgcagatgttcggcttacgcagacggccccagccctcgaagtcggccgtgatccccgattacatgcgagatctgtatcggctgcagtctggcgaagaggaggaagagcagatacattccacgggactggaatatcctgaaagaccttag

SEQ ID NO: 180664 - DNA, 1365 bp, synthetic construct
  misc_feature 1..1365: note = Description of Artificial Sequence: Synthetic coding sequence
  source 1..1365: mol_type = other DNA
atgcacctgaccgtgttcctgctgaagggcatcgtgggcttcctgtggagctgctgggtattagtgggttatgcaaaaggaggtctcggagataatcatgtacacagctccttcatttacagacgcctgcggaaccatgagagacgtgaaatccagcgcgagattctcagtatactgggactgcctcaccgacctaggccattttcacctggcaagcaggccagcagcgcccctttgtttatgctggacctgtataatgccatgaccaatgaggagaacccagaagagagcgaatacagtgtaagagcatccctggccgaggagacccgtggagcacgaaagggctacccggccagcccaaacggctatccaaggaggatccagctgagccgtaccactccactaactacacagtcaccacctcttgcttctctccacgatacaaatttcctcaatgacgcagacatggtgatgtctttcgtgaatctggttgagagggataaggacttctctcatcaacgacgccattataaagagtttagattcgacctgacacagatcccccatggagaggccgttactgcagcagagtttcggatttacaaggacagatcaaataaccggttcgaaaatgagaccattaaaatctctatataccaaatcataaaagaatacacaaatcgcgatgctgatttgttcctcctcgacacccggaaggcacaggcgctggacgtggggtggcttgtgtttgacatcaccgtcacttctaatcattgggtaattaatccccagaataatctcggcctgcagctgtgcgctgaaaccggagacggacgcagcataaacgtcaagagcgccggcctcgtgggacgccagggcccacagtctaagcagccctttatggtggcatttttcaaggcatctgaagtgctgctcaggagcgtgagagctgctaacaagaggaagaaccagaaccggaataagagttccagtcatcaggacagtagcagaatgtcgtctgtgggcgactacaacaccagtgaacagaaacaggcatgtaagaagcatgagctatacgtgtctttcagagatcttggatggcaggactggattatagcccctgaaggttacgctgcattttactgtgatggtgagtgttcgttccccttaaacgctcacatgaatgcaacaaaccacgctatcgtccaaacactggtacatttaatgttccctgaccatgtgcccaagccctgctgcgctcccactaaacttaacgcaataagcgtactttatttcgacgatagtagcaatgtgatcctgaagaaatatcggaacatggtggttagaagttgcggttgccattag

SEQ ID NO: 180665 - DNA, 1254 bp, synthetic construct
  misc_feature 1..1254: note = Description of Artificial Sequence: Synthetic coding sequence
  source 1..1254: mol_type = other DNA
atgcacctgaccgtgttcctgctgaagggcatcgtgggcttcctgtggagctgctgggttctggttggctacgctaagggaggtctgggagataatcatgtgcacagctctttcatttatcgacgtttgcggaaccacgagcgccgggaaattcaaagagagatcctgagtatcctgggccttcctcatcgccccagacccttttctcctggaaagcaggcatcttccgcccccctatttatgctggatctgtacaatgctatgaccaacgaagagaatcctgaggagtctgaatattccgtcagagcatcgctcgcagaggagacccgtggggcgcggaagggatacccagcaagccccaacgggtatcctaggcgcatccagttgagtcgaacaactccacttactacccagagtcctccgctggccagtcttcacgataccaacttcttgaacgatgcggatatggtaatgagctttgtgaatctggtagaacgcgacaaggattttagccaccaaaggcgacactacaaagagtttcggtttgatctgacccagattccgcatggggaggctgtgaccgcagcagaatttcggatctacaaggaccgcagtaataatcggttcgaaaatgaaactatcaaaatttctatttaccaaatcattaaagagtacactaatcgggacgctgacctattcctcttggacacacgaaaggcccaggcgctcgatgtgggctggttggtgttcgacattactgtgacgagtaatcattgggtgatcaatccacagaacaacctggggcttcagctgtgtgccgagaccggggatgggcgatctatcaatgtgaaatccgccggtctcgtaggcaggcaaggaccccagtccaagcagccttttatggttgcctttttcaaagcttcagaggtgctgttgagaagtgtgcgggcagctaataaacggaaaaaccagaatcgcaacaagtctagcagccatcaagacagttctcggatgtcatcagtgggagactataacacgtcagaacagaagcaggcctgtaaaaagcacgaactgtatgtcagcttccgggacctgggatggcaggtgcatttgatgttcccagaccatgtgcccaaaccgtgctgtgcacccacaaaattgaacgccattagtgtcctatattttgatgactcctccaacgttatccttaagaagtatagaaatatggtagtcagatcctgtggatgtcattag

SEQ ID NO: 180666 - DNA, 1542 bp, synthetic construct
  misc_feature 1..1542: note = Description of Artificial Sequence: Synthetic coding sequence
  source 1..1542: mol_type = other DNA
atgcccggcctgggccggcgggcccagtggctgtgctggtggtggggacttctctgcagttgttgcggcccccccccgctgagaccacccttgcctgcagcagccgccgccgccgcggggggacaattactgggagacggtggttctccaggtcgaaccgaacagccccccccgtcgccccaatcaagttccgggttcctgtacagaagacttaagacccaggagaagagggagatgcagaaagagatcctgtctgtgctagggcttccccaccggccccgccccctacatggtcttcaacagccacagcccccggccttgcgccagcaggaggaacagcagcagcagcagcagctcccaaggggagaaccccccccaggacgacttaaatctgcacccctgtttatgctcgacctttataacgccctgagcgcagacaacgatgaggacggcgcttccgagggtgagcgacagcagagctggccccacgaggccgctagctcttcccagagaagacagcccccgcctggggctgcccacccactcaataggaagtctctgctcgcgccaggcagcggatcgggcggtgcttccccattgacctctgcccaggacagcgccttcttaaacgacgctgatatggtgatgtctttcgtcaacctggtggagtatgataaagaattctctcctcgtcagaggcatcacaaagagtttaagttcaatctgtcacagatccccgaaggagaagtggttacagccgctgagttccgtatatacaaagactgtgtgatgggcagtttcaagaaccagaccttcctgatttcaatctaccaagttctgcaggagcaccagcacagagactccgatcttttccttctcgacacccgagtggtgtgggcttctgaggaaggttggctcgagttcgatattacagcaacgagcaacctgtgggtggtgactcctcagcataacatggggctccagctttcggtggtgacacgggatggagttcatgtccaccctagagccgccggactcgtcggaagggacggaccctatgacaagcagcccttcatggttgcattttttaaggtctctgaagtgcatgtgcgcaccacgagaagcgcctcctctcggagacgccaacaatcaagaaataggtcaactcagagccaggacgtggctcgagtgagctccgcctcagattataatagctctgagctcaaaacagcctgtaggaaacatgagctgtacgtttctttccaggacctgggctggcaggactggataatcgccccgaaagggtatgctgctaattattgcgatggtgaatgtagcttcccgctgaatgcccacatgaatgcaacaaatcacgcaattgtccaaaccttagtgcaccttatgaatccagaatatgtcccaaaaccctgctgcgcacctaccaagctgaacgcgatctctgtcctgtattttgacgacaatagcaacgttatactgaaaaaatatcgcaatatggtggttcgagcctgtggatgccactag

SEQ ID NO: 180667 - DNA, 1308 bp, synthetic construct
  misc_feature 1..1308: note = Description of Artificial Sequence: Synthetic coding sequence
  source 1..1308: mol_type = other DNA
atgcagaaggagatcctgagcgtgctgggcctgccccaccggccccgaccactccacggcctgcagcagcctcaaccacctgcgttgcgacagcaagaagagcaacagcagcagcagcaactgcctaggggggaaccccctccgggtcggctaaagagtgcccccctgttcatgctcgatttgtataatgcactttccgctgacaacgacgaggacggggcatctgagggggaacgacagcagagctggccgcacgaggcagcaagtagttctcagaggcgtcaacctccccctggcgcggcccaccctctaaacaggaaaagtctcctggcccctggctctggttcaggtggcgcctcccctctcacatccgcacaggattccgccttcctgaacgatgcggacatggtgatgtcttttgtgaatctcgtggagtatgacaaggaattttcccctagacagcgccaccacaaggagtttaaatttaacctcagccagatccctgagggcgaggtggtgacagctgcggaattcaggatctacaaggattgtgtgatgggatccttcaaaaaccaaactttcctcatctcgatctatcaggtattgcaggaacatcagcatcgtgactccgacttatttttgctggacaccagagtggtttgggcaagcgaggaggggtggctggagttcgacatcactgctacctctaacctttgggtggtcaccccacaacataacatgggcttacagctgagcgtggtgaccagggacggcgtgcatgtgcatccgcgggccgcgggcttagtggggagggatggcccctatgacaaacagccctttatggtagcatttttcaaagtatcagaggttcacgtgcgcacgacgcgcagcgcttcctccaggaggcgccagcaatctcggaaccggtcaactcaatcacaggatgtggcccgagtgtcctccgcatcagactacaacagcagtgaactaaaaactgcctgcaggaaacatgaattatacgtgagctttcaggacctgggatggcaggactggattatcgcaccaaaggggtacgcggccaactactgtgacggagagtgttcctttcctctgaatgcccacatgaatgctacaaaccatgctatcgtccagaccttagtgcaccttatgaatcccgagtacgttcccaagccgtgttgtgcacctaccaaactgaatgctattagtgtcttgtacttcgacgataactctaacgttatcctgaagaagtatcgcaacatggtggtgcgcgcttgcgggtgccattag

SEQ ID NO: 180668 - DNA, 1431 bp, synthetic construct
  misc_feature 1..1431: note = Description of Artificial Sequence: Synthetic coding sequence
  source 1..1431: mol_type = other DNA
gccgccggcggccagctgctgggcgacggcggcagccccggccggactgaacagccccctcccagtccacagtcatcctctggctttctatatcgccggctcaagacccaggagaagcgggaaatgcaaaaagaaatcttatccgtactcggactaccgcatcgcccccggcctttgcacggtctgcagcagccgcaacccccggctctacgccagcaggaggagcaacagcagcagcaacagctgccaagaggggaacccccacctggtcggctcaagagtgcccccctgttcatgctcgatctctataatgcactttccgcagacaacgacgaagacggcgcaagcgaaggcgagcgccagcaatcgtggcctcatgaggccgccagctcttcacagcgccgccagccccctcctggcgctgctcacccccttaatcggaaatcattgttagcgcccggatcaggctcgggcggtgcgagcccactcacctccgcccaggactcagcttttcttaacgacgcagatatggtcatgagtttcgtgaatctggttgagtacgacaaagagttcagcccaagacagcgacaccataaggaattcaaattcaacctttcccagatcccggagggggaggtcgtgactgcggccgagtttcgaatttacaaagattgcgtgatgggatcatttaagaaccagacttttttgatctctatctaccaggtattgcaggagcatcaacaccgggactccgacttgttcttgctggatacaagagttgtatgggctagcgaagagggctggctggagttcgacataaccgcaacatcaaatctctgggtcgtgaccccacaacataacatgggcctgcaattgtccgtcgtgacaagggatggcgtccacgtgcatcctagagctgctgggcttgttgggcgggacggaccatatgacaaacaacctttcatggtagctttcttcaaagtcagtgaagttcacgtgaggactacaagatcggcctcctccagacgcaggcaacaatccagaaatcgctccactcagtctcaggacgtggctagagtttccagcgccagcgattacaacagtagcgagctgaagacagcttgccgaaagcacgaactgtacgttagttttcaggacctgggatggcaggattggatcatagcaccaaagggctacgctgcaaattactgtgatggagagtgctcttttcctctgaatgcccacatgaacgctaccaatcacgctatcgtgcagacattagtccaccttatgaatccagagtacgttccaaagccttgctgcgccccaaccaaactgaacgccattagtgtcctttatttcgatgataacagcaacgtcatcttaaaaaaatatcggaatatggtcgtcagagcttgcgggtgtcactag

SEQ ID NO: 180669 - DNA, 2505 bp, synthetic construct
  misc_feature 1..2505: note = Description of Artificial Sequence: Synthetic coding sequence
  source 1..2505: mol_type = other DNA
atggaggagaagacccagatcaagaccttcctgggcagcaagctgcccaaatatggtactaagtccgtccgaagcaccctgcagccaatgcccaatgggactcctgtgaatcttctgggcacctctaagaattccaacgtgaaatcttatataaagaataacggatctgactgcccctcctctcactctttcaactggaggaaggccaataaataccagctttgcgcccagggggttgaggagccaaataatactcagaactctcacgataagataatcgacccggagaaaagagtccctacccagggtatgtttgacaaaaacggtataaaaggtgggttaaaaagcgtgtcgctgttcacgtctaaacttgcaaagccctctacaatgtttgtgtcgtccaccgaagagcttaaccagaaaagctttagtggaccctcaaacctcggaaagttcaccaaaggcactctgctaggtcggacatcatacagttctattaatacaccaaaatcacaactgaacgggttttatgggaaccgctcagcaggcagcatgcaacggcccagggcgaatagctgcgcaactcgatcatcgagcggagagtctcttgctcagtctcccgattctagcaagtcaatcaactgcgagaaaatggtgaggtctcagagcttctctcactccattcagaatagctttttgccaccttcctcaatcactcgtagccatagttttaatagagcggtggacctaaccaagccctatcagaaccagcagctgtcaattagagtgccacttcgctcaagcatgctcaccaggaattcacgccagcccgaggtgttgaatgggaacgaacatcttgggtacggtttcaataggccctacgccgcgggcggcaagaaacttgctttaccgaacggtcccggcgtcaccagcaccctcgggtacaggatggtgcacccatccctattgaagtcctcgagaagcccattctcaggcaccatgaccgtcgatggcaacaagaatagcccggcggacacatgcgtagaagaggacgctactgtcttagcaaaggaccgcgccgccaacaaagaccaggagctgatcgaaaacgagtcttatcggactaaaaacaatcaaacaatgaaacatgatgccaagatgaggtacttaagcgatgacgtagacgatatctctttaagctcgctgagctcgtcagataagaacgatctcagcgaagatttcagtgacgacttcattgacattgaggactctaatcggaccagaattacaccagaagaaatgtccttaaaggaagaaaagcacgagaacggcccaccccaagatatgtttgacagtccaaaagaaaatgagaaggccttctctaagaccgacgaatggattgacattagcgtgtccgaccgtagcgagtgcaccaagcatacctccggcaacaatctcgtctccccggatactgattaccgtgccgggtcctccttcgaactaagcccaagtgatagctcggatggtacttatatgtgggatgaagagggcctggaaccgattggcaacgtgcaccctgttggcagttacgagagtagcgaaatgaatagtattgacatactgaataacctggagagctgtgatctagaggacgacgatctaatgctcgatgtcgacctgcctgaggacgcccctctcgagaacgtcgagtgtgataatatgaacaggtttgacaggccggaccgaaacgtgcggcagcctcaagaaggcttttggaaacgcccaccccagagatggagcggacaggaacactaccacctgtcccaccccgaccactaccatcatcatggcaagtctgatctgtctcgtggatctccataccgtgaatcccccctgggacacttcgaatcctacggcggaatgcccttcttccaggcccaaaaaatgttcgtggatgtgcccgaaaatacggtgatactggatgagatgacactgcggcatatggtccaggattgcaccgctgttaaaacacagctgctgaaactgaaacgactgctacaccagcacgacggtagcggctcacttcacgatatccagctgtccctgccgagcagccccgagcccgaggacggtgacaaggtttataagaatgaagacctactgaatgagattaagcagctgaaggacgagatcaagaagaaggacgaaaaaatccaactgttggaactacagctagccacccaacatatttgtcaccagaagtgcaaggaggagaagtgcacttatgcggacaagtacacccaaactccatggaggcgcattcctgggggctactcggcccccagtttttccccttggcagggttccttccagggcattcccaggaccgtgcctcctcataggagacagacaagcagcaccactgcgttccagcagccttctcagacacatcgatctcatccaggaaagactaataaggcaaccacttatagaggacctcagtag

SEQ ID NO: 180670 - DNA, 1599 bp, synthetic construct
  misc_feature 1..1599: note = Description of Artificial Sequence: Synthetic coding sequence
  source 1..1599: mol_type = other DNA
atgccccagctgtacatctacatccggctgctgggcgcctacctgttcatcatatccagagtgcaaggtcaaaatttggactccatgcttcacggcaccggaatgaaaagcgactctgaccagaaaaaaagcgagaatggtgtcacgctggcccctgaggatacattgcccttccttaagtgctattgctcagggcattgtcccgatgacgcgattaataacacctgcatcactaacgggcattgcttcgccattatcgaagaggatgatcaaggagagacaacgcttgcttcaggatgtatgaaatacgaaggtagcgacttccagtgcaaggactccccaaaagctcagctgcgtcggactattgagtgctgccgcacgaatctctgcaaccagtacctgcaacccacccttccccccgtggtgattggccccttttttgacggaagtatccgctggctggtcctgttgatttcgatggcggtctgtataatcgccatgatcatattctcttcttgcttctgttataaacactactgcaagtcaattagttctaggcggcgctataaccgcgatttggagcaagatgaggcatttatcccagttggcgagagtctgaaggacctcatcgaccagagccagagctccggttcgggctcaggcctgccactattggtccagaggaccatcgcaaaacaaatccagatggtgcggcaggtcgggaaaggaagatacggagaagtgtggatgggcaaatggaggggcgaaaaagttgccgtcaaagtgttttttaccactgaggaagcttcctggtttagggagaccgaaatttaccagaccgtcctgatgagacacgaaaatattttggggtttatcgccgcagacatcaagggcactggctcttggacccaactgtacctcatcacagattatcacgagaacgggtccctgtacgactttctgaaatgcgcgacactggacacacgggccttgttgaagctggcgtattccgccgcctgcggcctatgccatttacatactgaaatttatggtacccaggggaagcctgctattgcacacagggatttaaaaagcaaaaacatactcattaaaaaaaatggcagctgttgcattgccgacctgggcctggcggtgaagtttaattccgataccaatgaagtagatgtgccacttaatacaagagtgggaacaaaaaggtatatggcacccgaggtgctagacgagagtctgaataagaatcattttcaaccctacatcatggctgacatctactcgtttggcctgatcatctgggaaatggcgagacgatgtatcaccggcggcatcgtcgaggagtaccaactgccatattacaatatggttccgtcggacccaagttacgaagacatgcgggaggtagtgtgcgtcaaacgattgcgacccattgtgtctaaccggtggaattccgacgagtgtttaagagcggtgctcaagctcatgtcggaatgctgggcccacaaccccgcctcccgactgactgctcttcgaatcaagaagaccctggctaagatggttgagtcacaggacgtgaagatctag

SEQ ID NO: 180671 - DNA, 3117 bp, synthetic construct
  misc_feature 1..3117: note = Description of Artificial Sequence: Synthetic coding sequence
  source 1..3117: mol_type = other DNA
atgaccagcagcctgcagcggccctggcgggtgccctggctgccctggaccatactgctggtgtctactgccgcggcctcgcagaaccaggagaggctatgtgccttcaaggacccttaccagcaggacttaggaatcggcgagtctaggatctctcatgagaatggcaccattctctgctcaaaggggtccacttgttacggtttatgggagaagtcgaaaggcgacataaacctggtgaagcaagggtgctggtcacacattggcgacccccaagagtgtcactacgaggagtgtgtagtcaccactacacctccaagcattcaaaatggaacgtatcggttctgttgttgctccaccgatctgtgtaatgtgaattttacggagaacttcccccctcccgacaccacccccttatcacctccacacagtttcaacagagatgagactatcatcatcgcgctcgccagcgtgtcagtcctcgcagttctcatagtggcattgtgttttggctataggatgctcacaggcgacaggaaacagggtttgcatagcatgaatatgatggaggctgcggccagcgagccatccctggacctggacaatctaaagctgctcgagctcattggccgaggcaggtatggagctgtttataagggttctctggacgagaggcctgtggcggtcaaggtctttagctttgccaatcgacagaactttattaatgaaaagaacatttatcgcgtgccgctgatggagcatgataacatagcccgctttatagtgggtgatgagcgcgttactgctgatggtaggatggaatacctactggtgatggagtactacccaaatgggtccttgtgtaagtacctgtcactgcacacatctgactgggtgtccagctgccggcttgcccattcagtgactaggggactggcttatctgcatactgaattgcctcggggcgatcattataaacctgcaataagccatcgcgacttgaattcccgcaatgtcctcgtgaaaaacgacggcacatgcgtcatctctgattttggacttagcatgcgcctgactggcaatcgtctcgtacggcccggggaagaagataatgcagcaatttcagaagtcggtacaataagatacatggccccggaagttttggagggagcagtaaacttaagggactgtgaaagtgcacttaagcaggtagacatgtatgcactggggttaatttattgggagattttcatgcggtgtactgacctgttcccaggggaatctgtgccagagtaccagatggcatttcaaactgaggtgggcaaccaccccaccttcgaagatatgcaggtgctggtgtcgcgtgaaaagcaacggcctaagttcccagaggcgtggaaggagaatagcttggccgtccgatccctgaaagaaaccatagaagactgctgggatcaggacgcagaggccaggctgacggcacagtgcgccgaggaaaggatggctgagctgatgatgatttgggaaagaaataaaagtgtctcccccacagttaaccccatgtccaccgccatgcagaatgagcggaaccttagccacaacagacgggtgccaaaaatcggaccttatcccgactatagctcctcgagctacattgaggactccattcaccacaccgactcaatagtgaaaaatatcagtagcgagcactcaatgtcttctaccccgctaacaatcggagagaagaatcgcaacagcattaattacgaaagacagcaagcccaggcccggattccatcccctgaaacctccgtaactagcctcagtactaataccacaactacaaatactaccggcctgaccccctcaactggcatgactacaatttccgagatgccttacccagacgaaaccaatctgcatacaactaatgttgcccagagtatagggccaaccccagtgtgtctgcaactgactgaggaggaccttgagacgaacaaactggacccgaaagaggtggataagaacctgaaggagtcaagcgatgaaaatttaatggagcactccctcaagcaattctccggcccagatcccctgtccagtacttccagttcccttctgtacccattaattaagctagcagtggaggccacaggacaacaggatttcacgcagacagctaatggccaggcatgtttaatacccgatgttcttcctacccagatttatcccctgccaaagcaacagaatctgccaaagaggcctaccagtctgccactgaataccaagaactcgaccaaggagccccgcttgaaattcggaagcaagcacaagagcaaccttaagcaggtcgagaccggagtggctaagatgaacacaattaacgctgcagaaccacatgtcgttactgtgacaatgaacggcgtggccgggagaaatcactcagttaatagccacgccgcaactactcagtacgcaaatggaaccgttttgagcggccaaaccacgaacatcgtgacacacagagctcaggaaatgctccagaaccaatttataggagaagatacccggcttaacattaatagcagccccgatgagcatgaaccactgctccgtcgggagcagcaggcaggccatgatgaaggcgttctcgatagactcgtcgataggcgcgaaaggcccttagagggcggacgaaccaatagtaacaacaacaactcaaacccgtgttctgagcaggacgttctggcacaaggggttccttcaaccgctgccgaccctggtccttctaaacctagacgagctcagagacccaacagcctggacctcagcgctaccaacgtcctggatgggtccagtatccaaataggggagtctactcaggatgggaaaagcgggagcggcgaaaaaatcaagaagcgcgtgaagacaccctactccctcaagcgctggcggccttctacttgggtgatctcgaccgagagcctggactgcgaggtgaacaacaatggctccaacagagcggtacactccaaatctagcaccgccgtgtacctcgctgaagggggtaccgccactacaatggttagcaaggacatcggtatgaactgcctatag

SEQ ID NO: 180672 - DNA, 2337 bp, synthetic construct
  misc_feature 1..2337: note = Description of Artificial Sequence: Synthetic coding sequence
  source 1..2337: mol_type = other DNA
atgagcagcggcgccaaggagggcggcggcggcagccccgcctaccaccttccccatcctcacccccaccctccccagcacgcccagtacgttggcccttacaggttggagaagacccttggcaagggccagaccggattggtgaagctgggcgttcactgcatcacaggacagaaagtggcaattaagattgtcaacagggaaaagctgtcagagagcgtgctcatgaaggtcgaacgagagattgcgattctgaagctgatagaacacccgcacgtgcttaagttgcatgacgtctatgaaaacaagaagtatttatatctggtcttagagcacgtttccgggggggaactctttgattacctagtcaaaaagggtcgtttaacccccaaggaagctcgcaaattcttccgccagattgtttctgctttagatttctgccacagctatagcatctgtcacagagatcttaagcctgaaaatttacttcttgacgaaaaaaacaacatccggatagcagacttcggcatggcctccctgcaggtgggtgactccctattggaaacgagctgcgggagtcctcactatgcatgtcccgaagtcattaagggcgaaaagtatgacggcaggagggctgatatgtggtcttgtggtgtcatcttgtttgcactgctggtgggtgcactccctttcgacgatgacaatctccgccagctgctggaaaaggtaaaaaggggcgtctttcacatgcctcatttcattccaccagactgtcagtcccttctgcgaggaatgatagaagtggagcccgagaaacgcctgtcattagaacagattcaaaagcatccgtggtatctaggaggcaaacacgagcccgatccatgcctggagcccgcacccggccgtcgtgtcgctatgaggtccttgccaagcaacggagagctggatccagatgtcttggagagcatggcgagcctggggtgcttccgtgatagagaaaggctgcacagagaactccgctccgaagaggagaaccaggagaagatgatctactatctcctgctggatcgcaaggagcgctacccatcttgcgaggatcaggatctgccgccacgaaacgacgtcgacccacccagaaagcgcgtagattccccaatgttgagccgtcacggtaaaaggcggccagaaagaaagtctatggaggtcctcagtatcacggacgccggcggtggcgggtctcctgttcccacaaggcgagccctggagatggcgcaacactcccagagatcgcggagtgtgagtggggcctccacaggactctcctcaagtccccttagcagtccccggtcccccgtcttttccttcagtcccgagcccggagcgggcgacgaagcgaggggcggcggctcccctacatctaagactcagactcttccaagccggggcccccgcggcggaggggctggtgagcagccacctccaccttccgcgcgctccactccgctgccaggtcctcccgggtcccccagaagctcagggggcacgcccctccattcgccacttcacacgcctcgagcaagtccaactgggactcctggtactacacccccaccttcgcccggtgggggagttgggggggccgcttggaggtcacgactcaattctattcggaacagcttcctcgggtctcctcggtttcatcgacgcaagatgcaggtccctacagctgaggagatgagctctttaaccccagagagttcacccgagctggccaaacgaagttggtttgggaattttattagcctggataaggaggagcaaatcttcttggtgcttaaggacaaaccactgagcagtatcaaggctgatatcgtccacgcattcctgagtattccatcgttgagccacagcgtcctgtctcagacatccttcagagctgagtacaaagcctctgggggtccttccgtgtttcagaagcctgtacgatttcaagttgatatctcttcgagcgaaggaccagagccaagtccccgacgtgacggaagcggaggtggcggaatctacagtgtgactttcacactgatctctggccccagccgccggttcaagcgagtggtggaaacaattcaggcccaactcttgtccactcacgaccagccttcagtgcaggcgctagcggatgaaaagaatggggcccagacaagaccagctggtgcgccacccaggtccctgcagcctccccctggtcggcccgacccagagctgagcagttccccacgacgtggacctcccaaagataagaaactgctggccacaaacgggactcctttgccctag

SEQ ID NO: 180673 - DNA, 1422 bp, synthetic construct
  misc_feature 1..1422: note = Description of Artificial Sequence: Synthetic coding sequence
  source 1..1422: mol_type = other DNA
atgcggagcctgcccagcaacggcgagctggaccccgacgtgctggaaagcatggcttccctgggatgctttcgtgacagagagcgcctacatagagaactgagaagcgaggaagaaaatcaagaaaagatgatttattatttgctcttggacagaaaggagaggtatcccagctgcgaggaccaggatctgccaccacggaacgatgtcgatccacctcggaagagagtggattccccgatgctcagccgccacggtaaaaggcggcccgagcgaaaaagcatggaggtattgtccataacggacgccggcggaggaggttctcccgtgcccacgcgaagagccctggaaatggcgcaacactctcagaggagtagatccgtatctggtgcatccacaggccttagctcgagcccgctcagtagtccacgctcccccgtgtttagtttttcccccgagcctggagccggcgacgaagcacggggcggaggctccccgacctctaagacacagacccttccatcacgcggcccacgaggggggggtgcaggcgaacagccccctccaccttctgccaggtcaactccactgcccggtccccctggttcaccccgaagctcagggggtacccctttacacagtcctctacacaccccccgagcgtctcccaccggtactcccgggactacgccacctccttctccaggtggcggcgttgggggcgctgcatggcgctccaggttgaattcaatccgcaactcgtttcttggcagtcctcgtttccacagacggaaaatgcaggtgccaaccgctgaagaaatgagttcactgaccccagagtcatcacctgaacttgccaaaaggagttggtttggaaactttatctctctggacaaagaagaacagatttttctggttctgaaggataaacccctgtcttcaattaaggccgatattgtacacgccttcctgagcatccctagcctttcacatagtgttctgtctcagacaagtttcagagctgaatacaaggccagcggcggccccagtgtgtttcagaaaccggtgcgctttcaggtcgacatctccagctcagaaggtcccgaacctagcccccgacgagacgggagcgggggcggtggaatctactctgttacttttacactcattagtggaccatcccgccggtttaaacgagtggtagagacaattcaagcccagttgctcagtactcacgaccagcctagcgtgcaggctctggccgacgagaaaaatggtgcacagactcgacctgcaggcgcgcccccgcgatcactgcagccaccccctggcaggcctgatccggagctaagcagctctcctaggaggggacctccaaaggacaaaaaactgctggcaacgaatggtacaccgctaccgtag

SEQ ID NO: 180674 - DNA, 1422 bp, synthetic construct
  misc_feature 1..1422: note = Description of Artificial Sequence: Synthetic coding sequence
  source 1..1422: mol_type = other DNA
atgcggagcctgcccagcaacggcgagctggaccccgacgtgctggagagcatggcgtcgctcgggtgttttcgtgaccgggagcgcctgcaccgtgaactcaggtccgaagaagaaaatcaagagaaaatgatctactatctgttactcgataggaaagagagataccctagttgcgaagatcaggacctgccacccagaaacgatgtggacccgccacgtaagagggtcgactcccctatgctaagccgacacggaaagagacgccccgaacggaagagcatggaggtcctcagcattacagacgctggtgggggcggttcgcccgtgcccacacgtagagctctggagatggcccagcacagtcaacggtcacgaagcgtgagtggagcctcaacggggcttagctcgtctccactgtcctcccctagatcacctgtcttctctttctctcctgaacctggcgctggtgatgaggcacggggcggcggttcccccacatccaagactcagactttacctagccgagggcccaggggaggcggtgccggagaacaaccgcctcccccttcagctcggagtacccccctgcccggccccccaggcagtcctagaagcagtggcggtacgccactgcacagccccctgcacactccccgagcctcccctaccggaactcccggaacaactcctcctcctagcccagggggcggtgtgggcggggctgcatggcggtcgcggttgaattctatccggaatagctttctgggctcccctcgattccaccgcaggaagatgcaagtgcccacagcagaggagatgtcttccctgactccagagtcttcacccgaactggccaagaggagctggtttggaaattttattagcctcgataaagaagagcagatttttttggtactcaaagataagccattgagctccatcaaggcagatattgtacatgcttttctgagtatcccatctctgtcccatagcgtgctgtctcaaacttcatttcgtgctgaatataaggcatcaggtggtccgtcagtttttcagaagccagtgaggtttcaagtcgacatttcttcctcagaaggacccgagccttcacctcgcagggacggctcggggggaggtggcatttattctgtgaccttcacactcatcagcggtccctcccggcgattcaaacgggtggtggagaccattcaggcccaactgctctctactcacgatcaacccagcgttcaggctcttgccgacgagaagaacggcgcgcagacaaggccagcgggtgcccccccacgcagtcttcagccaccacctggtcggccagacccggaattatcatcctctccaagaagaggtcctcccaaggacaaaaaattgctggccaccaacggaacccctctcccctag

SEQ ID NO: 180675 - DNA, 2976 bp, synthetic construct
  misc_feature 1..2976: note = Description of Artificial Sequence: Synthetic coding sequence
  source 1..2976: mol_type = other DNA
atgcggcaccgggtgtgccggggccggagcggccagggccggcggcgctctagcgttattccttggcctgtacccaaacatgtgggctgggtggtactgctggggtgtggggggagtggcacatccatcctggtcgtgtcgatcgtgggatcaggcttaatcaaggcgatggcccccgctgaaattcttaacggaaaagaaatctccgcccagataagagctcgcctgaagaatcaagtgactcagttgaaggagcaggttcccggattcactccgcggttggccatcttgcaggtgggtaatagggacgactccaatctatatatcaacgtgaagctgaaggccgccgaagaaatcggtattaaggcaacccacatcaaactgccaagaaccaccaccgagtcagaggttatgaaatacataactagtttaaacgaagattctacggtccacggatttctcgtgcaattaccactcgattctgagaactccataaacactgaagaggtgatcaatgcaatcgccccggaaaaagatgtggacggactgacctctattaatgccggtaaattagcccgaggcgacttgaacgattgcttcataccctgcacaccaaagggctgcttggagctgattaaggagacaggcgtgccaattgcagggaggcacgctgtggtggtgggccggagcaagatagttggagcgccaatgcacgaccttctgctgtggaacaatgcaaccgtgactacctgccactctaaaactgcccacttggatgaggaggtgaacaagggcgatatcctggtggtagctactggccagcctgagatggtcaaaggggaatggatcaagcccggcgccatcgtgatcgactgtgggattaactatgtgcccgatgacaaaaaaccgaatggtaggaaagtggttggcgacgtggcgtatgacgaagcaaaggagagagcaagttttatcacaccggtgcctggaggtgttggtccgatgaccgttgccatgctaatgcagtcaactgtggaaagcgcgaaacggttcctcgagaagttcaagccaggaaaatggatgatacagtataataatttgaatttaaaaacccccgtgccatccgacattgacatctcacggagctgtaagcctaagcctatcgggaaactggcccgggaaattggattgttgtccgaagaggttgaactctacggcgagacaaaagccaaggtcctgcttagtgctttagaacggctaaaacaccgacctgatggaaaatacgtggtggtcaccggcattacccctactcctctgggggaagggaagagcacaacaacaatcgggcttgtgcaggcactcggagcacatctgtaccaaaatgtgttcgcctgtgttcgccagccaagccaaggcccgacgtttggcataaaaggaggggcagccggtggaggatatagccaggtgattccaatggaggagtttaacttgcacctgaccggcgatattcacgctatcactgcagcaaacaacctagtcgctgctgcaattgatgcccggattttccacgagctgactcaaaccgataaagcacttttcaaccgtctcgttcccagcgtgaacggggtcaggcgcttctccgatattcaaattcggaggcttaaacgcctagggatcgagaaaaccgatccaactactctgactgacgaagaaattaataggttcgcccggttagatatcgatcctgagacaattacttggcagcgtgtgctggatacaaatgatcggtttttgcggaaaatcacaatcggccaagctccaacggaaaagggacacacaaggacagcccagtttgatattagcgtggccagtgaaattatggcagtattagccctcacaacctccctcgaggatatgagggagcgactgggaaagatggtggtagccagtagcaagaaaggcgagccggtcagcgctgaagacctcggcgtgtccggagctctgacagtgttaatgaaggatgcgatcaaacccaatctgatgcagacactcgaaggcacgccagtgtttgtccacgctgggcctttcgctaacatcgcacacgggaacagcagcattatagcagacagaatagccttgaaacttgtcggccctgagggcttcgtagtgaccgaggccggctttggggccgacatcggcatggagaagttctttaatatcaagtgtcgttatagcggactgtgccctcacgtcgtcgtgctggttgctacagtgagggcactcaagatgcacgggggggggcctaccgtcaccgccggtctgccacttcccaaggcttacattcaggaaaacctggagctcgtagaaaaagggttttcaaatcttaaaaaacaaattgagaatgctagaatgtttggtattcccgtcgtagttgcagtgaacgcatttaagacggacacagagtctgagctggacctcatctcccggctttctcgggaacacggggcgtttgatgccgtgaaatgtacacattgggccgagggagggaaaggagctctcgccttagcccaggccgtccagagggctgcacaggccccgagctcgttccagctcctttatgacctgaagttacccgtggaagataagatcaggattattgcccagaaaatctatggagctgatgatatcgagttgttacccgaggctcaacacaaggcagaagtgtataccaaacagggctttgggaatctcccgatttgcatggccaaaacccatcttagcttatcccataaccccgagcaaaagggcgtgcctaccggtttcatactgccaataagagacatccgcgccagtgtgggggctgggttcctctaccctctagtaggaacaatgtccaccatgccggggcttccaactagaccatgcttctatgatatagacctggatcctgaaacagagcaggtcaacggactgttctag

SEQ ID NO: 180676 - DNA, 1176 bp, synthetic construct
  misc_feature 1..1176: note = Description of Artificial Sequence: Synthetic coding sequence
  source 1..1176: mol_type = other DNA
atgttcagcccctggaagatcagcatgttcctgagcgtgcgggaggacagcgtcccgaccaccgctagcttttccgccgatatgctgaacgtgaccctgcagggtcctactctgaatggaacgtttgcacaaagcaaatgcccacaggtcgagtggctagggtggctcaacacaattcagcctccttttctgtgggtcctgttcgttctagcgacactggagaatattttcgttctctccgtgttctgcctgcataagtcctcgtgcactgtagcagagatttacctaggtaacctggctgctgcggacctgattctcgcctgcggactgccattctgggcgataaccatatctaacaacttcgactggttgttcggcgagaccttgtgccgcgtagtgaatgccattatctccatgaatctgtattcatccatttgttttctgatgctcgtcagcatcgacaggtatctggccctggtgaagactatgagcatgggtcgcatgagaggtgtaaggtgggctaaactgtatagtctggtgatttggggctgcacactgctgctctcttccccgatgctcgtcttcagaactatgaaggaatattccgatgagggtcataacgttacagcctgtgtcattagttaccccagtttgatttgggaggttttcactaacatgcttctcaatgtcgttggctttctgcttcccctatccgtcatcaccttttgcaccatgcagatcatgcaagtgctgcggaataatgaaatgcagaagtttaaagagatccagacagagagaagagccaccgtactggttttggtagtcttactgctcttcattatctgctggctgccattccaaatctcaacgtttctggacactctgcaccgcctgggcatcctgtcaagctgccaggatgagaggattatcgatgtcattacacagatcgcttccttcatggcttattcaaacagctgcttgaatcccctagtgtacgtgattgtcggcaaacggttccggaaaaaatcctgggaggtttatcaaggagtttgccagaaaggtggctgtcgaagtgagccaattcaaatggaaaacagtatgggtacccttaggactagtatatccgtcgagcgacagatacataagctccaggactgggctggatcacggcagtag

SEQ ID NO: 180677 - DNA, 1095 bp, synthetic construct
  misc_feature 1..1095: note = Description of Artificial Sequence: Synthetic coding sequence
  source 1..1095: mol_type = other DNA
atgctgaacgtgaccctgcagggccccaccctgaacggcaccttcgcacagagcaagtgtccgcaggtcgagtggctgggctggttgaacaccatccaaccccctttcttatgggtgctgttcgttctcgcaacactcgagaatatcttcgtgctcagcgttttctgcctgcacaaatccagttgcacagtggcggagatctacctcggtaatctcgccgccgccgacttaatcttagcatgcggcctgcctttctgggctatcaccatctccaacaactttgactggctgttcggggagaccctgtgtcgcgtggtgaacgctattatctcgatgaacctttactcctcaatctgcttccttatgctggtcagtatcgacaggtatcttgctctggtcaaaactatgtccatgggtaggatgcgtggagtccgatgggccaaactgtatagcttggtcatttgggggtgtactctgttactttcctccccgatgttggtctttcggactatgaaggagtactccgacgagggacacaacgtcacagcctgtgtgatctcgtacccctctctgatttgggaggtgttcaccaatatgctcctgaatgtggtgggattcctgttgcctctctcggtgatcactttctgcacaatgcagattatgcaggtactgaggaacaacgagatgcaaaagtttaaagagatacaaacggagcgtagagccacggtgttggtgctggttgtcctgctactgtttatcatctgttggctgccgtttcaaatctccacatttctggatactcttcacaggctgggcatactctccagctgccaggacgaacggataatcgacgtcattacgcagatagcctcatttatggcatacagtaatagttgccttaacccgctagtctacgtcatcgtcggtaagagatttcgaaagaaaagctgggaagtttaccagggagtgtgccaaaaaggcggctgccgtagcgagcccatccagatggagaattcgatgggaacgctacgtactagtatctcggtggagcggcagatacataaactgcaagattgggcgggaagtaggcagtag

SEQ ID NO: 180678 - DNA, 1095 bp, synthetic construct
  misc_feature 1..1095: note = Description of Artificial Sequence: Synthetic coding sequence
  source 1..1095: mol_type = other DNA
atgctgaacgtgaccctgcagggccccaccctgaacggcaccttcgcccagtccaaatgtcctcaggtggaatggttaggctggctcaataccattcagccccccttcttgtgggtgttatttgtgctggcgacgttagaaaacatcttcgtcttatccgtattctgtctgcataaatcatcttgtaccgtggccgaaatatatctcggtaacctggctgctgcagatctgattctggcctgtggtctcccattctgggcaataaccatttctaacaacttcgattggctcttcggggaaaccttgtgccgcgtggtgaatgcaatcatatcaatgaatttatatagctctatttgttttctgatgctggtgagtatcgacagatacctggcacttgtcaagaccatgtctatggggaggatgcggggcgtacgttgggccaaactatattccttggtaatttggggatgcacactgctgctctcttcccccatgctggtattcaggactatgaaggaatactcggatgaaggtcataatgtcacggcatgcgtcatcagctatccttcactgatttgggaagtcttcacaaacatgctcctgaacgtggtcgggttccttctgcccctcagcgtcattactttctgcacaatgcagattatgcaggtgctgcgcaataacgagatgcagaagttcaaagagatacaaaccgaaagacgtgcaaccgttttagtccttgtcgtcttgctcctcttcattatctgttggctaccattccagatcagtaccttcctcgacactctgcaccgactcggcatcctctcaagctgtcaagacgaacggataatagatgtgattacacagattgcttcatttatggcctactccaactcctgtttaaaccccctggtgtatgtaatcgtgggcaagagatttcgtaaaaaatcttgggaggtctaccagggcgtgtgtcaaaagggcggatgccgcagcgaaccaattcagatggagaacagcatgggcaccttgcgaacatccatcagtgtggagcgtcagatccacaaacttcaggactgggccgggtcccgtcagtag

SEQ ID NO: 180679 - DNA, 1176 bp, synthetic construct
  misc_feature 1..1176: note = Description of Artificial Sequence: Synthetic coding sequence
  source 1..1176: mol_type = other DNA
atgttcagcccctggaagatcagcatgttcctgagcgtgcgggaggattcagtgccgacgaccgcctcattcagtgcggacatgctgaacgtcactctgcaagggccgactctaaacggcacatttgcccaatcaaagtgtcctcaggtggaatggctgggctggttgaacaccattcagcccccgttcctttgggtgctttttgtgcttgcaaccctggagaacatcttcgtactgagcgtcttctgccttcacaagagctcatgtaccgtggccgagatctatctgggcaacttggctgccgctgaccttattctggcttgtggtctccctttctgggcaataacgatttctaacaactttgattggctgttcggggagactttgtgtcgggtggtgaatgccatcatttctatgaatctgtacagttctatctgctttctaatgctggtgtctattgacagatacctggctctggtgaaaacaatgagtatgggtcggatgcggggggtgcgctgggccaaactgtacagcctggtaatctgggggtgcacacttttgctgtcttcaccaatgcttgtcttccgtacaatgaaggagtatagtgatgaggggcacaacgtaactgcctgcgttatatcctatccttcactgatctgggaggtctttaccaacatgctcttaaatgtggtgggttttctgctccctctctccgtgatcacattctgtacaatgcagatcatgcaagtacttcggaataatgaaatgcagaaattcaaggagatccagactgaacggcgcgccacagttctggtgctggtcgtactgctcctgtttatcatctgttggttaccctttcagatcagtacctttctcgacaccctgcatcgacttggaatcctaagctcctgtcaggatgagaggatcattgatgtaatcactcagattgcaagtttcatggcctactcaaacagctgcctaaatcctcttgtgtatgtaatagttggaaagcgctttcggaagaaatcctgggaggtttaccaaggcgtgtgtcaaaaaggtggatgccgaagcgagccaattcagatggagaacagcatgggtactctgagaacatctatatcagtggagcgccagatccacaaactccaggactgggccggctcaagacagtag

SEQ ID NO: 180680 - DNA, 684 bp, synthetic construct
  misc_feature 1..684: note = Description of Artificial Sequence: Synthetic coding sequence
  source 1..684: mol_type = other DNA
atgggcggcaagctgagcaagaagaagaagggctacaacgtgaacgacgaaaaggctaaagagaaggacaaaaaagcagagggggccgcaacagaagaagagggtactcctaaggagagcgagccacaagcagccgctgaaccagcagaagcgaaggagggcaaggaaaaaccagaccaggatgctgagggaaaggcagaggaaaaagagggcgagaaggatgccgcagccgctaaagaagaggcccctaaggctgagcctgaaaagactgaaggcgcagctgaagcaaaggccgagcccccaaaggcaccagaacaggagcaggccgctcctggtcctgcagcgggtggagaagcgccgaaggccgctgaggctgcagcggctcctgccgaaagcgccgcccctgccgccggggaggagcctagtaaagaggaaggcgagcccaagaagacggaggcccccgccgcccctgccgcccaggagacaaagagtgacggcgcaccagcaagcgactccaaaccaggcagctcggaggccgcaccgagcagtaaggagaccccagccgctacggaggccccctcgagtactcccaaggcacaggggcccgcagcgagtgctgaggagcccaagcccgtggaggcccccgcagctaactctgaccagactgtgaccgtcaaggagtag

SEQ ID NO: 180681 - DNA, 522 bp, synthetic construct
  misc_feature 1..522: note = Description of Artificial Sequence: Synthetic coding sequence
  source 1..522: mol_type = other DNA
atgggcggcaagctgagcaagaagaagaagggctacaacgtgaacgacgagaaggcaaaggaaaaggacaaaaaggccgaaggcgccgcaaccgaagaggagggcactccaaaggagtccgagccccaggcagccgcggaaccagccgaggcaaaagagggtaaagagaagcctgaccaggacgccgagggaaaggcagaggaaaaggagggcgaaaaagacgccgcagctgccaaagaagaggctcctaaggccgagccggataaggaggaaggggagcccaagaagacagaggcacccgccgctcccgctgcccaggaaacaaagagtgacggggcgcctgccagcgactcaaagcctggcagtagcgaggccgctccttcctccaaagaaacgcccgcggcaacagaagccccaagtagcacgcccaaagcccagggtcctgcagcctccgccgaagagcccaaacccgtggaagccccagctgccaattccgatcaaaccgttaccgtcaaagagtag

SEQ ID NO: 180682 - DNA, 543 bp, synthetic construct
  misc_feature 1..543: note = Description of Artificial Sequence: Synthetic coding sequence
  source 1..543: mol_type = other DNA
atgggctgcggcggcagccgggccgacgccatcgagccccggtactatgaatcatggacacgagaaactgaatccacctggctgacctatacagactcagatgcaccaccatcggccgccgcacccgactcaggtcccgaagcggggggactccactccgtgctagaagcggaaaagagtaaaatcaaggctccaaccgacagcgtatctgacgaggggctgttctcagcaagcaagatggcaccactggccgtcttctcgcacggcatgcttgaggacggcctaccctctaacggagttccccgctcgactgcccccggaggtatccctaatcctgaaaagaagactaattgcgaaacccagtgcccgaacccccagtcactctcatcaggacctctcacccagaaacagaatggtttacaaacaacggaggccaaaagggacgccaagcggatgcctgccaaagaggtgacgatcaacgtcacagatagcatccagcaaatggacaggagtcgaaggattaccaagaactgcgtcaattag

SEQ ID NO: 180683 - DNA, 438 bp, synthetic construct
  misc_feature 1..438: note = Description of Artificial Sequence: Synthetic coding sequence
  source 1..438: mol_type = other DNA
atgggctgcggcggcagccgggccgacgccatcgagccccggtactacgagagctggacaagagaaacagaatctacttggctgacttatactgatagcgatgcacccccaagcgctgccgcccctgattctggccccgaggcgggagggctgcatagcggcatgttggaggatggtctgccttcaaatggggttccacggtctactgcccctggcgggattcccaatcctgaaaagaagaccaattgcgagacccagtgtcccaaccctcaaagtttatctagcgggccactgacacagaagcagaacgggcttcagactacggaagccaagcgtgatgcaaagcgcatgcccgcaaaagaggtgacaatcaacgtgaccgactcgattcagcagatggatagatccaggcgaataacaaagaattgtgtgaattag

SEQ ID NO: 180684 - DNA, 165 bp, synthetic construct
  misc_feature 1..165: note = Description of Artificial Sequence: Synthetic coding sequence
  source 1..165: mol_type = other DNA
atgggctgcggcggcagccgggccgacgccatcgagccccggtactatgaatcctggactagggagaccgaatcaacatggctgacatacactgactccgacgcccctccctcagctgccgcacctgacagcggccccgaagctgggggcctgcacagtggatag

SEQ ID NO: 180685 - DNA, 387 bp, synthetic construct
  misc_feature 1..387: note = Description of Artificial Sequence: Synthetic coding sequence
  source 1..387: mol_type = other DNA
atggagagcaaggaggagcgggccctgaacaacctgatcgtggagaacgtgaatcaggagaacgacgagaaagacgagaaagaacaggtagctaataaaggagagcccctggccctgccccttaacgtttctgaatactgcgtcccacgcggcaaccgtcgccgattccgggtaaggcaaccaatcctccagtaccgttgggatataatgcaccggctgggcgaaccccaagcgaggatgagagaggagaacatggagcgaatcggcgaggaggttagacaactcatggaaaagctccgggaaaaacaattgtcccactcgcttagagccgtatccacggacccaccacaccatgaccatcacgatgagttttgcctgatgccatag

SEQ ID NO: 180686 - DNA, 387 bp, synthetic construct
  misc_feature 1..387: note = Description of Artificial Sequence: Synthetic coding sequence
  source 1..387: mol_type = other DNA
atggagagcaaggaggagcgggccctgaacaacctgatcgtggagaacgtgaaccaggaaaatgatgagaaggacgagaaagaacaagtggccaataaaggcgaacctctcgccttgcctttgaatgtgtccgaatattgcgtaccccggggcaatcgaaggcgcttccgggtgaggcagcctatcctgcagtatcgatgggacataatgcatcgcctaggggaaccacaagctcggatgcgcgaggaaaacatggagcggatcggcgaagaggtgcggcaactgatggaaaagttacgcgaaaagcaattgagccacagcttaagggcagtgtcaactgatccacctcatcacgaccatcatgacgagttttgtctgatgccctag

SEQ ID NO: 180687 - DNA, 306 bp, synthetic construct
  misc_feature 1..306: note = Description of Artificial Sequence: Synthetic coding sequence
  source 1..306: mol_type = other DNA
atggagagcaaggaggagcgggccctgaacaacctgatcgtggagaatgtgaaccaagaaaacgacgagaaggacgaaaaggagcaggtagctaataagggcgagcctcttgctctacctcttaacgtgtctgaatactgtgtccctagggggaacaggcgcaggttccgagtgaggcagcccatacttcagtatcgctgggacattatgcataggttgggcgagccccaggctcgcatgcgcgaagagaacatggagcgtatcggggaagaggtccggcagctgatggagaaactgcgcgagtag

SEQ ID NO: 180688 - DNA, 483 bp, synthetic construct
  misc_feature 1..483: note = Description of Artificial Sequence: Synthetic coding sequence
  source 1..483: mol_type = other DNA
atgcagaagatggtggtgtgcggcgccaagtgctgcggcgacgccccccatgtcgagaatagggaggaagagaccgcacggatcggtcccggagttatggagtcaaaggaggagcgcgcactgaacaacctgatcgtcgagaacgtgaatcaggagaacgatgaaaaggacgaaaaggagcaggtggctaataaaggggagcccctcgcattgccacttaacgtgagtgagtattgtgtaccacgggggaaccgccggagattccgcgttcgccagccaatcctccagtaccgatgggatattatgcaccggttgggcgagccccaggccaggatgcgcgaagagaatatggagaggattggggaagaggttagacagttaatggagaaactgcgagagaagcagctctcccactcactaagagccgtctctaccgacccacctcaccatgaccatcatgacgagttctgccttatgccttag

SEQ ID NO: 180689 - DNA, 378 bp, synthetic construct
  misc_feature 1..378: note = Description of Artificial Sequence: Synthetic coding sequence
  source 1..378: mol_type = other DNA
atggagagcaaggagaagcgggccgtgaacagcctgagcatggagaatgctaaccaggaaaatgaagaaaaggagcaagtagctaacaagggcgagccactagccttgccattggatgccggtgaatattgcgtgcctagaggtaatagaaggcgcttccgggttcgccagcctatcctgcagtatagatgggacatgatgcatcggctgggcgaaccacaggcaagaatgcgcgaggagaacatggaaagaatcggggaggaggtgcggcagcttatggaaaagctgcgcgaaaagcagttatcccactccctgagagcagtctctactgatccgccccaccacgaccatcatgatgagttttgcctcatgccatag

SEQ ID NO: 180690 - DNA, 363 bp, synthetic construct
  misc_feature 1..363: note = Description of Artificial Sequence: Synthetic coding sequence
  source 1..363: mol_type = other DNA
atggagagcaaggaggagctggccgccaacaacctgaacggcgagaatgcgcaacaagagaatgagggaggagagcaggctcccacgcagaatgaggaagagtcccgacacctcggaggcggcgaagggcagaaacccggagggaacattagacgcggcagggtgagaagactggtaccaaatttcagatgggctatccccaaccggcatattgagcataatgaagccagagacgacgttgagaggttcgtgggacagatgatggagattaaacgcaaaacgcgggagcaacagatgaggcactacatgaggtttcagacgcctgaacccgacaaccactacgatttctgtctgattccgtag

SEQ ID NO: 180691 - DNA, 363 bp, synthetic construct
  misc_feature 1..363: note = Description of Artificial Sequence: Synthetic coding sequence
  source 1..363: mol_type = other DNA
atggagagcaaggaggagctggccgccaacaacctgaacggcgagaacgctcagcaggaaaatgagggaggcgaacaggccccaacccaaaacgaggaagagtctagacacctcggaggcggagagggccagaagccagggggaaacatcaggcgaggcagagtgcgccggctggtgccaaattttcgatgggctatcccaaataggcatattgaacacaatgaagcccgcgatgacgtcgaacgcttcgttggccaaatgatggaaatcaaaaggaaaactcgggaacagcagatgaggcattatatgaggttccagactcctgagccggataatcactatgacttctgcttgatcccctag

SEQ ID NO: 180692 - DNA, 336 bp, synthetic construct
  misc_feature 1..336: note = Description of Artificial Sequence: Synthetic coding sequence
  source 1..336: mol_type = other DNA
atggagaacgtgcccaaggagaacaaggtggtggagaaggcccccgtccaaaatgaggcaccagccctgggtggtggggagtaccaggaacctgggggtaatgtgaaaggagtgtgggccccgccagcccctggcttcggcgaggatgtgcctaataggctggttgataatattgacatgatcgacggcgacggcgacgatatggagagattcatggaagagatgagagagttacgaagaaagatacgggaattacagctgcgatacagcttacgaatcttaatcggtgaccccccacaccacgaccaccatgacgaattctgccttatgccatag

SEQ ID NO: 180693 - DNA, 336 bp, synthetic construct
  misc_feature 1..336: note = Description of Artificial Sequence: Synthetic coding sequence
  source 1..336: mol_type = other DNA
atggagaacgtgcccaaggagaacaaggtggtggagaaggcccccgtgcagaacgaggcacccgctctcgggggtggcgaatatcaagaacccggcggcaacgtcaagggagtatgggccccccccgctccaggatttggagaagacgtcccaaacaggctggtggacaacatcgacatgatcgatggtgatggcgacgatatggaacgcttcatggaggagatgcgcgagttgcgccgcaagattcgggagcttcagttgcgatatagcctgaggatactgatcggtgatccccctcaccatgatcaccacgacgagttctgcctgatgccctag

SEQ ID NO: 180694 - DNA, 378 bp, synthetic construct
  misc_feature 1..378: note = Description of Artificial Sequence: Synthetic coding sequence
  source 1..378: mol_type = other DNA
atggaccacaagcccctgctgcaggagcggccccccgcctacaacctagaagcggggcagggggactacgcttgcggccctcacgggtatggagccatcccagcggctccgcctccccctccttatccttacctggtgacaggaatacctacacatcacccccgggtctacaatatccatagccggacggtcactagatatccggctaatagtatcgtggtcgtcggaggttgcccggtttgccgggtaggcgtcctggaagactgttttacgttcctcgggatatttcttgccattattctctttccgttcggatttatctgctgcttcgcattgcggaagagacgctgtccaaactgtggggccacctttgcctag

SEQ ID NO: 180695 - DNA, 297 bp, synthetic construct
  misc_feature 1..297: note = Description of Artificial Sequence: Synthetic coding sequence
  source 1..297: mol_type = other DNA
atggaccacaagcccctgctgcaggagcggccccccgcctacaacctggaggcgggccagggagactatgcctgcggccctcacgggtacggggccatccctgccgcgccgcctcctccgccatacccgtacctcgtgaccggcattccaacacaccacccaagggtttataatatccactctaggactgtgacacggtatcctgctaatagcatcgtggtggtgggaggttgcccggtctgcagacaccagagatcctcctggctgtacacttatcccctgcgcgtttgtacctag

SEQ ID NO: 180696 - DNA, 1536 bp, synthetic construct
  misc_feature 1..1536: note = Description of Artificial Sequence: Synthetic coding sequence
  source 1..1536: mol_type = other DNA
atgagccggggccccgaggaggtgaaccggctgaccgagagcacctaccggaacgtgatggaacagttcaacccaggtctacgcaatctgatcaacctggggaaaaattatgaaaaagccgttaatgccatgattctggctggcaaggcttactacgatggcgtcgctaagattggggagatcgccaccggtagtcccgtctccaccgagctgggtcacgttctgatcgaaatttcatccacacataagaagctgaatgaatccctggacgagaacttcaagaagtttcacaaggagattattcatgagctggagaaaaaaattgaactggacgtgaagtatatgaacgccaccctgaaacgatatcagaccgagcacaaaaacaagctggagtctcttgagaaaagccaggctgagttgaagaagattcgacggaaatcacaaggttcccgcaatgccctgaagtatgagcataaggaaatcgaatatgtggaaacagtgaccagtaggcagtcggagattcaaaagtttatcgcggatggctgtaaagaagccctactcgaggaaaagcggcgtttctgctttcttgtggataaacactgcggtttcgccaaccatattcattattaccacctgcaaagcgctgagctgctgaattctaagctgcccaggtggcaggaaacctgtgtggacgctataaaagtcccggagaagattatgaatatgatcgaggagataaaaaccccagcatccactcctgtcagcgggaccccacaggcctcccctatgatcgagcgctcaaacgtagtccgtaaggattacgataccctcagtaaatgcagtcccaagatgccccccgccccaagcggcagggcctataccagccccctcatcgacatgttcaataacccagccacggctgcacctaactctcaaagagtcaacaattccaccggcacttctgaggacccaagtctacagcgctccgttagtgtggccacaggtctgaatatgatgaaaaagcagaaggtaaagactatcttcccgcacacggcgggctccaacaaaaccctcctttcctttgcccagggtgacgtgataactctgctgattccagaggagaaggatggctggctgtacggtgagcatgacgtgtccaaggcccgtgggtggttcccgagctcatataccaaactcctggaggaaaacgaaacagaagctgtgacagtgcctaccccttcccccacgcccgtcaggtccatttcaaccgtcaatttatcagagaattcctccgtcgtgatcccgccacccgactacctcgagtgcctaagtatgggagctgcagccgaccggcgagctgatagtgctcgaacaacctcgacctttaaggcccctgcatctaagcccgaaactgccgcccctaacgacgctaacgggaccgctaaaccaccatttttgagtggagaaaacccctttgcaacagtgaaactcaggcccaccgtgactaacgaccggtcagcccctattattagatag

SEQ ID NO: 180697 - DNA, 4656 bp, synthetic construct
  misc_feature 1..4656: note = Description of Artificial Sequence: Synthetic coding sequence
  source 1..4656: mol_type = other DNA
atggagaacaccggctggatgggcaagggccaccggatgacccccgcctgcccccttctcctgtctgtgattctgtcgttgcgcctggcgactgcctttgaccccgcgccttcagcctgctccgcgcttgcttcaggagtactgtatggtgcgttcagcctgcaagaccttttcccaacgatcgcgtcaggttgctcttggacactggaaaaccctgaccctaccaagtactccctgtatttacgttttaacagacaggagcaggtgtgtgcacactttgctccacgcctgctccctctggatcattacttagtcaatttcacctgtcttcgaccctctcccgaggaagcagtggctcaggcagaaagcgaggtcgggcggcccgaagaggaggaagcggaagcagccgcaggtctcgaattgtgctcagggtcaggaccgttcacctttcttcacttcgacaagaatttcgtccaactctgtctgagcgcagagccctcagaggccccaaggctgcttgctccagcagcgttggcttttcggttcgtggaggttctgctgatcaacaacaataacagctctcagtttacctgtggagttctttgcaggtggtccgaagagtgtgggcgtgctgctggccgcgcatgtggctttgcccagccaggatgctcttgccctggggaggccggggctgggagtactacgactacgtccccagggccgccagcagcccataccttaagcaacgccctcgtcccggggggcccggcacccccagcagaagcagacctacattccggatcctccaatgacttatttactacagagatgagatacggcgaggagcctgaggaggagccaaaggtcaagacacagtggcccaggtctgccgacgaaccaggcctgtacatggcacagaccggggacccggccgctgaggagtggagcccctggtcagtttgctctctaacctgtggccagggcctccaggtgcgtacgcgaagctgcgtgagcagcccctacggaactctttgttcgggtccattgagggagactcgcccttgtaacaacagcgccacctgtcctgtacacggcgtgtgggaggagtgggggagctggagtctttgttctagaagctgtgggcgggggtctaggagtcggatgcgcacttgtgtgccacctcagcacggcggaaaggcttgcgaggggccagaattgcaaactaaactatgctccatggcggcttgccctgtggaggggcagtggttagagtggggtccctggggcccatgctctacctcttgcgccaatggtactcagcagagatcacggaaatgttcagttgccggacctgcatgggccacctgtaccggtgcccttaccgacacgagggaatgctccaacctggagtgtcccgcaacagacagtaaatggggtccatggaatgcttggtctctgtgtagtaagacttgtgatactgggtggcagaggaggtttaggatgtgtcaagctaccggtacgcaagggtatccctgcgagggaacgggtgaagaggtgaaaccttgttcagaaaagagatgcccggccttccacgagatgtgtcgtgatgaatacgtcatgcttatgacctggaagaaggcggctgcaggtgagattatttacaacaagtgcccgcctaacgcctccggcagcgcctccagacgctgcttgctctcagcacagggcgtggcatattgggggcttccatccttcgcaagatgtatctcccatgagtacagatacctgtatctctctctgcgcgagcatctggccaaggggcagcggatgcttgctggagaaggtatgagtcaggtggtgcggtctctccaggagttgttagcccggaggacatattattccggggatttgctcttcagcgtggatatactccgaaacgtgacagacacatttaagcgcgccacgtacgtgccttccgcagatgatgtgcagcgcttctttcaagtggtttcgtttatggtggacgctgagaataaggagaaatgggacgacgctcaacaggtctcacccggttctgtccacctgcttagagtggttgaggactttattcatctggtgggagacgccttaaaggcctttcaatcttctttgatcgtcactgacaatctggtgatctcaatacagcgcgaaccagtcagtgctgtaagcagcgacataacatttcctatgcgaggacgacgcggaatgaaagattgggttcgtcatagcgaggatcgcctgttcctgcccaaggaagtactcagcctgagctcccccggaaaacctgcaacttccggggccgccggcagtcccggccgtggccgcggtcctgggaccgtgcccccggggcccggacatagtcatcagagactgttacccgctgaccccgacgagagttcttactttgtcattggagctgttctgtacagaacattgggtctgatcttgcccccaccacgccctcccctcgctgtgacaagcagggtgatgacggtcactgtccgaccgccgacacagccccctgcagaaccactgatcactgttgagctgagctatattatcaatgggaccactgatccccattgcgccagctgggactatagccgcgccgatgcttcctccggcgattgggacactgagaactgccaaacattagaaacccaggcagcccatacaagatgccagtgccaacacctgagtacttttgcagtactagctcagcccccgaaggacctgaccttagagctcgctggtagcccatctgtcccccttgtgatcggttgcgcagtttcctgtatggccctactgacactcttggcaatctatgcagcgttttggcggttcattaagagtgaacggtctataattctgctgaacttctgtctgagtatcctggcgtccaatatcctcattcttgtcggtcaatccagggttttatcaaagggagtttgcactatgaccgccgcgttcttgcactttttttttctgagctctttttgttgggttctgaccgaggcgtggcaaagttacctcgcggtgattggacgcatgcgcaccaggctcgtgcgaaagcggttcctgtgccttggatggggccttccggctctggtagtcgcagtatctgtcggatttacgaggactaaggggtatggcacttcatcctactgttggttaagcctggaaggaggtttgctctacgcatttgtcggccctgcggcagttatcgtccttgtgaacatgttaattggcatcatcgtatttaataagctcatggccagggacgggatcagcgacaagagtaagaaacagcgcgcaggcgcttcactgtggtctagctgcgtggtcctgcccctgctggctctcacatggatgtctgcggtgctggcgatgacggaccggcggtccgtgctgtttcaggccctttttgctgtattcaattcagctcagggttttgttattacagccgtgcactgcttcctgaggagggaggttcaagacgtagtcaagtgccagatgggcgtgtgtcgggccgacgagtctgaggatagtcccgacagttgtaagaatggacagttgcagattttgtccgactttgagaaagatgtggacctggcctgtcagaccgtcctattcaaagaagtgaacacttgtaacccaagcactataactggtacactttcgcggctttccctggacgaagacgaggagccaaagagctgtctcgtcggcccagagggctcactgagctttagccctcttccaggaaacatcctggtaccgatggcagctagccctggtttaggagaaccaccgccacctcaggaggcgaaccctgtgtacatgtgtggtgaaggcggtctgagacagctggacttgacatggctcagaccaacagagcccggttctgagggcgactatatggtgttgcctcggcgaacgctcagcctccagccaggaggaggtggaggcggaggtgaagacgctccccgagcgcggcctgagggcactccgagacgagcggccaagacagtggcccatacggaaggatacccttctttcctctcagtggaccactccggacttggacttggacctgcctatggctcactccagaatccctacgggatgaccttccaaccgcctccccccacccccagcgccagacaagtgccagagcccggagagcgaagccgtactatgcctcggaccgtccccggctccacaatgaagatggggtcactggaaaggaaaaagctacgctactctgatcttgacttcgaggtgatgcatacaagaaagcgtcactccgaactatatcacgaactgaaccagaagttccacactttcgatcggtataggtcacagtccacagcgaaacgcgaaaagaggtggagtgtgtcaagcggtggggctgctgagcggagtgtttgcaccgacaaaccaagcccaggagagcggccaagtctgtcccagcacaggcgacaccagagctggagcacgttcaaatctatgaccctggggagcctgcctcctaagccccgggagagactgaccctgcacagagccgccgcctgggagcccaccgagccaccggacggcgatttccagaccgaggtctag

SEQ ID NO: 180698 - DNA, 4755 bp, synthetic construct
  misc_feature 1..4755: note = Description of Artificial Sequence: Synthetic coding sequence
  source 1..4755: mol_type = other DNA
atggagaacaccggctggatgggcaagggccaccggatgacccccgcctgccccctgcttctttcggtgattctgagtctgagactggccacagcattcgaccccgccccatctgcctgcagtgccctggcctctggcgtactgtacggcgctttcagcttgcaggacctgtttcccacaattgccagtggatgttcctggactctggagaaccccgaccctactaagtacagcctgtacctgcggttcaatcggcaagagcaggtgtgcgctcatttcgccccgcggctgctacctctggatcattatctggttaactttacttgtctgcggccttcaccggaggaggccgtcgcacaggcagaaagcgaggtgggacggccagaggaggaggaagccgaagcagcggcaggcttggagctttgcagtgggtctggccctttcaccttccttcactttgataagaattttgtacagctgtgtttaagtgccgagccttcggaggctccgcgattgctcgcccctgcagccctcgccttccggttcgttgaggtgttattgatcaataataacaacagcagccagttcacctgcggggttctttgcaggtggagcgaagaatgtgggcgggctgccgggagggcatgcggctttgcccagcctggctgctcatgtcctggagaagccggggctgggtccactaccaccaccagccctggccctcccgcagcacacacactgtccaacgccctggtacctggaggtccagctccccccgcggaggcagaccttcattctggttcaagcaatgatttatttaccactgagatgcgttacggcgaggagcccgaggaagagcctaaggtcaaaactcaatggccacgttcagccgacgaaccaggactgtatatggcccagaccggagacccggctgccgaagagtggtctccatggagcgtttgcagcctgacttgcggccaaggactccaggtgaggacccgtagctgcgtctccagtccatatggaacgctgtgttctggacccctcagagagacccgaccttgcaacaacagtgccacctgccccgtgcacggagtttgggaggagtggggcagttggagtctctgctcaaggtcatgtgggagagggtctaggagccgcatgcgcacatgtgtgcccccccaacatggcgggaaagcatgtgagggcccagaactccagactaaactgtgcagtatggccgcatgtccggtggagggccagtggctggaatggggaccgtggggcccatgttccaccagctgtgccaacggaactcagcagaggagccgcaaatgctcggtggctgggcctgcctgggctacctgcactggggcgttgaccgatacacgggagtgctcgaatctggaatgccctgcaaccgattcaaagtggggcccatggaacgcttggagtctatgctcaaagacctgcgataccgggtggcagcggcggttcaggatgtgccaggccaccggaacccagggctacccctgtgagggaacaggtgaggaggtcaaaccttgcagcgaaaaaagatgtcctgccttccacgagatgtgcagagacgagtacgtgatgttaatgacatggaagaaggcagcagccggcgagattatttataacaagtgtccacctaatgcatccggctctgccagccgccggtgcctgttgagcgcccagggggttgcttattggggcttacccagtttcgcccgctgtatttcacatgagtaccgctacctgtatctgagcctgcgagagcacctggctaaggggcaaaggatgctggcaggggagggcatgagccaggtcgtgcgcagtcttcaggagttgctggcgcgccggacctactactcaggggatctgctcttctctgtggatattttaagaaacgtcacagacaccttcaaacgggctacttacgttccatctgctgatgacgtgcaaagatttttccaagtcgtttcctttatggtcgatgcggaaaacaaggagaaatgggatgacgcacaacaggtcagccctgggtcggttcacctcctccgggtggtcgaggactttatccacctggtgggggatgcattgaaggcgttccagagtagcctgatcgtgacagataatctggtaatctccattcagcgcgagcctgtgagcgccgtgagttccgatataactttcccaatgcgaggcagacgggggatgaaagactgggtacgccattcagaagacagattatttttaccaaaggaggtacttagtctttctagccctgggaagccagcaactagtggggctgctggcagcccaggacgcggtcggggtcctggtactgtgcccccgggaccaggtcactcgcaccaaaggttactacctgccgaccctgatgaatctagttacttcgtaatcggagccgtattatacaggactttaggactcatcctgcctccaccaaggcccccgctggcagtcacaagtcgcgtaatgacagtcactgtcagaccacctacgcagccccctgctgaaccactgatcactgtcgaactcagctacattatcaatggaaccaccgatccacattgtgcgagctgggattacagtcgtgctgatgcatccagtggagactgggacactgagaactgccagaccctggagactcaggccgcccatactagatgccagtgccagcatctgagcacttttgcagtcctagcccagccaccgaaagacctgaccctcgaactggcaggatccccctcagtcccactcgtgattggctgcgccgtgtcatgtatggccctgttaaccctcttagctatatacgcagcattctggagatttattaaatcagagagatcaatcatcttgctgaatttttgtttatccatcctcgctagtaacattctgatccttgtgggacaatcacgagtgctatccaagggcgtctgtaccatgacagcagctttcctgcattttttttttctcagcagcttctgttgggtgcttacagaggcttggcagagttatctggccgtaatcggtcgcatgcggacacggttggtgcgcaaaagattcctctgccttggctggggcctgcccgccctggtagtcgcggttagcgtgggcttcacccgcactaagggttacggtactagctcctattgctggctgagtttagaaggaggtctgctgtatgccttcgtgggtccagctgcggtcatagtgttagtgaacatgctcattgggataattgtgtttaacaaattaatggcaagggatggcatctccgacaagtctaagaagcagagagcaggctccgagagatgcccgtgggccagcctgctcctaccttgcagcgcatgcggggccgtcccatcgcctcttctcagttctgccagcgctcgaaatgccatggccagcttgtggtccagctgtgtggtgcttcctttactggctctaacttggatgtccgctgtgcttgcgatgaccgacagaaggtctgtgttgttccaagcactgtttgccgtcttcaactctgcccagggcttcgtaataacagctgtgcactgctttctgcgccgtgaggtgcaggatgtcgttaaatgtcagatgggcgtatgtagagctgatgagagtgaggatagccccgactcctgtaaaaacggacagttgcagatcctgtctgactttgagaaggatgtggacttagcctgtcaaacagtgctattcaaggaagtgaatacgtgcaacccaagcacaatcaccggaaccttgagccgcttatcattggatgaagacgaggaaccaaaaagctgcttagtgggccctgaagggtctctgtcctttagcccactgcccggtaatattttggtgccgatggccgccagtcctggtctaggagagccacctccccctcaggaagccaaccctgtttacatgtgcggggaggggggactaaggcagttggatctgacctggttacgccccaccgaacccggatctgaaggcgattatatggttcttccccgccgaacgctcagcttgcaacctggaggcgggggtggaggcggtgaggacgccccccgtgctagacccgagggcaccccccgtcgcgccgctaaaaccgtcgctcatactgaggggtatccatcttttctgtcagtagatcattctggattaggcctgggtccagcatatggaagccttcagaacccatacgggatgactttccagccccctccccctactccatcagcccgccaagtcccggaaccaggtgaacggagccgcactatgcctagaaccgtgcccggctctactatgaagatgggctcgctggaaagaaagaagctgcgctattcagatctggactttgaagtgatgcatacaagaaagagacatagcgagttatatcacgagctcaatcagaagttccataccttcgaccggtatagatcacaatcgacagccaagagggagaagcgctggagcgtgtcaagcggaggcgccgccgagaggagcgtgtgtactgataagccttctcccggcgagcgcccatcactctctcaacaccggcggcatcaaagctggagcacgtttaaaagcatgactctaggctcgttaccccctaagccaagagagaggttgactctgcaccgggccgccgcttgggaaccgaccgaaccacctgacggggattttcaaactgaagtgtag

SEQ ID NO: 180699 - DNA, 4758 bp, synthetic construct
  misc_feature 1..4758: note = Description of Artificial Sequence: Synthetic coding sequence
  source 1..4758: mol_type = other DNA
atggagaacaccggctggatgggcaagggccaccggatgacccccgcttgtcccttgctccttagcgtcattctcagcctaagactggctacagcgttcgatccggccccgtcagcttgtagcgccctagccagcggcgttttgtacggagctttttctctccaggacctgtttcctacgattgcctccggctgttcatggacactagagaatcccgacccaaccaaatactccctgtatcttcgatttaatcggcaggagcaggtgtgtgctcattttgctcccagactgcttccacttgaccactatctggtgaacttcacatgtctgagacccagcccagaagaggctgttgctcaagcggagtcagaagtcggacgacccgaagaagaagaggctgaagctgcagctggattagagctgtgcagcggctctgggccatttaccttcctgcactttgataagaattttgtccagctgtgcctgagcgctgagccaagcgaagcacctcgccttctggcgccagcagcgctcgctttccggttcgtggaggtcctgctgattaataataacaacagcagtcaattcacctgtggcgtcctctgccggtggagcgaggagtgcgggcgtgcagcagggcgcgcgtgtgggtttgcccagccagggtgttcctgtccgggggaagccggggccggaagcacaacaaccaccagtcctggtccaccagccgcccacactctgagtaacgccctggtccccgggggaccagctcctcccgcagaagccgacttgcacagcggctctagtaatgatctgttcacaaccgagatgcgctatggtgaagaaccagaagaggaacctaaagtaaaaacccagtggcctcggagtgccgacgagcccggactatacatggcccagactggggacccagccgctgaggagtggagtccatggagtgtgtgcagtttgacatgcgggcagggactgcaggtgaggacccgatcctgcgtgtcgtcgccatacgggaccctgtgctcaggccctcttcgggagactcgcccctgtaataactcagcaacatgccctgtgcatggggtatgggaggaatggggatcgtggtccctgtgctcgaggtcctgtggaagagggtccaggtctaggatgaggacgtgtgtgccaccgcaacatgggggcaaggcctgcgagggcccagagctgcaaacaaaactgtgcagtatggccgcgtgccctgtggaagggcagtggctcgagtggggaccttggggcccatgttctacttcatgtgcaaatggcactcagcagcgttctcgcaagtgcagtgtggccggccctgcttgggctacctgcacaggcgccctcacagatacaagggaatgctctaatctggagtgtcccgccactgactcaaagtggggtccctggaacgcgtggtccctgtgtagtaagacttgcgacactggctggcagagaagattcagaatgtgccaggccacagggactcaaggctatccatgcgaaggtacaggggaggaggtgaaaccttgtagcgaaaagagatgccccgcattccacgaaatgtgtcgagatgagtatgttatgctgatgacatggaagaaggcggctgccggtgaaatcatctacaacaagtgtcccccaaacgcatccggaagcgccagtcgtcggtgcctcttgtcggcccaaggcgtggcatattggggactccccagcttcgcccgatgcatcagccacgaataccgttacttgtatctgagccttagagagcacctagcgaaagggcagaggatgctggccggagagggcatgtcccaagttgtgcgctcccttcaggagctgttagcacggcgcacttactactctggggatttgctgttctcagtagacatcctgcgcaacgtaacggatacattcaagcgggccacctacgtgccgtcagccgacgacgtacagaggttctttcaggtggtgtcgttcatggtcgatgctgagaacaaggaaaaatgggatgacgctcagcaggtctcccccggatctgtgcatcttctccgggtcgttgaagatttcattcacttggtgggcgacgctcttaaggcctttcagtccagccttatagtcacagacaacctggttattagcattcagcgggagcccgtctcagctgttagttctgacatcaccttccccatgcgcgggaggagggggatgaaggactgggtcaggcactccgaggataggctttttctacccaaggaagtccttagcctatcctcccccggaaagccggctaccagtggcgccgctggcagcccggggcggggcagaggacctggtacagttcctcccggaccaggtcattcccatcagcgcttgctgccagctgatccagatgagagctcttattttgtgatcggagccgttttgtaccggacactgggtctgatattaccgcccccaagacctccactcgcggtcacatctagggtcatgacagtgacagtgcgacctccgacccaaccccctgccgagcctttgattaccgtggagctgagttatattatcaatggaaccactgacccgcactgcgcaagctgggactatagtcgcgccgacgccagctccggcgattgggatacagaaaattgtcaaaccctagagacgcaggcagcccacacaaggtgccagtgccagcacttatctactttcgcagtgctggcacagccgcccaaagacttaacattggagctggccggttctccctccgtgccacttgtgattgggtgcgccgtatcttgcatggccttgctgaccttgctggcaatatacgccgccttctggagattcatcaagtcagaacgatccatcatcctgcttaacttctgtctgtcaattctagctagcaatatcttaattctggttggtcaatcacgggtcctgagcaaaggagtatgtaccatgacagccgcctttcttcacttcttttttctgagcagcttttgttgggtgctcaccgaagcctggcagagctatctggcagtcatcgggcgcatgagaacccgcctcgttaggaagaggttcctgtgcttaggctgggggctgcccgcgctagttgtggctgtgtcggtggggttcactaggacgaaaggatacggtacatccagctactgctggttgtctctcgagggagggctactgtatgcatttgtcggcccagccgcggtgatagtgctggtgaacatgttgatcggcatcattgtattcaataaacttatggcgcgggatgggattagcgataaaagcaaaaagcaaagggccgggagtgagcgctgcccgtgggcttctctcctgctgccttgtagcgcctgcggtgccgtgcccagtccactcctgagttccgcaagtgcaagaaatgctatggcaagcctctggagttcatgtgtggtgcttccactgttggctctgacctggatgagtgctgtattggctatgacagatcgcaggtccgtgctcttccaggctctgttcgctgtgtttaacagcgcccagggctttgttataacggccgtgcactgttttttaagacgtgaggtgcaggatgtggtgaagtgccaaatgggagtatgcagagctgatgaaagtgaagattcaccagatagctgtaagaacggccagcttcagatcctgagcgattttgaaaaggatgtggaccttgcttgccaaacggttctgtttaaggaggtgaacacctgcaatcccagcactatcaccggtaccctgtccagactttccttagacgaggatgaggaacccaagtcttgtctggttggccccgagggaagcctctcgttttcaccccttccaggtaatatcttggtgcccatggccgcttcaccaggtctaggcgaacctcctcctcctcaggaagccaaccctgtgtacatgtgtggcgaaggagggctgcggcagctggacctgacatggctgcggccaacagaacctggcagtgagggcgactatatggtgctgcccaggcgaactctgtcgttgcagcctgggggcggcggggggggcggagaggacgcacctcgagcccggcctgaaggcacccctcggagggccgcgaagaccgtggcacacaccgagggatacccatcattcctgagcgtggaccactctgggctcgggctgggacctgcctatgggagcctccagaacccctatgggatgacattccaaccaccccctccaacaccatcagccagacaggtccccgaaccaggggagcgctcaaggacgatgccacgcacagtgcccggcagtacaatgaaaatggggagcttggagcgtaaaaaattacgctatagtgacttggacttcgagaaggtgatgcatacccgcaaaaggcactccgaactctatcacgaattgaatcagaaattccacaccttcgaccgctatcgttcgcagtccactgcgaaaagggagaaaagatggtccgtttccagcgggggcgctgccgagcggagcgtttgtaccgacaaaccgtcccctggcgagcgccccagcctcagccagcaccgtcgacaccagagctggtccacctttaagtccatgacacttggaagtttgccacccaaaccccgcgagcggttaacccttcaccgcgccgccgcctgggaacccacagaacctccggatggagattttcagactgaagtatag

SEQ ID NO: 180700 - DNA, 4665 bp, synthetic construct
  misc_feature 1..4665: note = Description of Artificial Sequence: Synthetic coding sequence
  source 1..4665: mol_type = other DNA
atgacccccgcctgccccctgctgctgagcgtgatcctgagcctgcgcctggccaccgcatttgaccccgccccgagtgcctgttccgccctcgcatcaggggtgctgtatggggcattctcactccaggacctcttcccgactattgcctcaggatgttcttggacactggaaaatccggaccccacgaagtattccctgtacttgcgatttaatcgccaggagcaggtttgtgctcacttcgccccccggctgctgcctctcgaccactatctggttaatttcacctgcctccgcccttctcccgaagaagctgtcgcccaggccgaatccgaggtgggccggcctgaagaggaagaagcagaagccgcagccggcctggagttgtgcagcggatctggaccctttacgtttttgcatttcgataagaatttcgtgcagttatgcctgagcgctgagcccagtgaggccccacgactgttggccccagctgccctcgcctttcgtttcgtggaagtgctgctgatcaataacaacaacagcagccaatttacatgcggggtgctctgccgctggtcagaggaatgcggtcgcgcagccggaagagcttgtggctttgcacaacctggctgtagctgtccaggcgaggctggcgctggatccaccactactacttcgcctggtccacccgcagcacacactctctccaacgcacttgtgcccggtggccctgcaccgccagccgaggcagatctgcacagcgggtcctcgaatgatctgttcacgacagaaatgaggtacggggaggaaccagaggaggagcccaaggttaagacgcaatggccgcggtcagctgacgagcctggcttatacatggcccagacaggggatcctgccgcggaagaatggagtccctggtccgtgtgctcacttacgtgtggccaaggcctccaagtcagaacaaggtcctgcgtttcaagtccctatggcaccctgtgcagcggcccattacgcgagaccaggccttgcaacaactccgctacctgtcccgtgcatggcgtgtgggaggagtggggttcgtggtccctgtgttccagatcatgtggccgcggcagtcggagcaggatgcggacatgcgtgccccctcagcatggaggtaaggcttgcgaggggccggaattacaaacaaaactgtgctctatggccgcgtgtcctgtggagggtcaatggcttgagtggggaccctgggggccatgcagcaccagctgtgctaatggaacacaacagcggtccaggaaatgctcggtagctggaccagcctgggcaacctgcaccggcgcccttactgataccagagagtgctccaacctggagtgtccagccaccgacagtaagtggggtccctggaacgcctggtcgctctgctccaagacctgtgatactgggtggcaacgccgctttcgtatgtgtcaggcgactggaacccagggttacccctgcgaagggacgggcgaggaggtaaagccttgttccgaaaagcggtgtcccgcatttcacgaaatgtgccgcgatgagtatgtgatgctaatgacatggaaaaaagcagccgccggcgagataatctacaataagtgcccccccaatgcatccggttcagccagcagacgctgtttgctttccgcccagggggtggcatactggggactgccaagtttcgctagatgcatctcacatgagtacagatacttatatctctctctccgggaacacttggccaagggccagcgcatgttggctggagagggtatgtcgcaagtggtgaggagcctgcaagaactcttagcaagacgcacctactattcgggcgatctgctcttttccgtggacatcctgcgcaacgttaccgacaccttcaaaagagctacgtatgttccctccgctgatgatgttcagagattctttcaagtggtcagtttcatggtggacgcagagaataaggagaaatgggacgatgcacagcaagtgtcccccgggtcggtacacctgcttagagtggtcgaagatttcatacatctcgtcggggacgcactcaaggccttccaatctagtctcatcgtgaccgacaatttagtgatctccattcagcgggaaccggtcagtgcagtgtcttccgacatcacattccctatgcggggcagaagagggatgaaagactgggtcagacacagtgaggaccggcttttcctaccaaaggaggtgctgtccctctcgtcacctggcaaacctgccacatcaggagccgcaggctcaccagggagaggaagaggcccaggcacagtcccaccagggccggggcatagtcaccagaggttactgcctgccgatccggacgaatccagctactttgtgattggtgccgtgttatatcggacactcggcctgattcttcccccacctcggcccccccttgctgtgacatcgcgagttatgacagtaacggtacgacctcccactcagccaccagctgagccattaatcacagttgagctctcatatatcatcaacgggaccaccgacccccattgtgcttcctgggactacagtagagccgatgcctcctccggggattgggacactgagaactgtcagactctcgaaactcaggccgcccacacgaggtgtcaatgtcagcatctttcaaccttcgccgtgctggcccaacccccaaaagatctcacacttgagctggccggcagtccctcagtacctctggttatcggttgtgcagtctcatgcatggcgctactgaccctcctcgccatttatgctgcattctggaggttcattaagtccgagaggtccattatattactgaatttctgcttgtctattttggcgtccaatattctgatcttggtcggtcaaagcagggtgctttctaaaggtgtttgtacaatgaccgctgcatttctgcacttcttctttctcagcagtttctgctgggtgctaactgaggcttggcagtcatacttggccgtcattggccgaatgcgtacgcgtcttgttaggaaaagattcctatgtctgggatggggactccctgctcttgttgtcgcagtcagtgtcgggttcactcgcactaaaggctatggcacctccagctattgctggctctcgctggaggggggactgttgtatgccttcgtgggcccagccgcagtcatagtgttagtgaacatgctcatcgggatcatcgtgtttaacaagctgatggcacgggatggtatttcagacaaatccaagaagcagagggccgggagtgaacggtgtccatgggcttctctcttactgccctgcagcgcctgtggggcggtgccatcgccactgttatccagtgccagtgcccggaatgcaatggccagcttgtggagtagttgcgtcgtgctccccttactggctctcacgtggatgagtgccgtgttggccatgacggaccgccgctccgtcctgttccaggctctgtttgcagtatttaacagtgctcagggcttcgtcataacggccgtgcattgctttttgaggcgcgaagtgcaggacgttgtgaagtgccagatgggcgtttgtagggcggacgagtccgaggactcccctgattcatgtaaaaacggtcagctccagatcctcagcgacttcgaaaaagacgttgacctagcttgtcagaccgttctgtttaaagaggtgaacacctgtaatccaagcactatcacaggtactctttctcggctgtctctggatgaggacgaggaaccaaaaagctgcctggttggtccagagggttcactcagcttctcgcccctgccgggcaatattctggtgccaatggcagcaagtcccggactcggggagcccccccccccccaggaggccaaccccgtctacatgtgcggcgagggcggtctccgccaactggacctcacttggttgcgtcctactgaaccaggcagtgaaggcgattacatggtgctgcctcggcgcaccctgtcactgcagcctggtggcggggggggtgggggggaagacgccccaagagccaggcccgaaggcaccccaagaagggcggctaagacggtagcccacacagaaggctacccaagcttccttagtgtggaccatagcgggctcggtctggggccggcctatgggtcccttcaaaatccatacggcatgacgtttcagcccccccctcctacgccaagtgccaggcaagtccctgaacctggagaaagatctcggaccatgccacgaaccgtccctgggagcaccatgaagatgggcagtcttgaacggaagaagctcaggtactccgacctcgacttcgaaaaggtcatgcacacaagaaaacggcatagcgagctataccacgaactcaaccagaaatttcatacattcgaccgctataggtcccagtcgactgccaaggacaagccatcccctggagagaggccaagcctctcccagcaccggcgccatcagtcatggtcaacattcaagtccatgaccctggggagtttgccccccaaacctcgcgaaaggctgactctccaccgcgcggccgcctgggagccgactgaacctcctgatggtgactttcagactgaggtatag

SEQ ID NO: 180701 - DNA, 4401 bp, synthetic construct
  misc_feature 1..4401: note = Description of Artificial Sequence: Synthetic coding sequence
  source 1..4401: mol_type = other DNA
atgacccccgcctgccccctgctgctgagcgtgatcctgagcctgcggctcgccactgccttcgaccctgccccatccgcatgtagtgcgttggccagcggagttctatacggggccttcagtctgcaagacctatttccaacaatcgcttcaggatgttcctggaccctggagaatcccgaccctacaaaatacagcctgtacctacgatttaaccgccaggagcaagtctgcgcccatttcgccccgagactgctgcccctggatcattatttggtgaacttcacatgcttgcgaccatctcctgaagaggcggtggcccaggctgagagcgaagttggaaggcccgaggaagaggaagccgaagctgctgccgggctggaactatgcagtgggagtggaccctttacttttctccacttcgataagaactttgtgcagctatgcctgtccgccgaacccagtgaggcgccacgactgctggcccccgcagctcttgcctttcggttcgtcgaagttctgctgatcaacaacaataattcaagccagttcacatgtggcgttctctgccgctggagtgaggagtgtgggcgagctgccgggagggcttgtggcttcgcgcagccggggtgcagctgcccaggcgaggccggcgcagggtccaccactacaacttctcccggacccccggccgcccatacactttcgaatgccctcgtgcccggcgggcctgccccccctgctgaggcagatctccattctggatctagtaacgatctcttcacaaccgagatgcggtatggggaggagcctgaggaagagcccaaggtgaagacacagtggccacggtccgcagatgaacccgggctctacatggcacagacaggggaccccgcagccgaagagtggagcccctggtcggtgtgctctctaacgtgcggacagggtctgcaggtgcgtacgaggtcatgtgtgagtagcccgtacggtactttgtgcagcggtccactcagagaaaccaggccatgcaacaactcggcaacctgtcccgtggagggacaatggctggaatggggtccatggggcccttgttccaccagctgcgctaacggcacccagcagagatcccggaagtgctcagtggccggccctgcgtgggcaacatgcaccggcgccctgaccgacactagggagtgctctaacttagagtgtcccgccaccgattcgaagtgggggccatggaacgcctggagtctatgtagcaagacctgcgatactggctggcagaggaggtttaggatgtgtcaggccaccggtactcaaggttatccatgtgagggaactggagaggaggttaagccttgtagcgagaagcggtgccccgcctttcacgaaatgtgtcgggacgaatatgttatgctgatgacctggaagaaggccgccgccggcgaaatcatctacaataaatgccctcctaatgcttcgggctccgcttcccggcgatgcctgctgagtgcacagggcgtggcctactggggtctcccgtccttcgcacggtgcatcagccacgagtatcgctatctttacttgagtcttagggaacacctggcaaaggggcagcgtatgctcgccggggaggggatgtctcaggtggtccgtagccttcaggaactgctggcgcgcagaacatactatagtggagatctactattcagtgtggatattcttcggaatgttactgacacctttaaacgcgctacatacgtgccctctgctgatgacgtgcagaggttcttccaggtggtgtcatttatggtggatgccgagaacaaagagaagtgggacgacgcacagcaggtgtccccaggctctgttcatttacttcgcgtcgtagaggacttcattcacctggtgggggacgcgctgaaagcattccagtcttccctcattgttaccgacaacctggtgatctccatccaacgagagcccgttagcgctgtctcttcagatattacgttccctatgcgtggtcgcagagggatgaaggattgggttaggcacagtgaggaccggctctttttgccgaaggaggtgctttcgctcagctcgccaggaaaacctgccacctccggggccgccggctcaccgggccggggccgcggcccagggactgtgcctccaggccccgggcattcccaccagcgacttctgcctgctgaccctgatgaatcttcctattttgttataggagccgtcctgtatcggacactgggcctgatcctaccgccccctagaccaccactcgccgtcacaagccgggtcatgactgtgacagtgcggccacctacgcagccaccagccgagcccctcatcaccgtggagctgagctatattatcaatggaacaaccgacccacattgtgctagctgggactattctcgcgctgatgctagtagtggtgactgggacaccgagaattgccagacgctggagacccaagcagcccacacacgttgccaatgtcagcacctgtcaactttcgcggtgctagcccagcctcccaaggacctaacactggaactggctggatcccccagcgtgcccttagtaattggctgtgctgtgtcgtgtatggcgctactgacactcctggccatctacgctgccttctggcgtttcattaagagtgaaaggtctataatccttcttaacttttgcctctctatcttggcatcaaacatccttattctagttggtcagagccgggtcttatctaagggagtgtgcaccatgacagccgcattccttcacttcttcttcttgtctagtttctgttgggtgttaaccgaggcttggcagtcctatctagctgtgattggaagaatgaggacccgactcgtccggaagcgatttctctgcctgggatggggcctcccagctttagtggttgccgtgtcagtggggtttacccgcacaaagggctacggaacctcctcatattgctggctgagccttgagggaggactgctgtatgcctttgttggacctgccgcagtcatcgtcctggtgaatatgctcataggcataatcgtgtttaataagttgatggccagggacggcataagcgataagtccaaaaaacagagagctggggcctcactctggagtagttgtgtagtgctgcccttactggctctgacctggatgtcagccgtgctggctatgacagacaggaggtccgtgctgtttcaggccctttttgccgtcttcaatagcgctcagggtttcgtgattacagctgttcactgctttttgagaagagaagtacaggatgtcgtcaaatgtcagatgggagtatgtagagccgacgagtccgaagacagcccggactcgtgcaaaaatggccagctgcaaatcctctccgacttcgagaaagatgtggacctagcttgccagacagtactttttaaggaggtcaacacatgtaatccctctacgattaccgggaccttatctaggttgtctctggatgaagacgaggagccaaaatcatgccttgtcgggccggaagggagcctttcctttagcccattgccaggaaacatactagttccaatggctgctagcccaggactgggcgagccacctccaccacaagaggctaacccagtgtatatgtgtggggaaggcggactcaggcagcttgatctcacgtggttgaggcctacagagccaggctcagaaggagactatatggtgttgccaaggagaaccctgagcctgcagccaggcgggggtggcggtggaggcgaggatgcacctcgcgcacgacccgagggaacccccaggagggctgccaaaacagttgctcacacggagggataccctagtttcctatcggtcgatcactcaggcctcggtcttggcccagcctatggctccctgcagaacccatacggtatgaccttccagccacctcctccgacccccagcgctcgacaggtgcccgagccaggcgagagatcaagaactatgccgcggaccgtccctggaagtacgatgaaaatggggagcctggaaagaaaaaagctgaggtattccgatctggattttgagaaagttatgcacacccgcaagcggcattccgagctgtaccacgagctgaatcaaaagtttcatacctttgatagatatagaagtcaatcaacggcaaaggataaaccctccccgggggagaggccatctctttcgcaacacaggcgccatcaaagctggagcactttcaaatcgatgactctgggatctttaccaccaaaaccaagagaacgccttacactgcacagagctgccgcttgggaacccaccgaaccgcccgacggggacttccagacggaagtctag

SEQ ID NO: 180702 - DNA, 4500 bp, synthetic construct
  misc_feature 1..4500: note = Description of Artificial Sequence: Synthetic coding sequence
  source 1..4500: mol_type = other DNA
atgacccccgcctgccccctgctgctgagcgtgatcctgagcctgagactggccactgccttcgaccctgcaccatcagcttgtagcgcactggccagtggggtcctatacggggccttcagtctgcaagacctcttcccaacgatagcctcaggttgctcttggaccctggaaaatcccgaccccacaaaatattctctgtacttgagattcaatagacaggaacaggtgtgcgctcatttcgctccaaggctcttacccctggatcattatctagtgaactttacttgcttgaggccttcccctgaggaagcagtcgctcaggcagaatcagaagtagggcggccggaggaggaggaagctgaagccgcagccggtcttgagctgtgttcggggagcgggcctttcaccttcctccatttcgataagaacttcgttcagctatgtctttccgccgagccatccgaagctcctcgattgcttgcccctgccgccctcgcctttcggttcgtggaggtgctgctgatcaataataataactcatcccagtttacctgtggagtgctgtgtcggtggagtgaagaatgcggcagggccgctggacgggcatgtggatttgcccagcctggctgcagttgcccaggggaggccggtgctggttctacaaccaccacttcccccggccccccagccgcccacacgttgtctaacgcactggtccccggcggacctgcacctccggctgaagctgacctgcatagtggcagtagcaatgacctgttcacaaccgaaatgaggtatggcgaggaaccagaagaggagccgaaggtgaagacgcaatggccacgtagcgccgatgagcccggcctctacatggcccagaccgtgcatggagtgtgggaagaatggggctcatggtcactttgcagccgttcctgtggtagaggctccaggagtcgcatgcgaacctgtgtgccaccacaacacggaggtaaagcgtgtgagggtcccgagctccagaccaaactatgctccatggctgcctgtccagtcgagggccagtggctggaatggggtccctggggcccttgtagtacctcctgcgctaacggaactcagcagcgctcccggaagtgttccgtagcaggccccgcttgggccacatgtaccggcgctttgacggatactagggaatgttcaaacctagaatgccctgctaccgattccaaatggggaccctggaatgcctggtccttatgcagcaagacttgtgacaccggctggcagcgaaggttccgtatgtgtcaggccaccggaacgcaaggatatccatgtgaaggaactggagaggaagtaaaaccatgttccgagaagcgctgtcctgcgtttcacgagatgtgtagagatgaatacgttatgctgatgacctggaaaaaggccgctgcaggcgagatcatttacaataaatgcccacctaacgcgtccggtagtgccagcagacggtgcctgttgagcgctcagggcgtcgcttattggggcttgccctcatttgcccgatgtattagccatgagtaccggtatctctaccttagtctgagggaacatttggcgaaaggccagcgaatgctcgcgggtgaaggcatgagccaagtggtgagatccctgcaagaattgttggctcggcggacatattatagcggcgatctgttattctccgtggatattcttcgcaacgtgacagacacgtttaagagagccacatacgtgccgtctgccgacgatgtacagcggttttttcaagtggtcagctttatggtagatgccgagaacaaagagaaatgggatgatgcgcagcaagtttcccctggatctgtacatctgctgcgggtagtcgaggacttcatccatctcgtgggagatgccctcaaggcatttcaaagttcactgatagttactgacaatctggtcattagcattcaaagggaaccagtctccgccgtgagcagcgatatcacgtttcccatgaggggccggcggggaatgaaggactgggttagacattccgaggaccgattattcttgcccaaggaagtgctgtccctttcatcgcccggaaaacctgccacttctggtgctgctggtagtcccggtaggggaagaggaccaggcactgttccgcctggcccaggtcacagtcaccagcgcctgcttccagctgacccagacgagtcatcatattttgtgattggggccgtcctctatagaacactgggcctgatcttgcccccccctaggccgccactagccgtgacaagcagggtcatgacagtaacagtgcgccctccaacgcagcccccagccgagccactgataaccgtggaattgagttatataatcaacggaaccactgatccccattgcgcctcatgggactattcaagggcagatgcctcatctggggactgggatacagaaaactgtcagacgctcgagacacaggcagctcatacccggtgccagtgccagcatctgagcacttttgcagtgttggcccaacccccaaaggacctcacattggagctcgctgggtcaccctccgtcccgctggtcatcggctgtgctgttagctgcatggccctgctgaccttgctggccatctacgcagctttttggcgatttatcaagtcagaacggtctatcattctcctaaatttctgcctgtctattctcgcttctaatatactcatcctggttggacagagcagagtgctgagcaagggcgtttgtaccatgacagccgccttcctgcacttcttcttcctctcctcattttgttgggtactcactgaggcttggcagtcttatctcgccgtcattggtcgcatgcgtacgaggttggtgcgtaagaggttcttgtgccttggttgggggctgcccgctttagtggtggctgtgtcagtgggctttactaggacaaagggctacggcacgtcctcctattgctggctcagcttagagggaggactcctctacgccttcgtcggacctgcggctgtgattgttctggtcaatatgctgatagggattatcgtcttcaataaactcatggcgcgagatggaatcagcgacaagagcaaaaaacagcgagctgggtccgagcgctgcccttgggcaagtctcttactgccatgctccgcttgcggagccgtacccagcccactgctgtctagcgcgagcgccagaaacgccatggcttctctctggagcagttgtgtggtcctgcccctgttagctctcacttggatgtccgccgtgttagcaatgacggatcggcgctctgtgctcttccaggcgcttttcgcggtttttaattcagcccagggcttcgtgatcaccgcagtgcactgttttctgcggcgagaagtgcaggacgtggtcaaatgccagatgggggtatgccgcgcagatgagtccgaagactcacctgactcgtgtaagaacgggcagctgcagatcctgtccgacttcgaaaaggatgttgatctcgcatgccagactgtgctgttcaaggaagtgaacacatgcaacccgagcacaattaccggaaccctatctagactgagcctggacgaggacgaggagcctaagtcttgcctggtggggccagagggatccttgagtttcagccccctgcctggcaacatcctggtcccaatggctgctagtcctggcctcggcgaaccaccaccaccccaggaggcaaatcccgtttacatgtgtggtgaaggtggcctccgccagcttgatctcacatggctgagaccaacggagccggggtccgaaggagactacatggttctccccaggaggaccctcagcctgcagcccggagggggaggaggcggaggcgaagatgcacctagggcacgtcctgaaggaaccccgaggcgagcagcaaagactgtcgctcacaccgaaggatatcctagcttcctctccgtggaccatagcggcctcgggcttggccctgcgtacggctcactccaaaatccttacggcatgacattccaacctccgccccccacccctagtgcccggcaggtgccagagccaggcgagcggtctcggaccatgccacgcactgtgcccgggtctactatgaaaatgggttccctagagcgtaaaaagctgcgatattccgatctggacttcgagaaagttatgcacacaagaaaacggcattctgagctgtaccacgagttgaaccaaaagtttcatacattcgaccgataccgatcccagtctacagccaaggataagcccagcccaggcgaaaggccatctctatcacagcacagacgccaccagagctggtccacctttaagtctatgaccctaggttcgctgccccctaagccacgcgaacgccttactctgcaccgagccgctgcctgggagcccaccgaaccaccagacggggacttccagaccgaggtctag

SEQ ID NO: 180703 - DNA, 4503 bp, synthetic construct
  misc_feature 1..4503: note = Description of Artificial Sequence: Synthetic coding sequence
  source 1..4503: mol_type = other DNA
atgctgagcctgcggggccccgacacccacggcaagggccaccggatgacacctgcctgtccccttctactgagcgtgatcttgtcactgcgcttggctacggcttttgaccccgccccctccgcctgctctgcgctggcaagtggcgtgttatacggggccttctcactgcaggacctgttcccgaccatcgccagcgggtgttcctggacgctggaaaacccggatcccacgaagtatagcctatacctgagatttaacaggcaggagcaagtgtgtgcgcacttcgctccccgactgttgcccttagaccattacttagtgaacttcacctgccttagaccatcaccggaagaggccgttgcacaagccgagtcagaggtcggtaggccagaagaggaggaagctgaggccgcagccgggctggaactgtgtagcggctctggcccctttaccttccttcactttgacaagaattttgtgcagctatgcctatcagcagaaccatctgaggccccacgcttgctggcacctgccgctttggcgttccgatttgtggaggttttattaatcaacaacaataactcttctcagtttacctgcggcgtgctctgtaggtggtcagaagaatgcggccgggcggcaggccgggcttgcggatttgctcagcccgggtgcagctgtccaggcgaagctggtgccgggagtaccacgacaacttcccctgggccacctgccgcccatacactaagcaacgccctcgtgcctggcggaccggcacctcctgccgaagccgacctccattccggcagctccaacgacctattcacaacagaaatgagatacggtgaggaacctgaagaagagcccaaggtgaagacacagtggccaaggtccgccgatgagccaggactctatatggctcagactgtacacggcgtgtgggaagagtgggggagttggtccctttgttctcggtcatgcgggcggggatcaaggtcacgcatgagaacatgtgtaccaccacagcatgggggaaaagcatgcgaagggccagagcttcagactaagttatgcagcatggccgcttgtccagttgagggccagtggctggagtggggtccctggggaccttgtagcacatcttgcgccaatggtactcagcaaagaagcaggaagtgctctgtggccggccctgcctgggccacctgcacgggggcactgaccgacacccgcgagtgttccaatctcgagtgtccggccaccgattcaaaatgggggccgtggaatgcttggtctctatgtagtaagacctgtgacacgggatggcaaagaaggttcaggatgtgccaggcaacaggcactcagggctatccatgcgagggaaccggcgaagaggtaaagccctgtagtgaaaagcggtgtcctgccttccatgaaatgtgtcgcgacgaatacgtaatgctaatgacatggaaaaaggcagccgctggcgagatcatatacaataagtgcccacccaatgccagtggcagcgcaagtcggagatgtcttttgtctgcccagggcgtcgcttactggggcctaccttcattcgccagatgtatcagccatgagtaccgctatctctacctgtcactgagggaacatcttgccaaagggcagagaatgctggcaggcgagggtatgagccaagtggtgcgcagcctacaagagttattggctagaagaacatactactctggggaccttctattctcagtggatatcctccggaacgtgacggatacttttaaaagagcaacctatgtgccgagtgctgatgatgtgcagcgcttcttccaggtagtctcattcatggttgacgcagaaaataaggaaaaatgggatgacgcccagcaggtgtcccccggttccgtgcacttactgcgggttgtggaagacttcattcatctcgttggggacgctctcaaggccttccagagctccttgattgtcacagataatttggtaatctccatccagagggagccagttagtgccgtcagtagcgatataactttccctatgcggggacggcgggggatgaaggactgggttcggcactctgaagaccggctgttcctgccaaaggaggtactttctctctccagcccagggaaaccggctacttccggtgcagccgggtccccagggcgcggccgtggcccaggcaccgtccctcctggcccaggacatagccaccagcgtctcctacctgctgacccggacgagtccagctacttcgtgatcggagctgttctctaccgcactttaggcctgatcctgcctccccctaggccacctctggcagtgacctctagagtcatgactgttaccgtccggccgccgacacagccacccgctgaaccgctcattaccgtcgagctgagctacatcataaacggtactaccgacccacactgcgcatcttgggattatagtcgcgctgatgcctcttctggagactgggataccgagaattgtcagactctggagacgcaggcagcacataccagatgtcagtgtcagcacctgtccacattcgccgtactggcccaaccgccgaaggacctgacactagaactagccggtagtccgagtgtgccactggtaataggctgcgccgtgtcttgcatggcattactcactttgttggccatctatgccgctttctggaggtttatcaagtccgagaggtctataatcctcctaaatttctgcttaagcatcttggcatccaatatactcatactcgttggacagtctcgggtgctgagtaaaggcgtatgcacgatgactgcagcctttctgcacttcttttttctgagctccttctgttgggtattgaccgaagcatggcagagttacctagctgtgatcgggcgtatgcggactagattggtcagaaagcgttttctctgcctcggatggggcttgcctgcacttgttgtggcagtgagcgtcggctttacaaggacaaagggatacggcacttcttcatattgttggctttcgctggagggaggcctcctgtatgcgttcgtgggtcctgcagctgtcattgtcctggttaatatgctgattggaataatcgtctttaataagctgatggccagggacgggatttcggacaagtcaaagaagcaacgagcaggcgccagtctgtggtcctcttgtgtcgtcctgccactgctggccttgacttggatgagcgccgttctggcaatgaccgatcgtcgctctgtgctttttcaggccctgttcgctgtgttcaactcagcacaaggattcgtcatcacggccgtccattgctttctcaggagggaggtccaggatgtggtcaagtgccagatgggagtctgccgggcagatgagagcgaagactcacccgatagttgtaagaatggccaattgcagatcctgtcagacttcgaaaaggatgtggacctggcttgccagactgtgctgttcaaagaggtcaacacatgcaatcccagcaccattaccggcacacttagtcgactttcactcgacgaggatgaggagcctaaaagttgcttggtcgggccagaaggatcattgtcgttctctcctttgcctgggaacatcctcgtgccaatggccgccagccccgggctcggcgagccaccacctccccaggaggcaaacccagtttatatgtgtggcgagggagggttacgacagctagatctgacgtggctgcggccgacagaacccggctcagaaggagattacatggtgctcccccggagaaccctctccttgcaaccggggggcggaggcgggggaggagaggacgcgcctagggcaaggccagaaggcacgccaaggcgcgcggccaaaacagttgctcatacagagggctatccatcattcttgagcgtggatcacagcggcctgggcctgggaccagcctacggctcgctccaaaacccatacggtatgacatttcagcccccaccccctacaccttcagcccgccaggtgcccgagccaggagagcggtcaaggaccatgcccaggaccgtgcccggttccactatgaagatgggctctctcgagcggaaaaaacttaggtattcagatctcgatttcgaaaaagtgatgcacactaggaagcgacacagcgagctgtatcatgaactgaaccagaaatttcatacgttcgaccgctatcgaagccagtctaccgcaaaacgcgaaaaaagatggtcggtaagcagcggaggtgccgcagaacgaagtgtctgcactgataaaccttccccaggcgaaagaccaagtctgagccagcacaggcgccatcagagctggtcaactttcaagagcatgacgctaggtagtctcccacctaagcctcgtgagcgcctgacactccaccgggctgcggcctgggagcccacagaaccacccgatggcgactttcagaccgaagtatag

SEQ ID NO: 180704 - DNA, 2544 bp, synthetic construct
  misc_feature 1..2544: note = Description of Artificial Sequence: Synthetic coding sequence
  source 1..2544: mol_type = other DNA
ggcaagggccaccggatgacccccgcctgccccctgctgctgagcgtcattctatccctgaggctagccactgcctttgatcccgccccctcagcctgtagcgccttggcttccggcgtactgtacggggcctttagtctgcaggacctttttccaactatcgccagcggctgtagttggactttggagaatcccgacccgaccaagtactccctctacctaaggttcaatcgacaggaacaggtttgcgctcacttcgcacctcgcctactcccgctggatcactacctagtgaactttacttgtctgaggccctcacctgaggaagccgttgctcaggctgagtctgaggtagggcggccagaggaggaggaagctgaggcagctgcaggtctggagctgtgtagtggaagtggaccttttaccttcctgcatttcgacaaaaattttgtacaactatgtctgtctgctgagccatccgaagctccacgcctcctggccccagccgccctggcctttagattcgtcgaagtgctccttatcaacaataacaatagctcccaattcacctgcggtgtgctctgccgctggagcgaggagtgcgggcgcgctgctggccgagcttgtggctttgctcagccaggctgtagttgtcctggggaagccggggctggatcgaccacaaccacctcacccggtccacctgccgctcacaccctgtccaacgcacttgttcccggggggccggctccccccgcggaagccgacttgcattcaggctcctccaacgatctcttcactaccgaaatgcggtatggggaggagcctgaggaagagcctaaggtgaaaacacaatggccacgatctgccgacgagcccgggctgtacatggcacagaccggtgatccggctgctgaggagtggtcaccatggagtgtgtgttcattaacatgtggccaaggcctccaggtgcgcacccgaagttgtgtgagttccccttacggcacgctttgtagcggtccacttcgagagacccgaccttgtaataattccgccacatgccctgtcgaaggacagtggttggagtggggaccctgggggccttgtagcacttcctgtgctaacggaactcagcagcgcagcaggaagtgctctgtagccgggcctgcttgggccacctgcacaggggccctcacggatacaagggaatgcagcaacctggagtgtcccgcaacagacagtaagtggggaccctggaacgcctggagtttgtgttctaagacatgcgatactggatggcagcgacggttccgaatgtgtcaggccacaggaactcagggctacccttgtgagggtacgggtgaggaggtcaagccatgctctgagaagcgttgtccagcctttcatgaaatgtgtagggatgagtacgttatgctgatgacctggaagaaggcagctgccggggaaattatctataataagtgcccaccaaacgcatcaggcagcgccagcagaagatgcctccttagtgcccaaggggtcgcctactggggtctgccatcgttcgctaggtgcatctcacatgaataccgatacctttacctcagcctgcgggagcatctggctaagggccagaggatgctggccggcgaagggatgtcacaggtggtacgtagcctccaagaactcctagcacgtcggacctactatagtggtgatttgcttttttcggtagacattctccgcaatgtcacagacacattcaaacgcgccacctacgttccatcggccgatgacgtccagcgattcttccaagtggtaagctttatggtggatgctgaaaacaaggaaaaatgggatgatgcacagcaagtctcacccggctccgtgcatcttttgcgcgttgtggaggatttcattcacctggtgggagacgccctcaaagcattccagtcctctctgatcgtgacggataacttagtcatctccatccagcgtgagccagtgtctgccgtcagctcagacatcacattcccaatgcggggcaggcgtgggatgaaggactgggtaaggcatagcgaagacaggttgttcttaccaaaggaggttctgagcctctctagcccgggcaagcccgccacatctggggctgcaggttctcccgggcgagggcggggtccgggaaccgtgccacctggaccggggcacagccaccagaggcttctgcccgccgatccagacgagtcgtcatatttcgtaatcggtgccgtactctatagaactcttggactcatactgcccccacccaggccacctcttgccgtgacaagtcgggttatgacagtgaccgtgagacccccaacccagccgccagctgagcctttgatcacggttgaattaagctacattattaatggaaccacggatccacactgcgccagctgggactacagtagggccgatgcttcctcgggggactgggacaccgaaaattgccagacactagaaacacaagccgcgcacactcgatgtcaatgccagtag

SEQ ID NO: 180705 - skipped

SEQ ID NO: 180706 - DNA, 3528 bp, synthetic construct
  misc_feature 1..3528: note = Description of Artificial Sequence: Synthetic coding sequence
  source 1..3528: mol_type = other DNA
atggcccagaccgtgcacggcgtgtgggaggagtggggcagctggtccctctgctcacggagttgtggcagaggctcacgctctcgcatgcgcacatgcgtccctccgcagcatgggggcaaggcttgcgagggaccagagctccagactaaattgtgctcaatggctgcctgccctgttgagggccagtggttggaatggggtccgtggggtccttgttctacctcatgtgcaaatggtactcagcagcggtcgcggaaatgttctgtagctggacccgcttgggccacctgcacaggagcgcttactgacacgagagagtgtagtaatttggagtgccctgctactgacagcaagtggggtccatggaatgcctggagtttatgttccaaaacatgcgataccggatggcaaagacgtttcagaatgtgccaggctactggcacgcagggctacccttgcgaagggaccggggaggaagtcaaaccttgttctgagaaaaggtgccccgcgttccacgaaatgtgtagggacgagtacgtgatgctgatgacctggaagaaagcagctgcaggcgaaatcatctacaacaaatgtccgcctaacgcatcggggagtgcctccagacggtgcttgctgtccgcccaaggtgtagcttattggggtctgccttcgttcgccaggtgtatttctcacgagtatcgatatttatacctgagtctgcgagagcacctggcaaaggggcagagaatgttagcaggagaaggaatgtctcaggtggtccgctcactgcaggagctgctggctcggcgcacatactacagcggcgacctactctttagtgttgacatcttgagaaatgtgactgatacgtttaagagagcaacctacgttcccagcgctgacgacgtgcagaggttttttcaagttgtgagttttatggtggacgcagagaataaggaaaagtgggacgacgcccagcaggtgagtcccggcagcgttcatctgctccgagtcgtggaggatttcatacacctggttggggatgctctgaaggcgttccagtcaagcttgatcgtaaccgataacctggtcatttctatccagcgagagcctgtttctgccgtgagctcagacataactttccccatgcgcgggcggcggggcatgaaggactgggtgaggcacagtgaggatagattgttccttcccaaggaggtgctttctctgagctcgcccggcaaaccggctacttccggagcagccgggagcccaggcagaggacgcgggcccgggaccgtccccccgggcccagggcactctcaccagaggctcttgccagccgaccctgacgagagctcttacttcgtgataggcgcagtcctgtaccgaaccttgggcctgatccttcccccccctcgtccaccattagcagttacgagtagagttatgacggtaactgtcagacctcctactcagcccccggctgagccgctgatcactgttgaactgagctatatcattaatgggacaacagaccctcactgcgcttcctgggattattcccgagctgatgcatcctctggcgactgggatactgagaactgtcaaacactagagacccaagccgctcacacaaggtgtcaatgtcaacacctgtctacgttcgctgtgttagctcaaccacctaaagatctgaccctagagctggctggcagcccgtcagtgccactagtgattggatgcgctgtttcgtgtatggctctgctaacactccttgccatctacgcagcgttttggcggtttattaagtccgaaaggtccatcattcttctgaacttttgcctatccattctggcctctaacatcctaatcctggtaggacagtctagggtcctgagtaagggagtgtgtactatgaccgctgcctttctacatttcttctttctaagctcattctgctgggtgttaactgaggcgtggcaatcttacttagcggtgattggaagaatgcgcacaaggttagttcgaaaaagatttctgtgcttaggctggggactccccgccctggtggttgcagtctctgttggattcactaggactaaaggatatggtacctcgtcttactgttggctcagcttggagggaggcctgctgtatgcattcgtgggccccgctgccgtgatcgtgcttgtgaatatgctgatcggaatcattgtgtttaataaactgatggcacgcgatggaatttctgacaagtcaaagaagcaaagggctggagcgtccctgtggtcttcatgcgtcgtattgccgttgctggctctgacatggatgtcagccgtcctggctatgactgacaggcgatctgtactttttcaggcactgtttgccgtttttaattctgcccagggctttgtcattacagcagtccactgttttctgcggagagaggttcaggacgttgtgaagtgccagatgggcgtgtgcagagccgatgaaagcgaagattcccccgatagttgtaaaaacgggcaactgcagattctgagcgacttcgagaaggatgtggacctggcttgtcagactgtactatttaaggaagtaaacacctgtaatccatctacgatcaccggcacccttagtcgcctctccctggatgaggatgaagagccaaaatcctgcctggttggccctgagggtagtttgtctttctcacctttgcccggaaacatacttgtcccaatggccgcgtcgccaggacttggcgagccaccgcccccacaggaagccaaccctgtatacatgtgcggtgaggggggactcaggcagctggacctgacctggctgaggccgacggagccgggcagcgagggagattacatggtcctgcctagacggacgcttagtctgcaacccggtggtgggggcgggggcggcgaagatgccccgcgggcgcgccctgagggtacgccccgccgcgcagctaagaccgttgcgcacacggaaggctaccccagctttctttccgtcgaccacagcggactcggactgggtcccgcttacggatctctgcagaacccctatggcatgactttccagcctcctccccctacacctagtgccaggcaggttccagagccgggggaacgatctcgcacaatgccacgcacagtcccaggaagcacaatgaaaatgggcagcctggagcgcaagaagctgcgttattccgatctagatttcgaaaaggtgatgcatactagaaaacgacattcggagctgtaccatgaactaaatcaaaagtttcatacctttgaccgataccggtcacagtcaaccgctaaagataagcccagccccggggaaagaccctccctgagccaacaccgccggcatcagagctggagtacatttaaatctatgaccttgggctcactaccaccgaaacctcgggaacgcctcaccttgcatagggctgccgcgtgggagccaacggaaccccccgatggagacttccagactgaggtgtag

SEQ ID NO: 180707 - DNA, 4656 bp, synthetic construct
  misc_feature 1..4656: note = Description of Artificial Sequence: Synthetic coding sequence
  source 1..4656: mol_type = other DNA
atggagaacaccggctggatgggcaagggccaccggatgacccccgcatgcccattgttgctgtcagtgatactctctctcagactggcgactgcgtttgatcctgcgcctagcgcgtgtagcgcactagctagcggcgtgctgtacggcgctttcagcctccaggacctgttccccactattgccagtggatgttcttggactctcgagaatccagaccccacaaagtattcgttatacttacggtttaaccggcaggaacaggtgtgtgctcatttcgcacctagactactgccacttgaccattatctcgtcaacttcacatgtctccggccctctcccgaagaagcagttgctcaagccgaatctgaagttgggagaccggaagaagaagaagcagaggccgccgcggggttggaactttgctctggctccgggcctttcaccttcctccacttcgacaagaatttcgtgcagttgtgtctctccgcggagccctcagaagcccctagactcttggcacccgcagcactcgctttccgctttgtggaggtcctgcttattaataacaataatagctcccagtttacgtgtggtgtgctgtgcaggtggtcagaagagtgtggacgggctgccgggcgcgcgtgtgggtttgcacagccgggttgtagctgtccaggagaagcgggggccggatccaccaccacaacgtcgcccggaccgccggccgcccatacactgagcaacgctctagttccgggggggcctgcaccacctgcagaagccgatctccattctggatcatccaacgacctgttcactaccgagatgaggtatggtgaagaacccgaggaagaaccaaaggtcaaaacacagtggccccggtccgcagacgagcctggtctctatatggcgcagacaggtgaccccgccgctgaggagtggtccccttggtccgtctgctctttgacgtgtggccaggggttacaggtccggacccgttcctgcgtgtctagtccctacggcaccctttgctccggcccactgagagagacacgaccgtgtaacaactctgccacctgtccagttcatggagtttgggaagaatggggctcctggtccctgtgctcccggtcctgtggtcgcggaagtaggagtagaatgcggacatgtgtccccccccagcatggcgggaaggcgtgtgaggggcctgagctgcaaactaagctttgcagcatggcagcctgcccagttgagggacagtggctggagtggggaccctgggggccctgcagcacgagctgcgcaaatgggacgcagcagcgcagtcgcaagtgctcagtggcaggcccagcatgggccacatgtacaggcgcccttactgacacccgggagtgcagtaacctcgaatgtcccgctacagactctaagtggggtccatggaacgcctggtctctttgctcaaagacctgcgatactgggtggcagcgccgattccgcatgtgtcaggccactggaacccaaggctacccgtgcgaaggcaccggtgaggaggtgaagccatgttcagagaaacgctgccctgctttccatgagatgtgcagggacgagtacgtgatgctgatgacctggaaaaaggccgccgccggtgaaatcatttacaacaaatgtcctccaaacgcgtccggctccgcaagtcggcgctgcctcctctccgcccagggagtcgcatattggggcctgccttcattcgctcgatgcatttcccatgagtatcgttacttgtacctgagtttgagggagcatcttgccaagggacaaaggatgctggcgggtgagggcatgtcccaggtggtcagatccttacaagagctcctggcgcggagaacttattatagtggagatctgctgttctccgtggacattctgcgtaatgtcacagacacatttaagcgggcaacgtacgtgccttccgccgacgatgtgcaaagattctttcaggttgtcagttttatggttgacgctgaaaacaaggagaagtgggacgacgctcagcaggttagtcctggatcagtccacctgctgagggtggtggaagactttattcatctggtgggcgatgctctgaaagcattccagagcagcctaatcgtcaccgacaatttagttatcagcatccaacgtgaacctgtgtctgcagtgtcctcagacatcacattcccaatgagaggtcgaagaggtatgaaggactgggtgcgccattcagaggaccggttgttccttcccaaggaagttctgtccttgagctcgccagggaagcccgcaacctccggggctgctggctccccaggaagggggcgggggcctggtactgtgccccctggcccagggcattcacatcagcgcttgctgcctgctgatcccgacgagtcatcttatttcgtaataggcgctgttttataccgtaccttaggcctgattctgccaccgccaaggcccccgttggcggtcacgtccagggtgatgactgtgaccgttcgaccgcctacacagccgcctgctgaaccactgataactgtggagctcagctacataataaacggtaccacggatccccactgtgcctcctgggattattctcgagccgatgcatcctccggcgattgggacactgagaattgccagaccctggaaacccaggccgcgcacactcgttgccagtgccagcacctatcgaccttcgccgtgctcgcccagccccccaaggacctcaccctggaactcgcagggtcaccaagcgtcccgctcgtcatagggtgtgcagtttcctgtatggcactgctgaccctcctggcaatctacgcagccttctggcgattcatcaaatccgagcgcagcatcatcctgctcaatttctgcctaagtatcctggcctcgaatattctcatcctggtcgggcagtcccgagtgctgagcaagggggtgtgtaccatgacagctgcgttcctacacttcttcttcctttcgagtttctgttgggtacttactgaggcttggcaatcatatctggctgtaatcggtaggatgagaacccgcttggtgcgcaagcgattcctgtgcctgggatgggggctccctgcgcttgtggtggcggtgtcagtgggcttcacacgaacaaagggctacggcacgagcagctattgttggcttagtttagagggaggtctgttatatgctttcgtgggtcctgccgcggtcattgtgctggtgaatatgttaattggaattattgtttttaataaactgatggcacgggatggtattagcgacaagtcgaaaaaacaacgggccggcgccagtttgtggagtagctgtgtagtcctgcccttgctggccttaacatggatgtctgcagtgctcgcgatgacagaccgacgttccgtcctgtttcaggccctcttcgccgtgtttaactctgctcagggattcgtaataacggccgtccactgtttcctgcgtagagaggtgcaggatgtcgtgaagtgccagatgggcgtgtgtagagccgatgagagcgaggacagcccagattcatgcaaaaatggtcagctccagatcctgagcgattttgagaaagatgtggaccttgcctgtcaaaccgttctttttaaagaagtgaatacatgcaatccctcaacgatcacaggcaccctgagccgactctctcttgacgaagacgaagagcccaaaagttgcctagttggccccgagggatctctctctttcagcccactccccgggaatattctcgtccctatggccgcaagccctggcctcggagaacctccaccccctcaagaagcaaaccctgtttacatgtgtggggaagggggactgaggcagctcgatctaacctggctcaggcccacagaacctgggtctgaaggagattacatggtgctgccacgacggactctgagcctgcagccaggcggtggcggtggggggggagaggatgcacctagggcccgcccagaagggacccctagacgggctgccaagaccgtggcgcacactgaaggctatccctccttcctgtctgtggatcactctggtctgggactggggcccgcttatggatcactgcaaaacccttacggtatgacctttcagccccctccaccgacacccagtgcccgccaggtgcccgagcccggagaacgatccaggactatgcctaggacagtacccggctcgacaatgaagatgggatccttggaaagaaagaaactgcgatattcagacctggatttcgaagtcatgcacactcggaagagacactctgagctttaccacgagctgaaccagaaattccacacttttgaccggtaccgctcccagagcactgcaaaaagggagaagcgatggagcgtctcctccggaggcgccgcagagagaagtgtgtgcacagataagcctagtccaggcgaacggcctagcttgtctcaacaccggcggcaccagtcctggtctaccttcaaaagcatgaccttagggtcgctcccaccgaaacccagggagcgtctgactctgcatcgcgcagccgcctgggagcccacggaacccccagatggggatttccagacggaggtttag

SEQ ID NO: 180708 - DNA, 2187 bp, synthetic construct
  misc_feature 1..2187: note = Description of Artificial Sequence: Synthetic coding sequence
  source 1..2187: mol_type = other DNA
atgctgctgccccagggcaaggaggccgtggagggcaagaagtgccaggggaggcaacggcgcgcaggcctgtcagaagtatggagtcggaagctgagaaacgagagtctcggcacttggtctacccaaggatgcaagaccgtgctgacagacgcctctcacaccaagtgcttatgcgaccggctctctacattcgcaattctcgcacagcagcccagggagattatcatggaatcatccgggaccccatccgtcacattgatcgtggggagcggcctgtcatgtttggctctgataacactcgccgtggtctacgctgctctttggcgttacattaggtcagaacgatcaatcattttgattaatttctgtttatcaatcattagctctaacatccttattctagtgggccagacccaaacacacaataagagtatctgcaccactacaaccgctttcctgcacttctttttccttgcctctttctgctgggtgctcactgaggcgtggcagagttacatggcagtgacagggaagatacggactcggctgatcagaaaacgcttcttgtgtctgggttggggtttgcctgcactggtggtggctacgagcgtcggcttcactcgaactaagggctacggcaccgaccattattgttggttgagcctagagggcggactcctttacgcttttgtaggtcccgccgccgccgtggtgctcgtgaacatggtgatcggcatccttgtttttaacaaattggttagtcgtgacgggatccttgataaaaaattaaagcacagagccgggcagatgtctgaaccacacagcggattgaccttgaaatgcgccaagtgcggggtggtctccaccactgctttgagtgcaaccaccgcaagcaacgccatggcctccttgtggtcttcttgcgtggtactgcctcttcttgccctgacttggatgtcagccgtgcttgccatgaccgacaaacgaagtattttattccagatcttatttgcggtgtttgacagcctgcagggtttcgtcatcgtaatggtccattgcatcctgaggcgggaagtgcaagacgcatttcggtgtcgactgcggaactgtcaggaccccatcaacgcagatagctcgtcatcattcccgaacggacacgcccagattatgacagacttcgagaaagatgtcgatatcgcgtgcaggagtgtgctgcataaggatatcggaccctgtcgggccgctaccattaccgggaccctgagccgtatctccctgaatgatgatgaggaagaaaagggcaccaatcctgaggggctcagctatagtacattgccgggaaacgtcatttccaaggtgattattcagcagcccacggggctacatatgccaatgtcgatgaacgagctgtcaaatccatgcctcaagaaagagaattccgagctgagaaggacagtctatctctgcaccgatgacaacctccgcggagcggacatggacattgtccacccccaggagagaatgatggaatcggattacatcgttatgccgcgctcctccgttaataatcagccatctatgaaggaggaaagcaaaatgaatattgggatggaaactctacctcatgaacgtctgcttcactataaagtgaaccccgaattcaatatgaatcctcctgtcatggaccaatttaacatgaatttagagcaacacctggctccccaggaacacatgcagaacctgcccttcgagccgagaactgccgtgaaaaacttcatggcaagcgagcttgatgacaacgccggactctcaagatcagaaacagggtcaaccatcagcatgtccagtttagagcggcggaagagtcgctactcagatctggactttgaaaaggtaatgcacactaggaagagacatatggagctgttccaggagctgaatcagaaatttcaaactctggaccggttccgggacatcccgaacacatcctcaatggaaaacccagctcctaacaagaatccttgggatacattcaaaaatccttctgagtacccgcactacacaaccatcaacgttctcgacacagaagcaaaagatgcactcgagctcaggccagcagagtgggagaaatgtctgaacttgccccttgacgtgcaggaaggagattttcagaccgaagtttag

SEQ ID NO: 180709 - DNA, 4569 bp, synthetic construct
  misc_feature 1..4569: note = Description of Artificial Sequence: Synthetic coding sequence
  source 1..4569: mol_type = other DNA
atgaaggccgtgcggaacctgctgatctacatcttcagcacctacctactggtcatgtttggatttaacgcggcgcaagacttctggtgctccaccctggtcaaaggagtgatttatggatcttattccgtgtctgagatgttcccaaaaaacttcaccaattgcacatggacactggaaaacccagacccgactaagtacagcatttatctgaaattttccaaaaaagaccttagttgctccaatttcagcctcttggcctaccagttcgatcattttagccacgagaaaatcaaggacctgttacggaaaaatcattctataatgcagttgtgcaacagcaaaaacgcctttgtgttcctgcagtacgacaagaactttatccagataaggcgggtgtttcccacaaatttccccggcttacagaagaagggcgaggaagaccagaagagtttttttgaattccttgtgctaaataaagtgtcaccttcacagttcggatgtcacgtgttgtgtacgtggctggagagctgcctgaagagcgagaatgggcgcacagagagttgcggtatcatgtatacgaagtgcacttgccctcaacatttgggggagtggggaatagacgatcagtccctcattcttttgaacaatgtcgtgctgcccttgaacgaacagactgagggatgcctcacccaggagctccaaaccactcaggtgtgtaatctcacaagagaagcaaaaagaccaccgaaggaggagttcgggatgatgggcgatcacacgatcaaaagtcaaaggccaagaagtgtccacgagaagcgcgtcccacaagagcaagcggacgccgctaaattcatggctcagactggggagtctggcgtcgaggaatggagtcaatggtcgacctgttctgtcacatgtggccagggctctcaggtcaggacacgcacctgtgtgtccccctatgggacacactgctcaggcccgctgcgggaaagccgagtgtgcaataacacagccttgtgtcctgtgcacggcgtctgggaggaatggtcgccatggagcctgtgttcctttacttgcggccgggggcaaaggactaggacacgcagctgcacacctcctcagtacggcggaaggccatgtgagggccctgaaactcaccataaaccctgcaatatagccctctgccccgtggatgggcagtggcaagaatggtctagctggtcgcagtgttctgtcacgtgttcaaacgggacccagcagagatcccgtcagtgcaccgctgccgcccacgggggaagcgaatgccgtggaccatgggctgagagtcgcgaatgttacaaccctgaatgcaccgccaatggccagtggaaccagtggggccattggtctggctgttccaagtcgtgtgatggtgggtgggaacggcggataagaacctgccagggggcagtgatcacaggacagcagtgtgagggtacaggggaagaggtcagacggtgtaatgagcaaagatgcccagcaccttatgaaatctgccctgaggattacctgatgtcaatggtctggaaaagaactcctgccggcgacttggcctttaaccagtgcccactgaacgccaccggtacaacatcccgtaggtgctctctgagcttgcacggtgtcgccttttgggaacaacctagttttgcaagatgcatctcaaatgagtacaggcaccttcagcactccattaaggaacacctggctaagggacagcggatgcttgctggggacggaatgtcgcaggtgactaagaccctgctcgacctcacccagcgaaagaacttttacgctggcgatcttttgatgtccgtcgagatcttgcgcaacgttacagacacgtttaagagagccagttatatcccagcatcagacggtgtgcagaattttttccagatagtgtccaacctgttggacgaagaaaacaaagagaaatgggaggatgctcagcagatttaccctggatcaatagagttaatgcaggtgattgaggactttattcacatcgtgggaatgggaatgatggactttcaaaactcttatttgatgaccgggaatgtcgttgcttcgatacagaaattacctgctgcctctgtgctcacagatattaatttccctatgaagggcaggaaagggatggtggactgggcccgcaacagtgaagaccgcgtggtaatcccgaagtctatttttactccggtgagtagcaaagagctcgatgagagcagtgtctttgtacttggtgcagtgctgtataagaacctggatttgatcctgcccacgcttagaaactacacagtgattaattccaagatcatcgtggtgaccatccgacccgagcctaagaccactgatagcttcttagagatcgagctggcacacctagctaatgggacactgaacccttactgtgttttgtgggacgacagtaagacaaatgagagtttgggtacctggtcgactcagggctgtaaaaccgtgctcactgacgccagccatacaaagtgcctttgcgacagactgagtacatttgctatactggcacagcaacctagggaaatcataatggaatcttccgggacaccatccgttaccctgatcgtcggctcaggactgagttgtctggccttgattacactggccgtggtgtatgctgccctatggaggtacatcagatccgaaaggagcattatcctgatcaacttctgtctgtcaatcatttcttccaacatcttgatcctcgtcggacaaactcagactcataataagagcatctgtacgacgactacagcttttctgcatttcttttttttggcatcattttgttgggtgctcaccgaggcgtggcagtcctacatggcagtaacgggtaagattagaacacgcctgatccgcaagcggttcctttgcctaggttggggattacctgctttggtggtggcgacgagcgtgggctttacccgcacgaaaggttatggcactgaccattactgctggctctcactggagggtggattgctgtatgctttcgtgggcccagcagctgcggttgtgctcgtgaatatggtcattggaatcctcgtctttaataaactcgtgtcgcgtgacggtatcttggacaaaaaactaaagcatcgggctggtcagatgagcgaacctcactctggcctcactttaaagtgcgcgaaatgcggcgtggtcagtacaacggctctgagtgctaccacagccagtaatgccatggccagcctgtggtcctcgtgtgtcgtgcttccgctgctcgccctgacctggatgtccgctgtgctggcgatgaccgacaagcggagtattctgttccaaatactgttcgcagttttcgacagcctccaaggtttcgtgatcgtaatggtccactgtatcctccggcgcgaagtacaggatgctttccgatgcaggcttcgtaactgccaagatcccattaacgctgatagttccagttcatttcccaatgggcacgcgcagattatgaccgactttgagaaggatgtggatatagcatgtaggtccgtgctccacaaggatatcggaccttgcagggctgcgacaatcaccggtaccttgagccgaattagcctcaatgacgatgaggaggaaaagggtacgaaccctgagggcttatcatacagcacactgcccggcaacgtgatatctaaggtcatcatacagcagccaactgggttgcacatgccaatgtcgatgaacgaactgagcaacccatgccttaaaaaagagaactccgagctgcgcaggaccgtttacctgtgcactgatgacaacttgaggggggctgatatggacattgtgcatcctcaggaacgtatgatggaatcggactacatcgtcatgccccgttcctccgtcaataaccagccctccatgaaagaggagtctaagatgaacatcggcatggagaccctacctcacgagagactgctccattacaaggtgaatcccgagtttaatatgaacccccctgttatggatcagtttaacatgaatctcgagcagcacctggctccacaggaacacatgcaaaatctccctttcgagccccggactgctgtgaagaattttatggcatccgagctggacgacaatgctggcctgtccagatctgagaccgggagtacgattagcatgtcttctttggagcggcggaagtctcggtactcggaccttgacttcgagaaggtgatgcacactcgcaagcgacacatggaattgtttcaggagctgaaccaaaagttccagaccctcgacagattccgggatattcctaatacgagcagtatggaaaaccctgcaccaaataaaaacccctgggatacgtttaaaaaccctagcgaataccctcattacacaaccatcaatgtactagacacagaagcaaaagacgctctggagctgcgccccgccgagtgggaaaaatgcctgaaccttccattggacgttcaggaaggagatttccagactgaggtgtag

SEQ ID NO: 180710 - DNA, 1461 bp, synthetic construct
  misc_feature 1..1461: note = Description of Artificial Sequence: Synthetic coding sequence
  source 1..1461: mol_type = other DNA
atggtgatcggcatcctggtgttcaacaagctggtgagccgggacggcattttagacaagaaacttaagcatagagccgggcagatgagcgaaccacactcaggattaaccttgaagtgtgcgaagtgcggcgtggtgagtactacggccctgagcgcaacaaccgcctcgaatgcaatggccagcctgtggtcatcttgtgtcgttctgccgctgctagctctgacttggatgagcgccgtcttggccatgaccgataagcgatctatactgtttcagatcttgtttgcggtctttgactccctgcaaggcttcgtcatcgtgatggtgcattgtatcctaaggagagaagttcaagacgcatttcggtgtcgcctgaggaactgccaagatcccattaacgcggactcttccagttcattccctaacggacatgcacaaattatgaccgatttcgaaaaggacgtggatattgcgtgtcgtagcgtcctgcacaaggatattggtccctgcagggccgctactattaccggcaccttgagccgtatctcactgaatgacgatgaggaagaaaaaggcacaaacccagaagggctatcgtattccacactgcctggtaacgtcataagtaaagtgattatccagcagccaacaggcctccatatgcccatgagcatgaatgaattgagcaatccctgcttaaaaaaggaaaatagtgagctacggagaaccgtgtatctttgcacagatgataacctgcgcggcgcagatatggacatcgtgcaccctcaggagcgcatgatggaatccgattacattgtcatgccccggtctagcgttaacaaccagccgtccatgaaggaggagagcaagatgaatatagggatggaaacccttccacacgagagactcctgcattataaagtgaaccccgagttcaatatgaaccccccagtaatggaccaattcaacatgaatctcgagcagcaccttgccccacaagagcacatgcagaatcttcctttcgaaccccgcaccgccgtgaaaaactttatggccagtgaacttgatgataacgctggcttgagccggtccgaaaccggtagcacgatttcaatgagcagcctcgagcgtagaaaatctaggtattctgatctggatttcgaaaaggtgatgcacacccggaaaaggcacatggaactctttcaggagctcaaccagaagttccagaccctcgacagattcagggacattcccaatactagtagcatggagaatccagctcccaataagaatccttgggataccttcaagaatccctcagagtacccacattatacaacgataaatgtgctcgacacagaggcaaaggacgctttagaactgcgaccagctgagtgggaaaaatgcctgaacctgccactagacgtccaggagggtgactttcagacagaggtttag

SEQ ID NO: 180711 - DNA, 978 bp, synthetic construct
  misc_feature 1..978: note = Description of Artificial Sequence: Synthetic coding sequence
  source 1..978: mol_type = other DNA
atgaaggccaaggacctgatcgtgacccccgccaccatcctgaaggagaagcctgacccaaacaacttggttttcggcacagtctttaccgaccatatgctgacggtggaatggagcagcgagtttgggtgggaaaaaccgcacatcaagccgcttcagaatctgtcactgcatccagggagtagtgcactgcactacgctgtggaagtgtttgacaaggaagagcttctggagtgcatacagcagctggtaaaactggaccaggagtgggtaccgtactccacgtccgccagcctatacatacgtcccaccttcatcggtacagagccatctctgggtgtcaagaagccaacgaaggccctcctgttcgtgctgctaagtccagtcgggccttatttctcgtcaggcacctttaatcctgtcagtctatgggccaaccctaagtatgtccgcgcctggaagggcgggactggtgactgtaaaatggggggcaattatggcagttccttgttcgcgcagtgtgaggccgttgataacgggtgccaacaggtattgtggctttacggcgaggaccaccagattacggaagtaggcactatgaatcttttcctgtactggatcaacgaagacggcgaggaggaactcgctactccacccctagacggaattatcctaccgggtgtgactcgcaggtgtatcttagatctggcccaccagtggggcgaatttaaagtgtcggagagatatctcacaatggacgacttgacaactgccttggagggaaaccgggttcgagaaatgtttgggtctggaacagcttgtgtcgtgtgtcctgtttcggacatattatataaaggggaaaccatccatattcctactatggaaaacgggccgaagctggctagccgaatactgagcaagcttacagatatacagtacgggcgcgaggagagtgactggaccattgtcttgtcttag

SEQ ID NO: 180712 - DNA, 1158 bp, synthetic construct
  misc_feature 1..1158: note = Description of Artificial Sequence: Synthetic coding sequence
  source 1..1158: mol_type = other DNA
atggactgcagcaacggctgcagcgccgagtgcaccggcgagggcggctccaaggaagtcgtcggtacatttaaggccaaagatctgattgtgacgccggcgactatcctcaaagaaaagccagatcccaacaatctcgtgtttggcacggtttttaccgaccacatgctgaccgtcgaatggagtagcgaattcgggtgggaaaaaccacacataaagccactgcagaacctgtccctgcatccaggcagttccgctctgcattacgccgtggagctctttgaaggcctcaaggcgtttagaggggtggataacaaaatacgactgttccaacctaatctgaatatggatcgcatgtacagaagtgctgttcgcgcaacactcccagtgtttgataaagaggaattactcgagtgcatccagcaactcgtgaagctagatcaggaatgggtcccatatagcacgtccgcctcactatacattcgacccacctttataggaacggaaccatcattgggcgtgaagaagcctaccaaagcattgctgtttgtgctgttgagccccgttgggccttacttcagctcaggcacctttaatccggtgtctctgtgggccaatccaaagtatgtgagagcgtggaaaggcgggactggcgattgcaagatggggggtaattatggctcatccctttttgcacagtgtgaggcagtagataacggatgccaacaagtgctgtggctctatggcgaagatcatcagattaccgaggtgggcaccatgaacttgtttctatattggatcaatgaagacggagaagaggagctcgctacacctcccctcgacggtatcatcttgccaggggtcacgcggcggtgcatacttgaccttgctcaccagtggggcgaattcaaagtttcggagcgatacctcaccatggatgacttgacgacagccctggaaggcaatcgagtgcgcgagatgtttggctcagggactgcatgtgtcgtttgcccagtgagtgacattctgtataagggagagaccatccacatacctactatggagaatggacctaaactggcctccagaattctttctaagctgaccgatattcagtacgggagggaagaatcagactggacaattgtgctgtcttag

SEQ ID NO: 180713 - DNA, 1197 bp, synthetic construct
  misc_feature 1..1197: note = Description of Artificial Sequence: Synthetic coding sequence
  source 1..1197: mol_type = other DNA
atggccagccccctgcggagcgccgccgccctggcccggcaggactgttcaaatggatgctctgccgaatgtaccggggagggcggatctaaagaggtggtcggcaccttcaaggctaaggatctaatcgtaacccccgcaacaatcctcaaggagaaacccgatcctaataatttagtgtttgggacagttttcaccgaccatatgctgacagtagagtggagctctgaattcggctgggaaaagccccatattaagcccctgcagaatttgagtctgcaccctggatctagcgctcttcactatgccgttgagttgttcgaaggcctgaaggcttttcgaggagttgataacaagattaggctgttccagcccaacctaaatatggatcgtatgtatcggagcgcggtgcgtgctactctccccgttttcgataaagaggaactgctggagtgcatccagcagctcgtcaagctcgaccaggaatgggtcccatatagcactagtgcctcgctttacataaggcccactttcatcgggaccgaaccctctcttggcgtcaaaaagcctacaaaggccctcctgttcgtcctgctgagccctgtcggcccttatttcagttccgggacatttaatccggtctccctgtgggctaacccaaagtacgtgcgagcctggaaaggcggaacgggcgactgcaaaatgggagggaactacggtagcagtctctttgctcaatgcgaggccgttgacaacggctgccagcaggtgctttggctgtatggggaagaccatcagattacggaagtggggacgatgaacctcttcttatactggattaatgaggatggggaagaggaattggccacccctccactcgatggcattatattgccgggtgtaacaagacggtgcattttggatctggcccaccagtggggggagttcaaagttagtgagcgctacttaactatggatgatctgactacagcactggaagggaaccgggtacgggaaatgtttggctcaggaacagcttgtgtggtgtgccccgtctcggatatcctgtacaagggggagactatccacattcccacaatggaaaacgggcctaaactcgctagtagaatcctcagtaaacttaccgacattcagtatggccgggaggagtctgactggactattgttcttagctag

SEQ ID NO: 180714 - DNA, 1050 bp, synthetic construct
  misc_feature 1..1050: note = Description of Artificial Sequence: Synthetic coding sequence
  source 1..1050: mol_type = other DNA
atgaaggactgcagcaacggctgcagcgccgagtgcaccggcgagggaggttccaaggaggtggtaggtacattcaaggctaaggacttaatcgtgacacccgccaccatcttgaaggagaagccagaccctaataaccttgtctttggcaccgtcttcaccgaccacatgctgacggttgaatggagcagcgaattcggatgggagaagcctcatatcaaacccctgcaaaatctgtctctgcatccaggctcaagtgcgttgcactacgccgttgaggtgttcgataaggaggagttgctggagtgcatccagcagctggtgaaactcgaccaggagtgggtcccttatagcacctcagcctctttatacatccgaccaacattcattggaacagagccctctctaggagtgaaaaaacccactaaggccctgctctttgtcttgctctctccagtaggaccctacttctcatcggggacctttaatcccgtgtcactctgggccaacccgaagtacgtacgggcctggaagggagggacaggggattgcaaaatgggcggtaactacgggtcttcgctgtttgcgcagtgtgaagcggtggacaatggctgccagcaggtgctgtggctgtatggagaggatcatcaaatcacagaggttgggacgatgaatttgttcctgtattggatcaatgaggacggtgaggaagaactcgcgacacccccactggatgggatcatcctcccaggcgtgaccagacggtgtattctggacctggctcatcaatggggggagtttaaggtctctgaacggtacctgacaatggacgatcttactaccgctctcgagggaaatcgcgtgagggaaatgtttggcagcgggaccgcctgtgtcgtgtgccccgtgtctgacattctctacaagggggaaactatccatattccaacgatggaaaatgggccaaagctggcctcacgaatactgtcgaagctgaccgacatccaatatggccgcgaggagagtgactggaccatcgtgctcagctag

SEQ ID NO: 180715 - DNA, 1161 bp, synthetic construct
  misc_feature 1..1161: note = Description of Artificial Sequence: Synthetic coding sequence
  source 1..1161: mol_type = other DNA
atgaaggactgcagcaacggctgcagcgccgagtgcaccggcgagggtggttccaaggaggtggtgggaactttcaaggcgaaggatcttattgtgactcctgctacaattctcaaagagaagcccgaccctaataacctagtattcggcacggtgttcaccgaccacatgctgactgtcgagtggtcttcggaattcggatgggaaaagccccacataaagccgttgcagaaccttagtctccatccaggttccagtgcgcttcactacgcggtagagctgtttgagggactgaaggcatttaggggggtggataacaaaattcgcctatttcaaccaaacttgaatatggaccgcatgtacagaagcgcggtcagggccactttgcccgtatttgataaagaggaactcctcgagtgcatccagcagctggtcaagctagaccaggagtgggtaccctacagtacttccgcctccttgtacattcgacccacctttatcggtacagagccaagtctgggagttaagaagccgaccaaggccctgctgtttgtgttgctgagtcccgttgggccatacttcagctctgggactttcaatccagtatcactctgggctaaccccaagtacgtacgagcctggaaaggggggacgggggactgtaagatgggtgggaactacggatcttcactcttcgctcaatgtgaggctgtagataacggttgccagcaggtattatggctttatggtgaagaccaccagatcaccgaagtcggcactatgaacctttttctctattggatcaatgaggacggcgaggaggaactcgcaaccccccccctggatggcattatcttaccaggagtgacacggaggtgcatactcgacttagcccatcagtggggggaatttaaggtgagcgagcggtatctgactatggatgatcttactactgcacttgaggggaaccgagtacgcgaaatgtttggcagtgggaccgcctgcgtggtgtgccctgtttcggacatcctgtacaagggcgaaacaatccacatcccaaccatggaaaacggccccaagctggcttcgcggattctgagtaagttgactgacattcagtacggtcgcgaagagagcgattggactatcgtcctgtcatag

SEQ ID NO: 180716 - DNA, 1179 bp, synthetic construct
  misc_feature 1..1179: note = Description of Artificial Sequence: Synthetic coding sequence
  source 1..1179: mol_type = other DNA
atggccgccgccgccctgggccagatctgggcccggaagctgctgtctgtaccctggctgctatgcggacctcgcaggtacgcaagtagtagcttcaaggctgccgaccttcagctcgagatgacccagaaaccgcacaagaagcccgggccgggggagccattggtgttcggcaagaccttcaccgaccacatgctgatggttgagtggaacgacaaaggctgggggcaaccgagaatccagccattccaaaacctcaccctgcatcctgcgagctcctctctccactatagcctacagctgttcgaaggaatgaaggcgttcaagggaaaagaccagcaggtgagactcttcagaccttggttgaatatggatagaatgctccgatctgccatgcggctgtgcctcccctctttcgataaactggaattactggagtgcatcagacgcctgatagaagttgataaagactgggtcccggacgcagccggtacttctctatatgttcgcccggtgctgattggaaacgaaccttccttgggcgtttcccaaccaacgcgggcattgctcttcgtgatcctgtgcccggtcggagcctactttccaggcggcagcgtgactccagtgtcgttgcttgctgacccggccttcattagggcctgggtcgggggagttgggaactataagctggggggcaactacggacctacagtactcgtccagcaggaggcgctcaaacgcggctgtgagcaggtgctatggttgtacggtccagatcaccaactcacggaagttgggacaatgaatatcttcgtctattggacacacgaggacggagtgcttgagctcgttaccccccctctgaatggggtgatcttacccggcgtggtgaggcaaagtctgctcgacatggcccagacctggggcgagtttcgagtagtcgaacgcaccattacaatgaaacagctgctgcgggccctcgaggagggcagagtgcgggaagtgttcggatccggaaccgcatgtcaggtttgccccgtgcatcggattctgtacaaagataggaatctacatatcccaacgatggagaacggacccgaactgattctccggttccagaaagaactcaaggaaatccagtacggaattcgagcacacgaatggatgttccccgtgtag

SEQ ID NO: 180717 - DNA, 1059 bp, synthetic construct
  misc_feature 1..1059: note = Description of Artificial Sequence: Synthetic coding sequence
  source 1..1059: mol_type = other DNA
atgacccagaagccccacaagaagcccggccccggcgagcccctggtgtttggcaagactttcactgatcacatgctgatggtggagtggaacgacaaaggttgggggcagcctcgcatccagcctttccaaaacctaaccttgcatcccgcctcctcatctcttcattattcccttcaactctttgaaggtatgaaggcctttaagggaaaagatcaacaagtgaggctgttccgaccctggctcaatatggatcgcatgctgcgaagtgccatgagattgtgcctgcctagttttgataaactggagctgctggagtgtattagaaggttgatcgaagtggacaaagactgggtgcctgatgctgccggtacatccttatatgtgcggcctgttctgatcggcaatgaaccatcgctgggggtttctcagcctactcgcgctcttctgttcgtgatcctgtgccctgttggggcctatttccccggcgggtcagtgacccccgtgagccttctggctgaccctgcatttattcgtgcctgggtcgggggggtagggaactacaagctcggtggcaactatggccctacagttctggtgcagcaggaggctcttaaacgggggtgcgagcaggtgttatggttgtacggccctgatcaccagttgaccgaagtcggaactatgaacatcttcgtctactggacccatgaggacggcgtccttgagcttgtgacccctccactaaacggagttattcttccgggtgtcgtgcggcaaagcttgctggacatggcccaaacatggggggagttccgcgtagtagagcggaccattacaatgaaacagctgcttcgggccctagaggaaggcagagtgagagaagtttttggatctggcacagcatgccaggtctgtcccgtgcaccgaatactgtataaagatagaaacctgcacataccgaccatggagaatggtccagaactaattctccgctttcagaaggagttaaaagagatccagtacggcattcgtgcccatgaatggatgtttcctgtctag

SEQ ID NO: 180718 - DNA, 903 bp, synthetic construct
  misc_feature 1..903: note = Description of Artificial Sequence: Synthetic coding sequence
  source 1..903: mol_type = other DNA
atggccgccgccgccctgggccagctgttcgagggcatgaaggccttcaaggggaaggaccagcaggtgaggctctttcggccttggctgaacatggaccgcatgctgaggtcagctatgagactttgtttgccttcgttcgataagctggagctgctggagtgcattcgtcgcctgattgaagttgataaggactgggtgcccgacgctgctggaacgtcactatacgtaagaccggtacttattggcaacgagccgtcgttgggggtgagtcagcccacacgtgcactgctgttcgtgatcctgtgtcccgttggggcctactttccaggggggtccgtcacccccgtgtctttactcgcagaccctgccttcatcagagcttgggtcggcggggtggggaactataaattaggcggaaactatggaccgacggtgctggttcagcaggaagcgttgaagagaggatgcgagcaggtactttggttgtacggtccagatcaccaacttacggaagtcggaaccatgaacattttcgtttattggactcacgaggacggcgtactcgagttggtcaccccacccctgaacggagtgatcctccctggtgtggtaaggcagtccctcctggatatggcccagacatggggggaatttagagtcgttgagcggacgatcaccatgaagcagctgctgcgggccctggaggaggggcgggtgcgagaggtcttcggtagcggcacggcctgtcaagtgtgcccggttcatcggatactgtacaaggatagaaatctgcatattccgactatggagaatggacctgagctcatcctaaggtttcagaaagagctgaaagaaatacagtatggtatacgcgcccacgaatggatgtttcctgtgtag

SEQ ID NO: 180719 - DNA, 1338 bp, synthetic construct
  misc_feature 1..1338: note = Description of Artificial Sequence: Synthetic coding sequence
  source 1..1338: mol_type = other DNA
atggccgtggccatcgccgccgcccgggtgtggcggctgaaccggggattaagccaggccgcattgcttctgctgcggcagccaggcgctcggggtttggctagatcccatccaccccggcaacagcagcaattcagctcattggacgataagccacagtttccgggagcgtcagctgagttcatagataaactggaattcatccagccaaatgtcatctccgggatacccatctaccgagtgatggacaggcaggggcagattataaacccgtcggaggacccccatctcccaaaggagaaggtgctgaagctttataaatctatgacccttctgaatacaatggacagaatattgtatgaatcacagcggcagggacggatctcgttttacatgacaaattatggggaagaggggacccacgtgggaagcgctgctgccctggacaacaccgaccttgtgttcggtcaataccgggaagctggggtgctcatgtatagggattatccacttgaactgtttatggcccagtgttacggcaatatctcggatctcgggaagggtcgccaaatgccggtgcactatggctgcaaggagagacattttgtgacaatctcaagtcctctggctacacagattccacaagcagtcggagccgcatacgccgcaaagcgagcaaacgcaaaccgtgtggtaatttgttacttcggcgaaggggcagctagtgaaggagacgctcacgccggctttaactttgcagcgacactggagtgtcccatcattttcttctgtcgcaataacggatacgccatcagtactccaacttcggagcagtacagaggtgatggcattgcagcaaggggtccagggtatggcattatgtctattagggtggacggtaatgacgtgttcgcggtatataacgcaacaaaggaagctcggaggagagctgtggccgagaaccaaccctttttaatagaggcaatgacatacagaatcggacatcacagcaccagtgatgattccagcgcctataggagcgtggacgaggttaactattgggacaagcaagatcacccgatatctcgccttaggcactacttgctgagccagggctggtgggacgaagagcaggagaaagcttggaggaaacaaagccgtaggaaggtgatggaagcctttgaacaggccgagcggaagccaaagccgaacccgaatcttctcttttccgatgtctatcaggaaatgcccgcacagctgcgaaagcagcaggaaagcctagccaggcacctgcaaacttatggagagcactaccccctcgaccacttcgacaagtag

SEQ ID NO: 180720 - DNA, 1212 bp, synthetic construct
  misc_feature 1..1212: note = Description of Artificial Sequence: Synthetic coding sequence
  source 1..1212: mol_type = other DNA
atggccgtggccatcgccgccgcccgggtgtggcggctgaaccggggactgtcacaagccgccctgctcttgctcaggcaacctggtgccagaggactggcccggagtcatcccccacgtcaacaacagcagttcagctccctggatgataaaccacaatttccaggcgctagtgccgagtttatcgataagctggaattcatacaacccaatgtcatctctggtatcccaatctaccgagttatggacagacagggccagataataaaccctagtgaggacccgcacctgcccaaggagaaggtgcttaagctatacaagtcaatgacattgctgaacacgatggacagaattctttacgaatcccagcgccagggcaggatctccttctacatgaccaactatggggaggagggcactcacgttggttctgccgccgcactggataacactgacctcgtgttcggtcagtatagagaagcaggggtgttgatgtatagagattacccactggaactgttcatggctcagtgctacggaaatatttccgacctcggaaaaggcaggcagatgcccgtgcattacggttgtaaggagcggcacttcgtgactatctccagcccccttgctacccagatccctcaggccgtaggcgctgcctacgcagcgaagcgggcaaatgcgaatcgagtcgtcatttgctatttcggagagggagcggcctctgaaggcgatgctcatgcaggcttcaatttcgcagcaaccctggagtgtcccatcattttcttttgtcgaaataatgggtacgctatctcaactccaacctcggaacagtatcgcggggatggaatcgctgcacgtgggcccggatacggtatcatgagtatccgcgtggatggaaatgatgtgtttgccgtctataccgccaccggggggcccaaggcccgagctagcgtcggtcctagtagccctagtaccactggcacttgcgggatcatgatgcctttgcatgccatggggctgtggcaccccgtgagccatcagcaggagctgtccgccgcaccgaagcccaaaggaacgacaaaaccaattctggagtcgtatttgaaaagccacttgctgggacatagcagatatcaactgtatatccatcaggatgccgtgaggagagaaaagccacagagtaatctcaacagagaatctctaatctag

SEQ ID NO: 180721 - DNA, 1179 bp, synthetic construct
  misc_feature 1..1179: note = Description of Artificial Sequence: Synthetic coding sequence
  source 1..1179: mol_type = other DNA
atggccgtggtggccgccgccgccggctggctgctgcggctgcgggccgctggcgccgagggccactggcgccggctcccaggcgccggactagctaggggctttctgcacccggctgcaaccgtcgaagatgccgctcagcgccggcaggtggcccatttcacgtttcagcccgatcctgaaccgagagagtatggacagactcagaaaatgaacctattccagtcagtgacatcagctttggacaactccctggccaaagatccgacggccgtgatctttggcgaggacgtagcattcggcggagtgtttcgatgcactgtgggactcagggacaaatacggcaaagacagagttttcaacacaccactttgcgaacagggcatcgtgggtttcggcatcggaatagctgtcaccggtgcaactgctatagcagagatccagtttgcggactatatcttccccgcattcgatcaaattgtcaacgaggctgccaaatatcggtatcggtctggcgacctgttcaactgtggctccctgaccattaggagcccttgggggtgcgtcgggcatggggctttgtaccactctcagagtcctgaagcttttttcgcccactgccctgggattaaggtagtgattccccgatcaccttttcaggccaaagggttgctgctatcttgtattgaggataaaaacccctgcattttctttgaaccgaagattttgtacagagcggcagcagaggaagtgcccattgagccctacaacatcccattgagccaggctgaggtgatacaggaaggctccgatgtcaccctggttgcttggggcacacaagtccatgttatccgagaggtcgccagcatggccaaagagaagctgggcgtgtcctgtgaggtgatagacctccgtacaataatcccctgggacgtggatacgatctgcaaatccgtcatcaaaactggtcgtctcctgattagtcacgaggctcctctgaccggtggcttcgcatctgagatcagcagtaccgtgcaggaagagtgtttcctcaacctggaggcaccaatctcacgtgtgtgtggatacgacactccctttcctcatatcttcgagcctttctacattcccgataaatggaagtgttatgacgccctgcgtaagatgattaactactag

SEQ ID NO: 180722 - DNA, 1179 bp, synthetic construct
  misc_feature 1..1179: note = Description of Artificial Sequence: Synthetic coding sequence
  source 1..1179: mol_type = other DNA
atggccgtggtggccgccgccgccggctggctgctgcggctgcgggccgcgggcgccgagggacactggaggcgtctgcccggagctggtctcgcacggggcttcctgcatcctgccgccactgtagaggatgcagcgcagcggcgacaggtagctcactttacattccagccagatcctgaaccacgcgaatacggccaaacacagaagatgaatctgtttcaaagcgtcacctcagcactggacaactccctggcaaaggacccaacggctgtgatatttggcgaagatgtggcctttggaggagtgtttcgctgcaccgtcggcctgcgggacaaatacggaaaagatagggtgttcaacacaccactctgcgagcaaggtattgtcgggtttggtatcggaatcgccgtgactggggcaaccgccattgcggagatccaatttgcagactacatcttcccggcgttcgaccagatcgtgaacgaagctgccaaatacagataccgaagcggggacctgttcaattgcggatccctcaccatccgcagcccatggggatgcgttggccacggcgctctgtaccactcacagtccccagaggcattctttgctcactgccccggaatcaaagtggtaatccccagaagcccattccaggctaaaggtttactgctgagctgtatcgaagataaaaatccctgcattttctttgaacccaagatcctgtatcgggctgcggccgaggaagtccctatcgagccttataacattccactcagtcaggcagaggtcatacaagaggggagcgatgtaacactagtggcctgggggacccaggttcatgtcatacgtgaggtggcgagcatggccaaggagaagctgggggtgtcttgcgaggttatcgatctgaggacaattatcccatgggacgtcgacacgatctgcaagagtgtgataaagactgggcgcctgcttatctctcacgaggcgccgctgaccggaggatttgccagcgaaatttccagcactgttcaagaggaatgcttcctgaacctcgaagcgcctatatcaagagtttgcgggtatgatactcccttcccacacatctttgagccattttacatccccgacaagtggaaatgctatgacgccctgaggaagatgatcaactactag

SEQ ID NO: 180723 - DNA, 657 bp, synthetic construct
  misc_feature 1..657: note = Description of Artificial Sequence: Synthetic coding sequence
  source 1..657: mol_type = other DNA
atggccgtggtggccgccgccgccggctggctgctgcggctgcgggcagccggagcggagggccactggcgacgccttcctggtgcaggcttggcccgcggcttcctccatcctgcagccacggtggaagacgcagcccaacgacgccaagtggcccatttcacatttcagcccgatcccgaaccacgggagtacggacagacccagaagatgaatctgttccagtctgtgacaagtgcactcgacaatagtctggcgaaggatcccaccgccgtaatttttggcgaagacgtggcgttcggcggggtttttcgatgtacagtaggactcagggataagtacggcaaagatcgagtgttcaacacccccctgtgtgagcaaggcatcgtgggatttggcattggcattgcggttactggcgcgactgctatcgccgagattcagtttgccgattacatcttcccggctttcgaccagattgtcaacgaagcagccaagtatcgatacaggagtggcgacctctttaattgtggttctctgactattaggtcaccatggggctgcgtcggccacggagctctctatcatagtcagagccccgaagcctttttcgcccactgccccggcattaaaatcaaggtgatttctctgagctag

SEQ ID NO: 180724 - DNA, 969 bp, synthetic construct
  misc_feature 1..969: note = Description of Artificial Sequence: Synthetic coding sequence
  source 1..969: mol_type = other DNA
atgaacctgttccagagcgtgaccagcgccctggacaacagcctggccaaagaccccactgcagtaatctttggagaggatgtggcttttggcggagtgttcagatgtactgtggggcttagagacaagtacgggaaggatcgcgttttcaatacgcctctgtgtgagcaggggatcgtgggatttgggatcgggatcgctgtgactggtgccaccgcgatcgccgaaattcagttcgcagactacatctttccagcctttgatcagatcgtgaatgaagctgcgaaatatcgataccggtctggcgacctcttcaattgcggttctcttactattagatctccgtggggatgcgtgggccacggggcgttgtatcatagccagagccccgaggctttctttgctcactgtcccgggataaaggtggtcatccctcggtctcctttccaggccaagggactcctcctgtcatgtattgaagacaaaaatccgtgtattttttttgagcctaagatactgtaccgcgccgcagccgaggaggttccaatcgagccatataacattcctctgagtcaggctgaagttatccaggaagggtctgacgttaccctggtcgcttggggcactcaggttcatgtcatcagagaggtagccagcatggctaaggaaaaactgggtgtgtcatgtgaggtgatagacctgaggactattatcccctgggatgtggacaccatatgcaagagcgtgatcaaaactggcagactcttaatctcccacgaagcccccttgactggaggatttgcttctgagatctcctccaccgtccaagaggaatgttttctgaaccttgaagcacctatttcaagagtgtgtgggtacgatactccctttccgcacattttcgagccattttacattccagataagtggaagtgctatgacgctctgcggaagatgattaattactag

SEQ ID NO: 180725 - DNA, 657 bp, synthetic construct
  misc_feature 1..657: note = Description of Artificial Sequence: Synthetic coding sequence
  source 1..657: mol_type = other DNA
atggccgtggtggccgccgccgccggctggctgctgcggctgcgggccgccggggctgagggacactggcgtcggcttcctggcgccgggcttgccagaggcttcctgcaccccgctgctacggtggaagacgccgctcagagacgccaggtggcccattttaccttccaaccagaccccgagcctcgtgaatatggccagacacagaaaatgaacctcttccaatccgttacaagcgccctggacaattctctagctaaagacccgacagccgtgatcttcggagaagatgtggcattcggcggagtgttccgctgcaccgtgggtcttagagataagtatggaaaagacagagtgttcaacacaccactttgcgagcagggaattgtagggtttgggatcggcatcgctgttacaggggcaacagctattgccgaaatacagtttgcagattatatattccctgcctttgaccagattgtcaacgaagccgcaaaatacaggtaccggtctggagacttgttcaattgtggaagtctgacaattcgtagtccttgggggtgcgtggggcatggtgcgctgtaccatagtcagtctccggaggcttttttcgctcactgtccaggcattaaaatcaaagtgatctcactttcatag

SEQ ID NO: 180726 - DNA, 1779 bp, synthetic construct
  misc_feature 1..1779: note = Description of Artificial Sequence: Synthetic coding sequence
  source 1..1779: mol_type = other DNA
atgagcgtgagcctggtggtgatccggctggagctggccgagcactctcccgtccccgccgggtttggcttttctgccgctgccggcgaaatgagtgatgaggaaatcaaaaagacaactctcgcaagtgccgttgcctgtcttgagggtaagagcccgggagagaaggtcgcaattatacaccaacatctgggtagacgtgaaatgacagacgtgatcatcgagacaatgaagtccaatcctgatgaactaaaaaccaccgttgaggagcggaagtcgtctgaggcctctccaacagcccagcgcagtaaagatcacagtaaagagtgcattaatgccgcgcccgatagcccaagcaagcaactgcctgatcagatctcctttttctcaggtaatccatctgtggagatagtgcatggcattatgcacctgtataaaaccaataagatgactagcctgaaggaggacgtccggagatctgccatgctctgcattcttacggtccctgcagcaatgacctcacacgacttgatgaagtttgtcgccccttttaatgaggttatcgaacaaatgaaaatcattagagatagcaccccgaatcagtacatggttttgataaaattcagggcccaggccgacgctgactcattctacatgacatgcaatggacggcagttcaactccattgaggacgacgtctgccaactcgtgtatgtggagcgtgcagaggtgctcaagtcagaagatggtgctagcctacctgtcatggatctcaccgaactaccgaagtgcaccgtgtgcctggagagaatggacgagtctgtgaacgggatcctgaccacactgtgtaaccattcattccacagccagtgtctgcagcgctgggacgacaccacgtgtcccgtttgcaggtattgccagacgccagagccggtcgaagagaataaatgctttgagtgtggagtccaggagaatttatggatctgcctaatttgcggacacattgggtgcggtcgctatgttagccgacatgcatataagcactttgaggaaacgcaacacacctatgccatgcagctcactaatcatcgggtatgggattacgcgggcgacaactatgtacacaggctcgtcgccagcaagacagacggcaagatagtccagtacgaatgcgagggagacacctgtcaggaagagaagatcgacgcactacagctggaatacagttacttactgactagccaactagagtcccaacggatctactgggagaacaaaattgtgaggattgagaaggacacagctgaggagatcaataacatgaaaactaaattcaaggagacgatagaaaagtgtgacaacctcgagcacaaactcaatgacctgctaaaagagaagcagtcagtggagaggaaatgtacccagctcaacacaaaagtcgcgaaactgacgaatgaactgaaagaggaacaggaaatgaacaagtgtctgagggcaaatcaggtgttactgcagaacaagctgaaggaagaagagcgtgtcctcaaggagacgtgcgaccaaaaagatcttcaaatcaccgagattcaggaacagttgcgggacgtcatgttctacctcgaaacccagcagaaaattaatcacttacccgctgaaacacgtcaggagatccaagagggacagattaatatcgcgatggccagcgcatcctcgcctgctagctccggagggtccgggaagttgcctagtcgcaaagggagatccaaacgcggcaagtag

SEQ ID NO: 180727 - DNA, 1242 bp, synthetic construct
  misc_feature 1..1242: note = Description of Artificial Sequence: Synthetic coding sequence
  source 1..1242: mol_type = other DNA
atgcacctgtacaagaccaacaagatgaccagcctgaaggaggacgtgaggaggtccgctatgctttgtatcctgacagtgcctgcagccatgacttcgcacgacctgatgaaattcgtggccccttttaacgaggtgatagagcagatgaagatcatccgggacagcaccccgaatcagtatatggtgctgatcaagttcagagcccagggagcctctctgccagtgatggatttgacagaattgcccaaatgtactgtgtgcctagaaagaatggatgagtcagtgaacggcatactcactacgctgtgtaaccatagcttccattctcagtgcttgcaacgatgggatgatactacttgccccgtctgcagatattgtcagactccggaaccagtcgaggaaaacaaatgttttgaatgcggcgtgcaggaaaacctctggatctgtctaatatgtggtcacattggctgcggccgatatgtgtctcggcatgcgtacaagcactttgaagaaacccagcacacctacgcaatgcaacttacaaatcatagagtgtgggactatgcaggggacaactatgtccaccggttggtcgcctcgaagactgatggcaaaattgtgcagtatgagtgcgagggcgatacgtgtcaggaggaaaagatagacgcccttcagctggagtactcctatttgctgacatcacagttagaaagccagagaatctattgggagaataagatcgtccgaatcgaaaaagataccgcggaggagatcaacaatatgaaaaccaagtttaaggagaccattgagaagtgcgacaatctggagcacaagctaaacgatctgctaaaagaaaagcagtcagtggaacgtaaatgtacgcagctcaataccaaggtggctaagctaactaatgagctgaaagaggaacaggaaatgaacaagtgcctcagagccaaccaggtgcttctccagaataaactcaaggaagaggaaagagtcctaaaagagacttgcgaccaaaaggatcttcaaataacagagattcaggaacagctccgagacgtgatgttttatctggagacacagcaaaaaatcaatcacctccctgcagaaacgagacaggaaatacaggagggccagataaatatagctatggcctccgcctcatcccccgcttctagcggcgggagtggcaagctaccctccagaaaagggagatcaaagaggggaaagtag

SEQ ID NO: 180728 - DNA, 2136 bp, synthetic construct
  misc_feature 1..2136: note = Description of Artificial Sequence: Synthetic coding sequence
  source 1..2136: mol_type = other DNA
atgaacaagggctggctggagctggagagcgaccccggcctgttcacactcttggtggaagactttggagtcaagggcgtgcaggtggaagaaatctatgacctgcagtccaaatgtcagggtccagtctacggatttatctttttgttcaaatggatcgaggaacggcgaagtaggcgtaaggtttccactttggtcgatgatacctccgtcattgacgacgacattgtgaacaatatgttctttgcccaccagttgatacccaatagctgcgcaacacacgcactgcttagcgtgcttttgaattgcagttctgtcgatctggggcctacgctcagcaggatgaaggatttcaccaaaggatttagccccgaatcgaagggatacgccatagggaacgcgccagagctcgccaaagcccataacagccatgcgcggcccgaaccgcgtcacttaccagagaaacaaaacggcctgtcagccgtgcggacgatggaggcctttcacttcgtaagctatgtacctattaccggccgactgttcgagttagatggcttgaaagtatatccaatagaccacggcccctggggggaggatgaggagtggacagataaggcccgcagagtgatcatggaaagaataggcctcgcaaccgctggaatcaagtatgaagctcggctgcatgtgctgaaggtgaatcgccagacagtgctagaggctctgcaacagctcattcgagtcacccaacctgagctcatccagactcacaaatctcaggagtctcaactgccagaagagagcaaatctgccagcaacaagagtccactggtgctcgaggccaaccgcgcccctgccgccagcgaggggaaccataccgatggagccgaggaagctgcaggatcctgtgcacaggccccctcccattcgccgcccaacaaacctaagctggttgtgaagcccccaggatccagcctcaacggagtgcaccccaatcctacacccatcgtacaaagattgcccgcattcctggacaatcacaattatgccaagagcccaatgcaggaagaggaagatctggctgcgggagtgggcagaagtcgagtacccgtcaggccacctcagcaatattcagatgatgaggatgattatgaagacgatgaggaggacgacgttcagaataccaattcagcccttaggtataagggtaaaggaacaggaaaacctggagctctttccgggagcgccgatgggcagctgagcgttctgcaaccgaatactatcaacgtgcttgctgagaaactcaaggagtcccagaaggacctgagcattcctttatctattaaaacttcttccggagcaggaagcccggctgtcgcagtgcccacccacagtcagccctcaccaacgcctagtaacgagtccactgacactgcgtcagagatagggagcgcttttaattctcccctccgaagccccattaggtcagccaaccccacaaggccatcatcacccgtgacgagccacataagtaaagtgctgttcggagaggatgattcacttttgagggtcgactgcataagatataatcgtgcagtccgagatctgggccctgtcatatcaaccggactcctccatcttgctgaggacggagtactgtcccccctagccttaactgaaggtggcaaaggcagctccccaagcattcggccaattcaagggtcgcaggggagcagtagtcccgtggaaaaagaggtagtggaggctaccgatagcagggagaagacaggaatggtcagacctggagaacccctgagtggagagaaatatagcccgaaggaacttctggcactcctgaagtgcgtcgaagcggagatcgccaattatgaggcttgtctaaaggaggaggtcgaaaagaggaagaaattcaaaatcgatgatcaacgcaggacacacaattatgacgagttcatttgtacctttatcagcatgctggcgcaggaaggaatgttggcaaacttggtcgagcagaacatctccgtgcgcaggcgccaaggagtgtctataggccgattgcacaaacagaggaagcctgaccgtcgcaagaggagtcgaccgtacaaggctaaacgccagtag

SEQ ID NO: 180729 - DNA, 2190 bp, synthetic construct
  misc_feature 1..2190: note = Description of Artificial Sequence: Synthetic coding sequence
  source 1..2190: mol_type = other DNA
atgaacaagggctggctggagctggagagcgaccccggcctgttcaccctgctggtggaagatttcggggtgaaaggcgtacaggtggaggaaatttacgatttgcagagcaagtgtcagggacctgtctacggcttcatcttcctgttcaaatggattgaggagcgccgctcccgccggaaggtttcgacactcgtagacgacacgagtgtaattgatgatgacatcgtgaacaatatgtttttcgcccaccagctgatcccaaactcctgcgctacccatgcccttttaagtgttttgctgaattgttcctctgtggacctaggccctacactgtctaggatgaaggattttacgaaggggttctcacccgaaagcaagggctacgccataggaaacgcccccgagttagctaaggcccacaactcgcacgcacgccccgagcctcgacacttgcctgaaaaacaaaacggactctcggccgttcggacaatggaggcattccactttgtatcgtacgtgcccatcaccggaagactattcgagttggacggcttaaaggtgtatcccattgaccacgggccttggggagaggacgaggagtggactgacaaggcacggcgtgttatcatggaacgaattggcttggccactgccggggaaccctatcatgacattcgtttcaatctaatggctgtggtgcccgacagaaggattaaatatgaagctagactccatgtgttgaaagtgaaccggcagactgtcctggaggccctgcagcaacttatccgcgtcactcaaccggagctgattcaaacccataaaagccaagagtcccaattgcctgaggaaagcaaatctgcctcaaacaaatcacctttggttctggaggccaatagggctccggctgcttccgaggggaatcacactgatggggccgaggaggcggcagggtcatgcgcccaagcaccttcccacagcccacctaataaacccaaactagtcgtgaagcctcctggatcatcattaaacggagtgcatcctaacccaactcctattgttcaacgcctgcccgcttttttggacaaccataattatgcaaagagcccaatgcaagaagaggaagacctcgctgccggtgtgggaaggtccagggtgcccgtgcgcccaccccagcagtactccgacgatgaagatgattacgaagacgacgaagaagacgatgtgcaaaatacaaacagcgccttacggtacaaaggtaaaggaacaggcaagcccggggcgctgagtgggtccgccgatgggcagctttctgtccttcagcctaacacaattaatgtgcttgcagagaaacttaaggagtcccagaaggacctgtctattccattatcgatcaaaacatcgtcaggcgctgggtctccagcagtggccgttcctacacatagtcagccgagccctacgccatcaaacgagtcgaccgacacggcctcagaaatcggctccgcgtttaattccccactacgaagccccatcaggtccgctaacccaacccgtccctctagtccagtcacaagtcacattagcaaagtgctgtttggtgaggatgactcactgctgcgcgtcgattgcatacgctacaatagagcggtcagagatctgggccccgttatttccactggtctcttgcatctggctgaggacggggtgttgtcgccgctggcccttactgaaggcggcaagggctccagcccttccatccggcctatccaggggtcccaaggttcatcttcaccggtcgaaaaggaggtggtagaagctaccgattcgcgagagaagaccgggatggtgcgaccaggtgagcccctgagcggcgagaagtattcacctaaggagctgctagctttgctgaaatgtgtcgaggctgaaattgccaattacgaggcatgtctcaaggaagaggttgagaagcggaaaaagtttaagattgatgaccagagacgtacccacaattatgacgagtttatctgcacgttcattagtatgctcgcacaggagggaatgctggcaaacctcgtggaacagaatatcagtgtgcgtcgccggcaaggggtttcaatcgggcgtctacataagcagagaaagcccgatcgacggaagcgcagcaggccatataaagccaaacgccagtag

SEQ ID NO: 180730 - DNA, 879 bp, synthetic construct
  misc_feature 1..879: note = Description of Artificial Sequence: Synthetic coding sequence
  source 1..879: mol_type = other DNA
atggccgtgcaggtggtgcaggccgtgcaggccgtgcacctggagtctgacgcatttctggtgtgtctcaatcatgccctctccaccgagaaggaggaggttatgggtctatgcattggcgaactgaatgatgacacctctcgttccgactcaaagttcgcctacactggaacagaaatgcgcaccgtggctgagaaagtagatgctgtccgtatcgtgcacatacattcagtgattatactgcgtcggtcagataaacggaaggaccgcgttgagatctcccccgagcagctttccgctgcttcaacagaggccgagcgactcgccgagctcaccggccgccctatgcgtgtagtcggctggtaccactcacatcctcatataaccgtctggcctagccacgtcgatgttcgcacacaagctatgtatcagatgatggaccagggttttgtgggccttatattttcctgctttatcgaagacaagaacacgaagaccgggcgggtgttgtacacctgcttccagtctattcaggctcaaaaaagcagcgaatacgaaaggatagaaatcccaatccatattgttcctcacgttaccatcggcaaggtctgcttggaaagcgccgttgagctccctaaaatcttgtgtcaggaggaacaagatgcctaccggagaatccactccctgacgcacttggactccgttactaagatccacaacggctccgttttcacaaagaatctctgctctcagatgtccgctgtttctgggcctctattgcaatggctggaagaccgcttggagcagaaccaacagcatctccaagagcttcaacaggaaaaggaggaactaatgcaggagctttcctctcttgagtag

SEQ ID NO: 180731 - DNA, 876 bp, synthetic construct
  misc_feature 1..876: note = Description of Artificial Sequence: Synthetic coding sequence
  source 1..876: mol_type = other DNA
atggccgtgcaggtggtgcaggccgtgcaggccgtgcacctggagtcagacgccttcctggtctgtctgaaccatgccttgtctactgagaaggaagaggtaatgggtctttgtataggcgagctcaatgacgacactcgcagcgacagtaaattcgcctatacaggtaccgagatgcggactgtcgctgagaaagttgatgctgttagaatagtccacatccattctgtcatcatcctacgaagaagcgacaaaagaaaagatagggtggaaattagccctgaacagctgagcgcagcatcaacagaggcggaacggctggctgagttaacagggcggcctatgagagtagtggggtggtaccactcccaccctcacatcaccgtctggccatcgcacgtggatgtgagaactcaggccatgtatcagatgatggaccagggatttgtcgggttgatatttagctgtttcattgaagataaaaatactaaaacaggaagagtgctgtatacctgtttccagagcatccaggcccagaaatcaagcgagtatgagcgaatcgaaatcccaattcacatcgtgccccacgtcacaatcggcaaagtgtgtcttgagagcgccgtagaactgcctaagatactatgccaagaggagcaggatgcttaccgccgtatccattctctcactcatttagattccgtcacaaagatccataacggctcagtctttaccaaaaacctgtgctcacaaatgtccgccgttagcgggccactgctacagtggctggaggatcgattggaacagaaccagcagcatctccaagaactgcaacaggagaaagaagagctgatgcaagagctgagcagcttggagtag

SEQ ID NO: 180732 - DNA, 951 bp, synthetic construct
  misc_feature 1..951: note = Description of Artificial Sequence: Synthetic coding sequence
  source 1..951: mol_type = other DNA
atggccgtgcaggtggtgcaggccgtgcaggccgtgcacctggagagtgatgctttcttagtatgtctgaaccacgccttgagcacagagaaagaagaagtgatgggtctctgtatcggggaactgaacgatgatacccggtcagactctaaatttgcttacaccggcacagagatgcgtacagtggcagagaaggtcgatgcggtgcgcatcgtacatatccactcggttatcattctgagaagaagtgacaaaagaaaggatcgggtggagatcagtcccgagcagctgagcgccgctagtacggaggccgagagacttgcagagctgactggacgcccgatgcgcgtggtgggctggtaccactcccacccccacattactgtttggccatcccacgttgacgttcggacgcaggctatgtatcaaatgatggatcagggtttcgtgggattgatcttctcctgcttcatagaagacaagaatactaagaccggaagggtgctgtacacatgcttccagagcatccaagctcaaaaaagctcagaaagtttgcacggaccccgcgacttctggagtagctctcaacacatttctatagaagggcagaaggaagaggagcgctatgagaggatcgaaattcctatccacatcgtgcctcacgtcacgatcgggaaggtttgtctggagtctgccgtggagctgcccaagattctttgccaggaagaacaggatgcttatcgccgtatccacagtctgacccatcttgacagcgtcaccaaaattcataacggcagcgtgtttacaaaaaatctgtgtagccagatgtcagctgtgtccggccccctccttcaatggctggaagataggctcgagcaaaaccaacagcatttgcaagaactgcaacaagaaaaggaagaactaatgcaggagctcagtagcctcgaatag

SEQ ID NO: 180733 - DNA, 954 bp, synthetic construct
  misc_feature 1..954: note = Description of Artificial Sequence: Synthetic coding sequence
  source 1..954: mol_type = other DNA
atggccgtgcaggtggtgcaggccgtgcaggccgtgcacctggagtcagacgcttttctggtctgtctcaatcacgcactgtcaaccgaaaaggaggaagtgatgggcctctgcattggtgaggtgagttccccctcccgttccgattccaagttcgcgtacacaggaaccgagatgcgaacagtggctgagaaagtcgacgcggtccgcattgtccacattcactcggttataatcctgcgtcgatctgacaaacgaaaagaccgcgttgagatctctcccgagcagctgtcggccgcaagtactgaaactcacaggctggccgaacttacagggcgccccatgcgcgtagtgggctggtaccactcacacccacatattacagtgtggccctcccacgtggacgtgagaacccaagccatgtaccagatgatggatcagggattcgtcggcctgattttctcatgttttatcgaggacaagaatacgaagactgggagagtgctctatacctgcttccagtccattcaggcccagaaatcctctgaatctttgcacgggccgcgggatttttggtcatcttcccaacacataagcatcgaaggccaaaaggaagaggagcggtatgaaagaattgagataccgattcacatcgtgccacacgtgaccataggcaaggtgtgcctggagtccgctgtcgagctcccaaagatcttatgccaggaagaacaggatgcctataggagaatccatagtctcacccacctggactctgttacgaagatccataacggcagcgaggtttttactaaaaatctctgttcacagatgtcggccgtttctggaccactcctgcagtggctcgaggaccgcctcgagcaaaaccagcagcacctgcaggaactccagcaggaaaaggaagagcttatgcaggagctgagctccctagagtag

SEQ ID NO: 180734 - DNA, 747 bp, synthetic construct
  misc_feature 1..747: note = Description of Artificial Sequence: Synthetic coding sequence
  source 1..747: mol_type = other DNA
atggccgtgcaggtggtgcaggccgtgcaggccgtgcacctggagagtgatgcgttcctggtgtgtctaaaccatgccctgagcaccgaaaaagaagaggtgatggggctgtgcataggggaggtatccagtccatcacgcagtgactccaagtttgcatatacagggactgagatgcgaacggttgctgagaaagtggacgcagtgcgtattgttcatatccattccgtcattatcttgagacgcagcgataagaggaaagatagggtggagatttctcccgagcagctctctgccgctagtaccgagacgcatcgactggccgaactgaccggccgacctatgagggtggtcggctggtatcactcccacccacacatcacagtatggcccagtcatgtggacgtacggacccaggctatgtatcagatgatggatcagggctttgtggggcttattttctcctgttttatcgaggacaaaaataccaagaccgggcgggtactgtatacatgcttccaaagtatccaagcccagaaatccagtgatctcactcacttagatagcgtgaccaaaattcacaacggaagcgaggtgtttacaaaaaatttgtgttcccagatgtccgctgtctcaggccccctcctccagtggttggaggatcgcttagagcagaatcagcagcacctgcaggagctgcaacaggaaaaagaagagcttatgcaggagttaagctcgctggagtag

SEQ ID NO: 180735 - DNA, 1845 bp, synthetic construct
  misc_feature 1..1845: note = Description of Artificial Sequence: Synthetic coding sequence
  source 1..1845: mol_type = other DNA
atgggcaaccagatgagcgtgccccagcgggtggaggaccaggagaacgagcccgaagccgaaacatatcaggacaacgccagtgccttaaacggcgtcccagttgtggtcagcactcacacagtgcagcacctagaagaggtggatttggggatatctgtgaagacagataatgtcgccacaagtagccccgaaaccacagagatctctgctgtagccgatgcgaatggcaaaaacctcgggaaagaggcaaaaccggaggcgcctgccgcaaaatcccggtttttcctgatgctcagtaggcctgtgccggggagaacgggtgaccaagcagccgactcctctctgggcagcgtgaaactggacgtgagcagcaataaagctccagcgaacaaagatccgagtgagtcctggaccctccccgttgccgctggacccggacaggatacagacaagacccctggacacgcccctgcccaggataaagtcctctcggcagcacgagatccgacactgctaccccctgaaactggtggggccggcggggaagccccgtcaaaacccaaggattcttccttctttgataaattcttcaaactggataagggccaggagaaagtgcccggtgattcccagcaggaggcaaaacgtgccgagcaccaggataaggtggatgaagtgcccgggttatctgggcaatccgatgacgttcccgcaggaaaggatatcgtggatggcaaagaaaaggagggccaagagctcggaactgcagattgcagcgttccaggcgaccccgagggactcgagacagccaaggacgactctcaggctgcagctattgcggagaataacaacagcatcatgtcattctttaaaacactggtgtctccaaataaggccgaaaccaaaaaagaccccgaggatacagctagtaaagccgagtctgtctgcgatggccaggccggacaaaaaacgagtgagatacaggcccgaggtacaaaaaagaagcatcttgatagtcctcgcctgggtcttgcctttcgcaagttctttcgacacaagggggcagagaaaagccccactacttcagccgacctgaagagtgacaaggccaatttcacatcacaggagactcaaggtgctggcaagaatagtaaggggtgcaatccgtcagggcacacacaaagcgtcaccacacctgaacccgcgaaagaggggaccaaagagaagagtggtcctacgtcgttgccactcgggaaactattctggaaaaaagtggtttgtgagagtccagtggaaatcatcaaatccaaagaggtagagagtgccctccagactgtcgacctcaatgaaggggatgcagcacccgaacctacagaggctaagctgaaacgcgaggaatccaaaccacggacctctttaatggcattcttgcggcaaatgacgagtgattcaaccgagaagacaatcacacctcctgaaccagagccaacaggtgctccgcaaaaagggaaggaaggctcatctaaggacaaaaaaagcgcggcagaaatgaataaacagaaatcaaacaagcaagaggccaaagaaccggcacagtgcacggaacaggccacagtagacacaaacagcctgcagaatggcgacaagctgcagaagcggccggagaagaggcagcagagcttagggggcttttttaagggtctcggaccgaagagaatgctcgatgcgcaggtgcagaccgatcccgtgtccatcgggcctgttgggaagtccaagtacaccggaaagtgcgtttttagtcacgtgaagaaaaagtggcccttccaggagtggtcatattag

SEQ ID NO: 180736 - DNA, 1755 bp, synthetic construct
  misc_feature 1..1755: note = Description of Artificial Sequence: Synthetic coding sequence
  source 1..1755: mol_type = other DNA
atgggcaaccagatgagcgtgccccagcgggtggaggaccaggagaatgagcccgaggcagagacttaccaggacaatgcgtctgcattgaatggcgtgccagtagtggtgtcaacacacaccgtgcagcacttagaagaggttgatctggggatttcggttaaaaccgacaatgtggccacctcatcacctgaaactacagagatatccgcagttgcggacgctaacgggaagaacctggggaaggaagctaaacccgaagctccggcggcgaagagcaggttttttctgatgctgtccagaccggtgcccggcaggacgggcgaccaggccgctgacagttccctgggcagcgtcaagctggatgtttcgtcaaataaagccccagccaacaaggaccctagcgagtcttggacactccccgtggctgctggccctggacaggacacagacaagacccctggccatgccccagcccaggacaaggttctttcggcggcccgggaccctactctgttacctcctgaaacggggggggctggaggtgaggctccttcaaagcctaaggatagctccttcttcgacaagttttttaagcttgacaaggggcaggagaaagtgcccggagattcccagcaggaagctaaacgggcagaacaccaggataaggttgacgaggtgcctggacttagcgggcagtcagatgacgtaccagctggaaaagatattgtggatgggaaggaaaaagagggccaggagcttgggactgctgactgctctgtgcctggggacccagagggcctcgagactgccaaagatgactcacaggctgccgccatagcagaaaataataattctatcatgagtttctttaagaccttggtgagtccgaacaaagctgagaccaagaaggacccagaggataccggggccgaaaaatctcccacaacatccgcagacctcaaatccgacaaggccaactttacttctcaggaaacacagggcgcgggtaagaattccaaaggctgcaacccttctggccacacccaatcggtcactactcctgaacccgccaaggaagggaccaaggagaaaagtggacccaccagtctgccccttgggaagctcttctggaagaaatccgtaaaggaagattccgtgccgacaggcgccgaagaaaatgttgtgtgcgagtccccggtggagatcataaaatctaaggaagtcgaatccgctctgcagactgtggaccttaatgagggcgacgcagcaccggaaccaaccgaagccaagctaaagcgggaggagagcaagccgagaacgtcgctcatggcattcctgcgccagatgagcgtgaaaggcgatggagggatcacccactcggaggagattaacgggaaggacagttcctgtcagacttccgactcgactgagaaaacgattactccacctgaacccgagccaacaggggctccacaaaagggaaaggagggctcttccaaagacaagaaaagcgctgcagagatgaataaacagaagagcaataaacaggaagccaaggagcctgcccagtgcaccgaacaggccaccgtcgacacgaacagtctgcagaatggtgacaagctccagaaacgccctgagaagcgccagcaatcgttgggcggattttttaaggggctggggcccaaacgcatgctggacgcacaagtgcagactgacccggtttctatcggaccagttggtaagtctaaatag

SEQ ID NO: 180737 - DNA, 495 bp, synthetic construct
  misc_feature 1..495: note = Description of Artificial Sequence: Synthetic coding sequence
  source 1..495: mol_type = other DNA
atgctgagccggcccgtgcccggccggaccggcgaccaggccgccgattcgtctttgggatctgtgaagcttgatgtgtcgagtaacaaggcccccgccaacaaggacccatccgagagctggacgctccccgtggcggccggacctggccaggataccgacaaaacacctggccatgctcccgcgcaggataaggtgctcagcgctgcacgagaccctaccttactgcctcctgagactggaggcgccgggggtgaagcccctagcaagccgaaggacagcagcttctttgataaatttttcaagttggataagggccaggagaaagtgccaggcgactcacagcaggaagccaagagagccgagcaccaggacaaggtggacgaggtgcctggactcagcggccagtccgatgatgtccctgccggaaaagtgtctgtgcccaggtgtatccacctcgtcctcaacgcctgtagcggtgctctcatgggttag

SEQ ID NO: 180738 - DNA, 753 bp, synthetic construct
  misc_feature 1..753: note = Description of Artificial Sequence: Synthetic coding sequence
  source 1..753: mol_type = other DNA
atgagcttcttcaagaccctggtgagccccaacaaggccgagaccaaaaaggatcctgaggataccgcatctaaggctgagagcgtctgcgatggccaagcaggccagaagacatcagagattcaagccagagggaccaagaagaaacacctggactcaccccgcctcggcttggccttccgcaaattcttccggcacaagggggcggaaaagagtcctaccacaagcgctgatctgaaatctgacaaggccaactttacgagccaggagacacagggcgcaggaaagaattccaaggggtgtaatccttccggccacactcagtcagttaccacccctgaacccgccaaggagggcaccaaggaaaaaagcggcccaacgtcactgcccctgggcaagctcttttggaagaagacttctgatagtaccgagaaaacgatcaccccacccgaacctgagcctactggtgcgccacagaagggaaaagaagggagcagcaaagataagaaaagcgcagcagagatgaacaagcaaaagagcaacaagcaagaggctaaagaacctgcccagtgtacagaacaggcaacagttgacacaaactccctccagaatggggacaaactgcaaaagcggcctgaaaagcggcagcagtcactaggcggatttttcaagggtctgggtccgaagcgaatgctagatgcgcaagtgcagaccgaccctgtttcaattggcccagtcggaaaatctaaatag

SEQ ID NO: 180739 - DNA, 1155 bp, synthetic construct
  misc_feature 1..1155: note = Description of Artificial Sequence: Synthetic coding sequence
  source 1..1155: mol_type = other DNA
atgagcgcccccatcaagctgcagcggaccaagacccaggtgcgggcaggccatttcagatggcagctggaccgcggcaggacccaaatcaaacctcagggaacacctcgacctaaaactcgctccagccttccccctggaatcccgagattctcacaccttcgtcaaggtgagcaggaagagaaactcccccctagccctcggacacctttttttgataagttttttaaactggataagggacaggagaaggtccctggtgattcacagcaagaagccaaaagggccgaacatcaggacaaagttgatgaggttccaggtttgtcgggacaatctgatgatgtgcccgcaggcaaggatatcgtagatgggaaggaaaaggaggggcaggaactagggactgccgattgctcagtgccaggtgatccagaagggctggagactgcgaaagatgacagccaagcagcggctattgccgagaacaacaactcaattatgtcattttttaagaccttagtgtctccaaataaggctgaaaccaagaaagacccggaggatacgggagctgaaaagtctcctacaacttcagctgacctcaagtcagacaaggctaacttcactagtcaagaaacgcagggcgccggaaaaaactctaagggctgtaatccctcaggccatactcagtccgtgactaccccggaaccagcgaaggaggggactaaagagaagagtgggcccactagcctccccttgggtaagctgttttggaaaaagtcagtgaaagaagactctgtgcctacaggcgccgaagaaaacacaagtgattctacagagaaaacgataacacccccggagccagagcccacgggtgctcctcagaagggcaaggagggatcttcgaaagataaaaagtccgccgcagagatgaacaagcagaagtctaataagcaagaggcgaaagaacccgcacagtgcacggagcaggctactgtggacaccaactccctccaaaatggcgacaagctccagaagaggccggaaaaaagacagcagtcattgggcggattcttcaagggcttagggcccaagcgaatgctagatgctcaggtccaaaccgatcccgtaagcataggcccagtcggaaagagtaagtag

SEQ ID NO: 180740 - DNA, 678 bp, synthetic construct
  misc_feature 1..678: note = Description of Artificial Sequence: Synthetic coding sequence
  source 1..678: mol_type = other DNA
atggccggcaccggcctggtggccggcgaggtggtggtggacgccttaccgtatttcgaccaaggatatgaggctcccggtgtgcgagaagcagccgctgcactcgtcgaggaggagacacggcgctatagacccactaagaattacctaagctacctcacggcccctgattatagcgcatttgaaacagatatcatgcgcaacgagttcgaacggttggctgcgcgccaacctatcgaactgttatctatgaagcggtacgaactgccagccccctccagcggacagaagaacgacatcaccgcttggcaggagtgcgtaaataattccatggcccaactggagcatcaagccgtgcgaatcgaaaatctggaattgatgagccaacacggatgtaatgcgtggaaagtgtacaacgagaaccttgtgcacatgatcgagcatgcccagaaagaactacagaagctcagaaaacatatccaggacttgaactggcagcggaaaaacatgcagttaactgctggatctaagttacgggagatggagagcaactgggtaagcctcgtgagcaaaaattacgaaatcgaacgcacaatcgttcagttagaaaatgaaatctaccaaatcaaacaacaacacggagaagccaataaagagaacatccgccaagatttttag

SEQ ID NO: 180741 - DNA, 477 bp, synthetic construct
  misc_feature 1..477: note = Description of Artificial Sequence: Synthetic coding sequence
  source 1..477: mol_type = other DNA
atgcagcggaccggcggcggcgccccccggcccggccggaaccacggactcccgggatccctgagacaacctgaccccgtggctctacttatgttgttggtcgatgcagatcaacctgagcccatgagatccggggctagggagctggccttattcctgacacctgagccaggagcagaagcgaaagaggtcgaggagactatcgaaggtatgctgttacggctcgaggagttttgctcgctcgcagacttaatccggagcgacactagccagatactcgaggagaacatacccgtactgaaagccaaattgactgagatgcgcggcatttacgccaaagtggataggttggagaaatctccagctccagtacctgttacttacgagctgcccactctctataggactgaggactattttcccgtggacgccggcgaagcacaacatcatccgcgcacatgccccagacctctgtag

SEQ ID NO: 180742 - DNA, 570 bp, synthetic construct
  misc_feature 1..570: note = Description of Artificial Sequence: Synthetic coding sequence
  source 1..570: mol_type = other DNA
atgcagcggaccggcggcggcgccccccggcccggccggaaccacgggttgcccggcagtctgcgacaaccagacccagttgccctgcttatgctgttggtcgacgccgaccaacccgagcccatgagatcaggggccagagagcttgccctgttcctaactccagaaccaggtgccgaagccaaggaagtagaggagactatcgagggaatgctgcttcgtcttgaggagttttgctcactggctgacctgatccgctcggacacttcccaaattctggaggaaaacatacctgtcctgaaagcaaaactgactgaaatgagggggatttacgcgaaagttgataggttggaagccttcgtcaagatggtggggcaccacgttgcctttttagaagccgacgtgctacaggccgaaagggatcacggagcttttccacaggctctgcggcgctggctcggatctgcaggactgccctcgttcaggaacctcgagtgtagcggtgccatcttagcacactgcaacctgaggctctccggctcttcagactctcctgctagcgctagctag

SEQ ID NO: 180743 - DNA, 636 bp, synthetic construct
  misc_feature 1..636: note = Description of Artificial Sequence: Synthetic coding sequence
  source 1..636: mol_type = other DNA
atgcagcggaccggcggcggcgccccccggcccggccggaaccacggcttgcccgggtccctgcggcagcccgatccggttgcgctgttgatgttgttagtcgatgccgatcagcccgagcctatgaggagcggcgctcgcgagcttgccctattcctcacccctgaacccggcgctgaagccaaagaggtcgaagagacaattgaggggatgttactgcggctggaggagttctgctccctggccgatcttatacgatctgataccagtcagatcctggaagagaatattccagtattgaaggccaaattgacggaaatgaggggtatatatgctaaagttgatcgcctggaggcgttcgtcaagatggtggggcaccacgtggcgttcctcgaagctgacgtgctacaagccgagagggaccatggagccttcccacaggccttacggcggtggctgggtagcgcaggacttccaagctttcggaatgtggagtgttcagggactatcccggcaagatgcaacctcaggctgccggggtcctcggactctccggctagtgcatcgcaggtcgctggaattaccgaagtaacctgtaccggtgcaagagatgtgcgcgcagctcataccgtatag

SEQ ID NO: 180744 - DNA, 612 bp, synthetic construct
  misc_feature 1..612: note = Description of Artificial Sequence: Synthetic coding sequence
  source 1..612: mol_type = other DNA
atgcagcggaccggcggcggcgccccccggcccggccggaaccacggcctgccagggtcgctgcgacagccagaccccgtcgctctcctcatgttacttgtggacgccgatcaaccggaaccaatgcgctcaggtgcacgcgaacttgcactgtttctgaccccggagcccggcgccgaagccaaggaggtcgaggagaccattgaaggtatgctcctgagattggaagaattctgtagcctggccgacttaattagaagcgacacaagtcagattctcgaagaaaatatccctgtgctgaaagcaaagctgacggagatgcggggcatctatgcgaaggtggaccgtctggaagcgttcgtcaaaatggtagggcaccatgtcgccttcctagaagccgacgtcctccaggcagagcgcgaccacggagcattccctcaggccctgcggagatggttgggcagcgcgggattaccatcttttcggaataagtctcctgcgccagttcctgtgacatacgaactccccactctgtaccggacagaagattattttcccgtggacgcaggcgaggcccagcaccacccaaggacctgccccaggccactctag

SEQ ID NO: 180745 - DNA, 627 bp, synthetic construct
  misc_feature 1..627: note = Description of Artificial Sequence: Synthetic coding sequence
  source 1..627: mol_type = other DNA
atgaccggccgggtgtgccggggctgcggcggcaccgacatcgagttggatgcagctaggggcgacgcggtgtgcacggcctgtggatccgtgctcgaagacaacattattgtctcagaagtgcaatttgtcgaatcaagcggcggtggaagctcagctgtgggacaattcgtctctctcgatggcgccggtaagactcccaccctgggaggtggcttccatgttaatctgggaaaggagagcagggcgcaaaccttacaaaatggccggagacacatacatcatttgggtaatcaactccaactgaaccagcactgccttgacacagctttcaatttctttaagatggccgtgtcccgtcaccttactcgaggcagaaaaatggcacacgtcattgccgcctgcctgtatctagtttgtcgcaccgaggggaccccacatatgctgcttgatttgtctgacctcctgcaggttgactccctgcgccctgcttcttttccgacctggggctgcgacctaggcgtggtgaccagggtcgttaccggagtatatcccagatgcctgcatgcctctcaatggccggtttgtgcggcttgccctgtcaggaaattctggtctgtgggatag

SEQ ID NO: 180746 - DNA, 1689 bp, synthetic construct
  misc_feature 1..1689: note = Description of Artificial Sequence: Synthetic coding sequence
  source 1..1689: mol_type = other DNA
atggccgtgagccggcacctgacccggggccggaagatggcccacgttatagccgcgtgtctgtacctggtttgtaggaccgaaggcactccacacatgctgctggatttgtctgacctgctgcaagtgaatgtgtacgtgctcggaaagacctttctgcttctggcgagggagttgtgcattaatgccccagctattgacccatgtctgtatattcctcgtttcgcacacttgcttgaattcggagaaaaaaaccacgaggtttctatgacagccctcaggctattacagagaatgaagcgcgattggatgcacactgggaggcggccttccggcctctgtggcgcagcgttgctggtcgccgcccggatgcacgacttccgcagaaccgtcaaggaggtgatcagtgttgtcaaggtttgtgagtcgacactgcgcaagcggttgaccgagttcgaagatacccctactagtcaattgacaatcgacgagttcatgaagatcgatcttgaagaggaatgcgatcctccctcctataccgccggtcagcgtaagttaagaatgaaacagttagagcaggtgctttccaaaaaactagaggaagtggagggggagatctcctcctatcaggatgctatcgaaatcgagctcgaaaatagccgccctaaggctaaaggcggcctcgcctccctagcaaaagatggaagcactgaagacacagctagttccttatgcggcgaggaggacacagaggacgaagaattagaggccgccgcttctcatctaaataaggacctgtatcgcgagctgcttggaggcgcccctggaagcagcgaggcagctggtagccctgaatggggcgggcgccctccagctttgggcagcttgttagacccactgccaacggctgcgtcattgggcattagtgactccatccgcgaatgcatctcctcacaaagtagtgatcccaaagatgcttcaggtgacggcgagctggatctctccggtattgatgatctggagatcgaccgctatattctgaacgaatccgaggctagggtgaaagccgagctctggatgcgagaaaacgctgaatatctgagagagcagcgcgagaaagaagcgcgtatagctaaagagaaagagctggggatctataaagaacacaagccaaaaaaatcctgtaaaagacgggagcccatccaagccagcactgcacgcgaggcaatcgagaagatgttggaacagaagaagattagctcaaagataaattattccgtcctccggggactttcatcggctgggggtggctcccctcatcgcgaagacgcacagccggagcactctgcttccgccaggaagcttagtagaagaaggaccccagcttcgagatctggggctgatccggtcacttctgtgggtaaacgattgagaccactagtgtcgacccagcccgccaagaaagtggcgaccggcgaggccttacttccgagctcgcccactctcggagccgaaccagctcggccacaggccgttctcgttgagtccgggcctgtctcttatcacgctgatgaagaagccgacgaggaagaacccgacgaggaagatggggaaccatgcgtgtcagccctgcagatgatgggctctaacgattacggctgtgacggcgacgaggacgatggctactag

SEQ ID NO: 180747 - DNA, 408 bp, synthetic construct
  misc_feature 1..408: note = Description of Artificial Sequence: Synthetic coding sequence
  source 1..408: mol_type = other DNA
atgaccgccctgcggctgctgcagcggatgaagcgggactggatgcataccggacgtcgaccatccggattgtgcggagccgctctgttagttgccgctaggatgcacgatttccggagaacagtcaaggaagtcatctcggtggtaaaggtttgtgaatccacactgcgaaagcggctgaccgagtttgaggacacgcctacaagtcagctcaccatcgacgaatttatgaagatcgatctggaagaggaatgtgaccccccacctatcgaggaaggagggcagacagaggcaagggaacctccacaggctagtagctgggaggggcctagcacgactcgccgacggtcccaactgtggcacggatgccccggctgcgggagggggggatttacactgtgcccatag

SEQ ID NO: 180748 - DNA, 723 bp, synthetic construct
  misc_feature 1..723: note = Description of Artificial Sequence: Synthetic coding sequence
  source 1..723: mol_type = other DNA
atgaccggccgggtgtgccggggctgcggcggcaccgacatcgagttagatgccgccagaggtgatgctgtctgcaccgcctgcgggtccgtgttagaggataacatcattgtgtcagaggtacagttcgtggaatctagtggcggtggatcatcagctgtggggcagttcgtgtcgcttgatggagccggtaagacaccaacccttggtggggggttccatgtgaatttgggcaaggaatcacgcgcccagactctccagaatggaaggcgtcatatccatcacttgggcaatcagctgcagctcaatcaacattgtcttgacactgctttcaacttcttcaagatggccgtgtccagacacctgactcggggaaggaaaatggctcatgtcatcgcagcctgtttatacctggtgtgccggaccgaaggtacgccacacatgttactagacctaagcgacctgctccaggtggatagcctcagaccggcatcctttcccacatggggctgtgatctgggagtcgtgactcgagtagtgaccggcgtgtacccaagatgtcctcggatttcggtggccggcctttgctgcctgcccagtcaggaggtgctagtctgcagaatgcgaggcctgcacgatatgggagtcaccgttagggatctgtgggaatgtggcagtccctggcaagaacacttacctatgctgggcactgttggttgttag

SEQ ID NO: 180749 - DNA, 555 bp, synthetic construct
  misc_feature 1..555: note = Description of Artificial Sequence: Synthetic coding sequence
  source 1..555: mol_type = other DNA
atgaccgccctgcggctgctgcagcggatgaagcgggactggatgcatacagggaggagacccagcggcctctgtggcgctgccttgctggtggctgccagaatgcacgattttaggaggaccgttaaggaagtgatctccgtggttaaagtctgtgaatctactctgcggaaacgcctgacggaattcgaagacacccctacatctcagctgacaatcgacgagttcatgaaaattgatctggaagaagaatgcgaccctccaagctacacagcagggcagcgtaagctgcgaatgaagcaactcgaacaagtgctgtcgaagaagctggaagaagtagagggtgagataagctcttatcaggatgccatcgagattgagctcgagaattccccccctagtagacgggagggaagaagacggcccgaaagcctgccccggccattgcgtggcaaggcccccgtccccttggtgggcggccttagctcaggcatggctgctccagatgtcgcggaaggagcctcaccctgcgtcctgcgaaggggttggccgtag

SEQ ID NO: 180750 - DNA, 1953 bp, synthetic construct
  misc_feature 1..1953: note = Description of Artificial Sequence: Synthetic coding sequence
  source 1..1953: mol_type = other DNA
atgaccggccgggtgtgccggggctgcggcggcaccgacatcgagctggatgccgccagaggcgacgccgtgtgcactgcctgcggatcggtgcttgaagataacatcatcgtaagtgaggtgcaatttgtggagagttctggaggaggatcttctgcagtgggccagtttgtgtccttagacggcaggcgccacattcatcaccttgggaaccagctacagctaaatcaacactgtttggataccgcatttaatttttttaaaatggcagtatccagacatctgacccgcggaagaaagatggcacacgtgatcgcagcctgtctgtacctggtgtgcagaacagagggaacaccacatatgctcctcgatctctctgatttgctccaagtgaacgtttacgttctgggcaagacgttcctgctcctggcaagagaactctgcattaacgctccggcaatcgatccctgcctatatatccccagatttgcccatctgttagagtttggggaaaaaaaccacgaggtaagcatgacagctctccgcctgctccaacggatgaagagggactggatgcatactgggcgtcggccatcagggctgtgtggcgctgcattactcgtggccgcacgaatgcacgactttcgacggaccgtgaaagaagtgatatctgtggtgaaagtttgtgaatccacactgcggaaaagattgacggagttcgaagatacacccacttctcaactgaccatcgatgagttcatgaagatcgatctggaagaggagtgcgacccgccatcttacacggcagggcagcggaagctcaggatgaagcagctggaacaagttctgtctaagaaactcgaggaggtagagggcgaaatatcaagctatcaggacgctatcgagatcgaactggaaaactcacggccaaaggctaaaggcggtctggcctccctcgctaaagatggatcaacagaggacactgccagctcattgtgcggagaggaggatactgaggatgaggagttggaggcagccgcaagccaccttaataaagatctctaccgggaattgctaggcggggctcctggctcttcagaggcggccggctcgccggagtggggaggccgaccacctgcactgggcagcttactagaccctctcccaaccgccgctagcctggggatctccgactctatacgagaatgcatcagttctcagtcttcggaccctaaggacgccagtggggacggcgagctggatctgtctggaatcgatgacctggagatcgatcgctacatcctcaacgaatctgaggctagggtgaaggcagagctttggatgcgggaaaacgccgagtatcttcgtgagcaacgggaaaaggaagccaggatcgcgaaggagaaagaactgggaatctacaaggagcataagccaaagaaatcatgcaagaggagagagccaatccaggcctccaccgcgagggaagccattgagaaaatgttggaacagaagaagatatccagcaagatcaattactccgtgcttagaggtctctcctctgctgggggagggtcaccacaccgggaagatgcccagccagaacacagcgcttcagctagaaaactgtccagaagaaggacacccgctagccgcagcggcgccgacccagttacctcagtggggaaacgtctgagaccgttggtgagcacccagcccgccaaaaaggtcgctactggtgaggccctcctgccaagctcgcctaccttaggcgcggagccggcacgacctcaggccgtgctcgtcgagtctgggcccgtcagctaccacgccgatgaagaggctgacgaggaagagccagacgaggaagatggcgagccctgtgtgtccgccctgcaaatgatgggatccaatgactacggttgcgacggggatgaagatgacggatactag

SEQ ID NO: 180751 - DNA, 1422 bp, synthetic construct
  misc_feature 1..1422: note = Description of Artificial Sequence: Synthetic coding sequence
  source 1..1422: mol_type = other DNA
atgaccgccctgcggctgctgcagcggatgaagcgggactggatgcatacaggcagaaggccgtcaggcttgtgcggagccgccctgctggtcgcagcccggatgcacgactttcggcgcaccgtcaaagaggtgatttcagtcgtaaaggtgtgcgagagcactctgcgcaagaggctcacggagttcgaggacacacctacttcacagctaacgatcgacgagttcatgaagatcgaccttgaggaggagtgcgatcctccatcatacacagccggacaacggaaactgagaatgaaacagttggaacaggtgttgagtaagaaattggaagaggtcgagggcgagatcagctcctaccaagatgcaatcgaaattgaattggaaaacagcaggcctaaggccaagggaggcctcgcctcactggcaaaggatgggtcaacagaggatacagcttcttctctctgtggtgaggaagataccgaggacgaggagttagaagccgccgcatctcaccttaataaagatttgtacagagaactcctcggtggggcacctgggtcttccgaagccgctgggagtccagaatggggcggtagaccgcctgcgttgggaagcctgctagacccccttcctactgcagcatcactcgggattagtgattcgattcgagaatgtatcagctctcagtcttcagatccaaaggacgcaagcggagacggagagctggacctgtctggcattgatgatctcgagattgatcgctacatattgaatgaaagtgaggctcgcgtgaaagccgagctgtggatgcgcgagaacgcagaatatctccgggagcagagagaaaaagaggcaaggatcgcaaaggaaaaggaactggggatttataaggagcacaaacccaagaagtcctgcaaacggcgggagcctatacaagcttcgactgcgcgcgaagcaattgaaaagatgctggagcagaagaagatcagttctaagatcaattattcagtgttgcgggggctgagctctgcagggggagggtctccccatcgtgaggatgcccagcccgagcattccgctagtgctagaaaactatcccggagacgcacaccagcatccaggtccggggccgatcctgtaaccagcgtgggtaagcggttacgaccactggtgtccacccagcccgctaagaaagtggccaccggcgaagcactgctcccgtccagtccaactctcggcgctgagcccgcccggccccaggccgttttagtagagtccgggccagtgtcataccacgccgatgaagaggccgacgaggaagaacccgacgaagaagatggggagccatgtgtaagtgcactgcagatgatggggtcgaatgattatgggtgtgatggtgacgaggatgatggctattag

SEQ ID NO: 180752 - DNA, 1755 bp, synthetic construct
  misc_feature 1..1755: note = Description of Artificial Sequence: Synthetic coding sequence
  source 1..1755: mol_type = other DNA
atggccgtgagccggcacctgacccggggccggaagatggcccacgtcatcgcagcctgtctttacctcgtgtgtcgaaccgaaggaacccctcatatgctactcgacttatccgacctcctgcaagtgaacgtctacgttctgggtaaaacgtttttgctgttggccagagaactttgcataaatgcccctgccattgacccatgtctttatattccacgttttgctcatctgttagagtttggtgaaaaaaatcatgaggtatcgatgaccgccctcaggttgctgcagagaatgaaaagagactggatgcacaccgggaggcgcccttctgggctgtgcggggccgctctgctggtggcagcgaggatgcatgacttcaggagaacagtgaaggaggtcatctctgttgtgaaggtatgcgagtctacgctgcgcaaacgattgaccgagttcgaagatactcccaccagccaactgacgatcgacgaatttatgaaaattgatctcgaggaggagtgtgatcccccttcctacaccgccggtcagcgcaaactccggatgaagcagctggagcaggtgctttcgaagaagttggaggaggtcgaaggtgagatctctagctaccaagatgcaatcgagatcgaattagagaactctagacctaaggcgaaaggcggacttgctagtctggcaaaagatgggagcactgaagataccgcctcctcactctgcggcgaagaggatacggaagacgaggagctggaagcggcagcctcccatctcaacaaagacctctatagggagctcctgggcggtgctcctgggtcctccgaggcagcgggttccccagagtggggagggaggcctccagcccttggatcattgcttgacccattgcccaccgctgcctccctcggaatctccgattcaatccgagagtgcatcagcagccagagttctgaccctaaagacgcgtcaggggatggcgaactggatctgagtgggattgatgacctcgagatcgatcgccgtgacttatccatgccccgatgtgcaaaggcaaagtcccagcctcattttccggtcttggcccagtatatcttgaacgagagcgaagcccgggtgaaggccgaattgtggatgcgcgagaacgccgagtacctgagggagcagcgcgaaaaggaagccaggatagcgaaagaaaaagagctaggaatctataaggaacataaacccaaaaaaagctgtaaaaggcgcgaacccattcaggcctcaacagcgagagaagcaatcgagaagatgttagaacagaaaaagatctcctccaagattaactacagtgtcctaagagggctgtccagcgctggaggcggaagtccgcaccgcgaggacgcacagcctgaacattctgctagcgctcggaagctgagcaggagacgtacacctgcaagtaggagcggtgccgatcccgtgacctcagtgggaaagcgactacgccccctggttagtacccaaccagctaagaaagtggcaaccggagaggctttgctgccaagcagtccaaccttgggggctgaacccgcacgccctcaggccgtgctggtggaatccgggcccgtgagctaccacgccgacgaagaagccgatgaggaggaaccggatgaagaagatggtgaaccttgcgtatcagccttgcagatgatgggctcgaatgattacggctgcgacggggatgaggatgacggctattag

SEQ ID NO: 180753 - DNA, 1320 bp, synthetic construct
  misc_feature 1..1320: note = Description of Artificial Sequence: Synthetic coding sequence
  source 1..1320: mol_type = other DNA
atgcacgacttccggcggaccgtgaaggaggtgatcagcgtggtgaaagtctgtgagtcgaccctccgcaaacggctgaccgaatttgaggacactccaacaagccagctaacgatcgacgagttcatgaagattgaccttgaagaggaatgtgatcccccttcatacactgccggccagaggaaactgcgcatgaagcagcttgaacaggtgctgtcaaagaagctggaggaggtggaaggggaaatttctagctaccaagacgccatcgagatcgagctagaaaattcccgacccaaggcaaagggcggacttgcatccttggctaaagatggatccacagaagatacagctagcagcttatgtggagaggaggatacagaggatgaggaacttgaggccgcggcctcacatttgaacaaagatttatatagagagttgcttggcggcgcaccgggaagctctgaggccgcaggctcccctgagtggggcggcaggccaccagccctgggttctctcctggatccactccctacggcagcatctcttggtatcagcgattctatccgggaatgtatctcttcccagtcatccgatccaaaggatgccagcggagatggcgaactggacctgtctggcattgacgatctcgaaatcgatcggtacatcctgaatgaatcagaggccagagtcaaggccgaactttggatgcgggaaaacgctgagtatttgcgcgagcaacgcgagaaggaggcgagaattgctaaggagaaggagctgggaatatataaagaacataaacctaagaagagttgtaaaaggagggagcccatccaggcatctaccgcacgggaggccattgagaagatgctcgagcaaaagaagatctcctctaagatcaactacagtgtgctgagaggactcagctcggccggaggggggagtccacatagggaagatgctcagcccgagcatagcgcatccgcgcggaagttgtcccggagacgaaccccagcttcgcgatctggtgccgaccctgtgacctcagtgggcaagcgcctccgaccgttagtgtctactcaacctgccaagaaagtggcaaccggagaagcactgttgccatcttcgccgacccttggagccgaaccagcaagaccccaagccgtcctggttgagagtgggccagtatcctaccacgcagatgaagaggctgatgaggaggagcctgacgaagaagatggagaaccgtgtgtgtccgcactgcagatgatgggatctaatgattacggctgcgacggggatgaagacgatggttactag

SEQ ID NO: 180754 - DNA, 2034 bp, synthetic construct
  misc_feature 1..2034: note = Description of Artificial Sequence: Synthetic coding sequence
  source 1..2034: mol_type = other DNA
atgaccggccgggtgtgccggggctgcggcggcaccgacatcgagctggacgctgctagaggggatgccgtgtgcaccgcatgtggtagcgtgttggaggacaatatcatcgtgtcagaagttcaattcgtcgagagctctggagggggaagttctgccgtcggacagtttgtttcccttgatggcgctggaaaaacccccacactgggcggcggctttcatgttaatctgggcaaagaatcacgggctcagacgctgcaaaacgggaggcgtcatatacaccacctgggcaaccagctccaactcaaccagcactgcctggacaccgcctttaacttcttcaagatggcagttagcaggcatctcacacggggccggaagatggctcacgtaatcgctgcatgtctgtacctggtttgccgtacagaaggcacccctcatatgctcctcgacctgtcagacttgttacaggtgaatgtgtatgtgttgggaaaaaccttcctcctgttggccagagaactctgcataaatgctccagccatcgacccctgcttatacatcccccggttcgcccacctgctagagtttggggagaagaatcacgaggtttcgatgactgccttaaggttactgcagcggatgaagagggattggatgcatacaggcagacgcccatccggcctgtgtggcgccgctctgctggtggcggcaagaatgcatgatttcaggcgcaccgtgaaggaagtcatctctgtggttaaagtgtgcgaaagtacactacgcaaacgcctaacggagttcgaggacaccccaaccagccagttgaccatcgatgagtttatgaagattgaccttgaggaggaatgcgaccctccttcatacactgccgggcaacgcaagcttcgcatgaaacaactcgaacaggtgctctcaaagaagctggaggaggttgaaggtgaaatttcaagttaccaggacgccatcgaaattgaactcgaaaattcaaggccaaaggctaaagggggactggcgtccctcgccaaggatgggtcaaccgaagacactgcctcttccctttgcggcgaagaggataccgaggatgaagagcttgaagctgcagcatcccatctcaacaaagatctgtatagggaactgctgggcggcgcccccggaagctctgaggccgcaggcagtccggaatggggcggccgcccacccgcactcggatcactcttagacccactgccaacggccgcttctctggggatatcagattcaattagggagtgcatctcatcccagagctcagaccctaaggacgcttctggcgatggggagcttgatcttagtggcatcgacgatctcgagatcgaccggtacatcttaaatgaatctgaagcccgggtaaaggcggaactttggatgagggaaaatgcagagtatttaagggagcagagggagaaagaagctcgcattgctaaggagaaagaactgggcatctataaagagcataagcctaaaaagagctgcaaacgcagggagcccatccaagcatcaactgcacgcgaggccatagaaaagatgctggaacagaagaagattagctccaagatcaactactccgtgttgagaggtctgtcatccgctggcggaggatcaccccatagagaggacgcgcagccggaacacagcgcttccgctaggaagttgtcaaggaggagaacccccgccagtaggtctggcgccgaccccgttaccagtgtgggtaaacgacttaggcctctggtgagcactcagccagcgaagaaagtggcgactggtgaggctctattgccatctagcccgaccctgggcgctgagccagccaggccacaagccgtccttgttgaatcagggccagtctcatatcatgccgatgaagaagcagatgaggaagagcctgacgaggaggacggggaaccctgtgttagtgctcttcagatgatgggaagcaatgactatggctgtgatggggatgaagacgatggttattag

SEQ ID NO: 180755 - DNA, 612 bp, synthetic construct
  misc_feature 1..612: note = Description of Artificial Sequence: Synthetic coding sequence
  source 1..612: mol_type = other DNA
atgcgggagaacgccgagtacctgcgggagcagcgggagaaggaggctagaatcgctaaggaaaaggagctggggatttataaggagcacaagccgaagaagagctgcaagcggcgcgagcctattcaggccagcaccgccagggaggcgatcgagaagatgctcgagcagaagaaaatatcatccaaaatcaattattccgtgctgagaggcctgagctcggcaggcggcggtagtccccatcgtgaggatgcacagcccgagcacagcgcctctgcaaggaagctgagccggcggagaaccccggcttctcggtccggagccgatccagtgactagcgtgggaaagaggctgcgaccactcgtctctactcagcctgcgaagaaggtcgctaccggtgaagcgcttctgcccagtagcccgacgctaggcgcggaacccgcgcggccccaagctgttctcgtcgaaagcggaccggtgagctaccacgccgacgaggaggccgatgaagaggagccggacgaagaggacggcgaaccatgcgtaagcgctctgcagatgatgggatccaacgattatggctgtgacggcgatgaggacgatggctactag

SEQ ID NO: 180756 - DNA, 714 bp, synthetic construct
  misc_feature 1..714: note = Description of Artificial Sequence: Synthetic coding sequence
  source 1..714: mol_type = other DNA
atgaccgccctgcggctgctgcagcggatgaagcgggactggatgcatacaggccgcaggccttccggtctctgcggtgccgcactgcttgtcgcagcccggatgcacgacttcagacggaccgtcaaagaagtgataagtgtcgtgaaggtctgtgagagcacccttcggaagaggctgacggagttcgaagacaccccaacttcacagctgacgatcgacgaatttatgaagattgacctcgaggaagaatgcgacccaccctcctacacagctggtcaacggaaattgaggatgaagcagcttgaacaggtgctgagcaaaaagctggaagaagtcgagggtgagatcagttcctatcaggatgccattgagatagagctagagaattcgcgccctaaggcaaaaggtggtctagcctcattggccaaggatgggagcacggaggacactgctagctcactttgcggagaagaggacactgaggacgaagagctggaagcagccgcatcccacctcaataaagacctctatcgtgaactgctgggtggtgctcctgggtcgtcagaagctgccggctcaccagagtggggcggccgcccaccagctttgggaagtctgcttgatccactgccaacggcggcatcgcttggaataagtgatagtatccgtgagtgcatcagtagccaaagcagcgacccgtctgaattctag

SEQ ID NO: 180757 - DNA, 138 bp, synthetic construct
  misc_feature 1..138: note = Description of Artificial Sequence: Synthetic coding sequence
  source 1..138: mol_type = other DNA
atgaccgccctgcggctgctgcagcggatgaagcgggactggatgcacacgggccggcgcccatcgggtctttgtggggccgcacttctcgttgcggctcgcatgcacgatttcagaaggacagttaaggaggtgtag

SEQ ID NO: 180758 - DNA, 45 bp, synthetic construct
  misc_feature 1..45: note = Description of Artificial Sequence: Synthetic coding sequence
  source 1..45: mol_type = other DNA
atgaccgccctgcggctgctgcagcggatgaagcgggactggtag

SEQ ID NO: 180759 - DNA, 468 bp, synthetic construct
  misc_feature 1..468: note = Description of Artificial Sequence: Synthetic coding sequence
  source 1..468: mol_type = other DNA
atgaccgccctgcggctgctgcagcggatgaagcgggactggatgcacacggggaggagacctagtggactgtgtggcgctgccctccttgtggccgctagaatgcatgactttcggcggacagtcaaggaagtgattagcgtcgtaaaagtctgcgagtctaccctccgtaagcggctgaccgagttcgaggacacccccacctcgcagctgacgatcgacgagttcatgaagattgatctggaagaggagtgtgaccccccttcttatacagcagggcagcgaaaactgaggatgaaacaacttgaacaagtcctctctaaaaaattagaggaggtggaaggtgagatttcgtcttatcaggatgcgattgaaatcgaactcgagaattctagacccaaggcaaagggaggacttgccagtctggctaaggacggctcaacagaggacacagcttcgagtctttag

SEQ ID NO: 180760 - DNA, 8307 bp, synthetic construct
  misc_feature 1..8307: note = Description of Artificial Sequence: Synthetic coding sequence
  source 1..8307: mol_type = other DNA
atggccctggtgctggagatcttcaccctgctggccagcatctgctgggtgtccgccaatatcttcgaatatcaggtggacgctcagccgttgcgcccgtgtgaattacagcgggaaacagcattcttgaagcaggcagattacgtcccccagtgtgcagaggacggatcctttcagacagtgcagtgccaaaacgatggccgatcctgctggtgcgtcggggctaacggttccgaggttttgggttcccggcagccagggcgccctgtggcctgtctcagtttctgccagctccaaaaacagcaaattctattatccggctatattaacagcacagataccagttatctccctcaatgtcaggatagcggtgattacgctcccgtgcagtgtgacgtacagcaggtgcagtgctggtgtgttgacgcggagggaatggaagtatacggcaccaggcagctggggaggccaaagcgttgtccgagatcttgtgaaattcgaaatcgcaggctcctccacggagtgggcgataaaagcccaccacagtgctcagcagaaggcgaattcatgccggttcaatgcaaatttgtcaataccactgacatgatgatcttcgacttggtgcatagttataaccgatttcccgacgccttcgttacgttttcaagctttcagagaagattccctgaggtaagtggttattgtcattgtgctgacagtcaggggcgagaactggccgagactggattagagttactgctggacgagatttatgatacgatcttcgccgggctggacctaccatctactttcactgaaacaaccctctaccggatcctccagcggagattcttagccgttcagagtgttatctccggacgctttagatgccccactaagtgtgaggtcgagaggtttaccgctactagttttggtcacccatatgtacctagttgcaggaggaacggagattaccaggcagtccagtgccagaccgagggtccatgttggtgtgtggatgcccagggtaaggagatgcatggcacacgacagcagggcgaacctccgagctgcgctgaggggcagtcctgcgcgagcgagaggcagcaagccctgagccggctctatttcggcacaagcggctatttctcacagcatgatttatttagctccccagagaaaagatgggcatctccccgtgtagcccggttcgccacctcctgcccaccaactattaaggaattattcgtggatagcgggctcctgcggcccatggtagaaggccagagtcagcaattcagcgtatccgagaacctcctcaaggaggccatccgggcaattttcccttcccgcggccttgcgaggcttgccctgcagttcacgacaaaccctaagagactacagcagaacctgttcggggggaaatttttggtgaacgtgggccagttcaacctgagcggcgcactgggcacaaggggtacctttaacttctctcaattcttccagcaactgggacttgcatctttcttgaacggaggcagacaggaagacctggctaaacctttgagtgtcgggttagactctaactcatccaccggcacaccagaggcggcaaagaaggacgggaccatgaataagccaaccgtgggcagcttcgggtttgaaatcaacttgcaagagaaccaaaacgctctgaagttcttagcctcccttcttgaactgcccgagttccttctgtttctgcaacatgccataagcgtgcctgaggatgtggctagagatctcggcgacgtaatggaaaccgtcctctcatctcagacttgtgaacagaccccagagagactgtttgtcccatcctgcactacggagggaagctatgaggacgtgcagtgtttcagcggagaatgttggtgtgtcaactcgtggggcaaagaactccctgggtcccgggtcaggggaggacagccaagatgcccaactgactgcgagaagcaaagagcaagaatgcaatcactgatgggcagtcagcccgctggttccaccctttttgtgcctgcttgcactagtgaaggacacttcttacccgttcaatgtttcaattctgagtgttactgcgtggatgcggagggccaagctattcctggcactcggagtgctatcggcaagccgaagaaatgcccgaccccctgccagctgcagagcgaacaagcttttctccgtacagtgcaggccctgctcagcaattcctctatgctgcctacgctgtccgacacctatatcccacagtgtagcacagatgggcagtggagacaggtccagtgcaacggacccccagaacaggtgttcgagctctatcagaggtgggaggcccaaaataaaggacaggatcttacgcccgccaagctcctggttaaaattatgagctaccgggaagccgcatccggaaacttctccttatttatacagagtttatacgaagctggccagcaggatgtctttccagtgctgtcgcagtatccttcactgcaggatgtgccactcgccgcattggaaggaaaacgcccccagccacgagaaaacattctgctggagccctatctgttttggcagatccttaatggacagctctctcagtatcctggctcttactctgacttttcgacccccctggcccactttgaccttcgaaattgctggtgcgtagatgaggccgggcaggaactggaaggaatgcggtccgagccttcgaagttgcctacctgccccggttcctgcgaagaggctaaactacgcgtgctacagttcatccgtgaaactgaggagattgtgtctgcgagtaactcaagccgcttccccttaggggagagctttctggtggccaagggaattaggttgagaaacgaagatttaggactgccacccctgtttcccccacgtgaggcattcgcggaacagttcttaagaggaagcgactacgccatacgactggccgcacagtctactctcagcttttatcagcgcagaaggttctctccagacgactcggctggcgcttctgctctgctgcgcagtgggccatatatgccgcagtgtgacgctttcggctcttgggagcctgtgcagtgtcacgccggaaccggccactgctggtgtgtggatgagaagggcggtttcatcccaggaagcctcaccgcacgctcccttcagattccgcagtgtccaacaacatgtgaaaaatcccgtacaagtggcctgctgagcagctggaaacaggccaggtcccaggagaaccccagccccaaggatctctttgtacccgcctgcctcgagaccggtgagtacgccagacttcaagcatctggtgctggaacatggtgcgtggacccggctagcggtgaggagttgcgccctggctccagcagctcagctcagtgcccatcactgtgcaacgttttgaagagtggcgtgttaagccgtcgcgtttcacctggatacgtgcccgcgtgcagagccgaagacggagggttctcacccgtccagtgcgaccaggctcagggcagttgctggtgcgtcatggactccggcgaagaagttccggggactagagtcacggggggtcagcccgcttgtgaaagtcccaggtgtcccctgccgttcaacgcctccgaagtggttggcgggactatcttatgtgaaacgattagcggcccgaccggtagcgccatgcagcagtgccaactgctgtgccggcaaggcagctggtctgtgtttccacctggaccattgatatgctcattagagagtggacgatgggagtctcagctgccacagccaagagcctgtcaacgcccccagctttggcagactatacaaacccagggccatttccagttacagcttccccccggcaagatgtgtagcgccgactatgccgatttgctgcagacgttccaggtgttcatattggatgaactaaccgcccggggtttctgccagatccaagttaagactttcgggacattggtctccatacctgtttgcaataatagctctgttcaggtgggttgtctaacacgcgaacggctgggggtgaacgtcacatggaagtcacggttggaggatatccccgtggcaagcttgcccgatctgcatgatatagaacgggctctggtgggcaaggatctgctgggcaggttcaccgacctcatccagtccggtagttttcagctgcatttggatagtaaaacattcccagccgagaccatccgctttctacagggagaccactttggaacatctcccaggacttggttcgggtgtagcgaaggattctaccaagtactgacctccgaggcttctcaggatggcctgggctgtgtcaagtgtccagaagggtcctactcccaagacgaagagtgtataccttgccccgtcgggttctaccaagaacaggcgggttctctggcctgcgtcccttgtcctgtgggaagaacaaccataagtgctggagccttcagccagactcactgcgtaactgactgccagcggaacgaggcaggactgcagtgcgaccaaaacggacagtatagggctagtcaaaaggacagaggaagcgggaaagccttttgcgtcgacggcgaaggccgaagattaccttggtgggagaccgaggcgcctcttgaagacagtcagtgcctgatgatgcagaaatttgagaaggtcccagaatcaaaagtgatcttcgatgccaatgcgcccgtcgccgtcagatccaaagttccagactccgaattccccgtgatgcagtgcttgacagattgtaccgaggacgaggcgtgttcattcttcacggtgagcacaactgaacccgaaatcagctgtgatttttatgcgtggaccagtgacaacgtggcctgtatgactagcgaccagaaacgggacgcccttggaaatagcaaggctacaagctttggatccctccgatgccaggtgaaagttcggtcgcatggccaggatagccccgccgtctacctcaagaagggccaaggctccactaccactttgcaaaagcgatttgaacccaccggctttcagaacatgctttcgggtctttacaatcctattgtctttagtgcgtccggtgctaacctgactgatgcccacctgttttgcctcttggcgtgtgacagggatctgtgttgtgacggattcgtgctcacacaagtgcaaggaggcgcaataatctgcggcctgttgtcctccccgtcagttctcttgtgtaacgtgaaggattggatggacccatctgaggcctgggcaaatgcaacgtgccccggagtgacctacgatcaagaatctcaccaggtgatactgcgcctgggcgaccaggaatttattaagtcattaacccctttggaaggcacccaggacacctttactaatttccagcaggtgtatctctggaaggacagtgacatgggctccaggccagagtcaatgggctgtagaaaagatacagtgcccagaccggctagtccaacagaagcaggccttacaaccgagctgtttagcccagttgatctgaatcaggtcattgtgaacggtaaccagtcccttagctcccagaagcactggctgttcaagcatttgtttagtgcccagcaggctaatctttggtgcctgtctcgatgtgttcaggaacattctttctgtcagctggctgaaatcacagagtccgcctcgctatattttacctgtacgctgtatcccgaggcccaggtatgtgatgatataatggaaagcaacgcccagggctgtagacttatcctgcctcagatgcccaaggctcttttcagaaaaaaggttatcctggaagacaaggtgaagaatttttacaccaggctgcctttccagaaactgatgggaatatccatccggaacaaagtgccaatgtcagagaaatctatctcaaatggatttttcgagtgcgagcggagatgcgacgccgatccctgctgcactggattcggcttcctcaacgttagccagctgaaaggtggggaggtgacctgcctgactctgaactctctgggtatacagatgtgcagtgaagagaacggcggggcatggagaatcctggactgcgggtccccagacatcgaagtgcacacatacccctttggctggtatcagaagcccatcgcacagaataacgcccctagcttctgtcctcttgtcgtactgccgagtctgacagaaaaagtgtctctcgattcatggcagtcattggctctgtccagcgtagtggtcgaccctagtatcaggcactttgacgtcgcccacgtgtctacagctgcaacaagcaacttctcagccgtgcgcgacctctgcctgtccgagtgtagtcagcatgaggcatgtctgatcacgacgctccagacacaaccgggtgccgtacgttgcatgttctatgccgacacacaaagctgcacccattccctccagggccaaaactgtaggcttctcttgagagaggaggcaacccacatctacagaaaaccgggcatcagtctactgtcttacgaggcgagcgtgccctccgtccctatcagtactcatggaagacttctgggccggtcgcaggcaatccaggtgggcacaagctggaagcaagtggaccagtttttaggcgtgccttatgccgctccaccccttgctgagcgccggtttcaggctcccgagcctctcaactggactggctcctgggacgccagtaagcccagagcaagctgctggcagccgggaaccagaacaagtacctcccctggggtttcagaagactgtctctatttgaacgtcttcattccccagaacgttgctcccaatgccagtgtcctggtcttcttccacaacacaatggatagggaggagagcgagggttggccagccattgacgggagcttcctggctgcggtggggaacctgatcgtggttactgcatcataccgggtgggggtgtttggcttcctctcctccggctccggtgaggtgtccggtaactggggtctgttggatcaggtggcagcactgacttgggtgcagacccacatccgggggttcggtggagacccaaggagggtgagcttagctgcggaccgcggcggagccgatgtcgcctcaatccatctgctcactgctcgcgccaccaattcacagctgtttcgcagagcagtgctcatgggcggttctgccctctcccctgccgctgtcattagtcacgagcgtgctcagcagcaggccatagccctggccaaagaggtgtcttgtcctatgtccagtagccaggaagtggtgagctgcttgcgacagaaaccagctaatgttctgaatgatgcacaaactaagttgttagctgtgtccggaccttttcactattgggggcctgttattgatggccactttctgcgggaaccaccagcccgggctctgaagagatccctctgggtcgaggtggatttacttatcggatcctcccaggacgacggcctgatcaatcgcgccaaagcagtgaaacagttcgaggagagtaggggacgaacctcctctaagacggctttctaccaggcacttcagaacagtctaggcggcgaagactctgatgcccgagtcgaggccgccgctacctggtactatagccttgagcacagcaccgacgactatgcatccttttcacgagccctcgagaacgctactagagactacttcatcatatgcccaatcattgacatggcttccgcatgggcgaagcgcgcccgcggtaatgtgtttatgtaccacgcccccgagaactacggccacgggtcacttgaactgctggccgacgtccaattcgctctggggctgcctttctaccccgcttacgagggccagtttagtctggaggagaagagcctgtcgctcaagatcatgcagtacttctcccactttataagaagtggaaatccgaactacccgtatgagttcagtaggaaggttcccacattcgctacaccttggccagacttcgtgcctcgtgcaggtggcgagaattataaagagttctccgaactacttcccaatcgacagggccttaagaaggcagactgctcgttctggagcaaatacattagcagcctgaagacctccgctgatggagccaaggggggtcagagcgcagagagcgaagaagaagagctgactgccggctccgggctcagggaggacctgctcagcctccaggaacccggcagtaagacctatagcaagtag

SEQ ID NO: 180761 - DNA, 1191 bp, synthetic construct
  misc_feature 1..1191: note = Description of Artificial Sequence: Synthetic coding sequence
  source 1..1191: mol_type = other DNA
atgcccggccggggccggtgccccgactgcgtggtgaccgagggcgttctcacaacgacattcagtgatgaaggcaacctgcgcgaggttacttactcccgctcaacaggcgagaatgagcaggtttcacgaagtcagcagagaggtttgcgccgcgtgagggatctgtgtagagtgctgcagctgcctcccactttcgaggataccgccgtagcctactatcagcaggcctaccgacattccgggatccgtgccgcgaggttacaaaaaaaggaggtgctagtggggtgttgtgtgcttattacttgcagacagcacaattggcccctaaccatgggcgcaatttgcacacttttgtatgccgatctggatgtattctcctccacatatatgcaaatcgtgaaattgttgggtctggatgtgccctccctgtgcctggctgaattggtgaagacatactgctcatccttcaagctttttcaggcaagcccctccgtccccgcgaagtacgtggaggacaaggaaaagatgctctcacgcacgatgcagcttgtcgaactagcaaacgagacttggctggtcacaggccgtcaccccctgccagttatcactgccgcaaccttccttgcttggcaatccctgcaacccgcagataggctgagctgctcactggcacggttttgcaaactggcaaatgtggatcttccctatcccgcatcatccaggttgcaggagctgctcgctgttttactgaggatggccgaacaactggcatggctcagggtcctacgcctggataaaaggagcgttgtgaaacacattggcgatctgctccaacacaggcagtctctcgtgcgctccgctttccgggacggtacagccgaggtggagacgcgggagaaagaacccccgggctgggggcagggtcagggcgagggcgaagtcgggaataattccctgggactcccacagggtaaaagacctgccagccccgcgctcctcttaccaccatgcatgctcaagtccccaaagcggatttgtcccgtgcccccagtctcgaccgtgacaggagacgagaacatctctgattcagagatcgagcagtacctgaggacacctcaagaggtgcgggattttcagagggcccaagccgctcggcaggcggccacatccgtgcctaacccaccctag

SEQ ID NO: 180762 - DNA, 1698 bp, synthetic construct
  misc_feature 1..1698: note = Description of Artificial Sequence: Synthetic coding sequence
  source 1..1698: mol_type = other DNA
atggccgagggcaaggccggcggcgccgccggcctgttcgccaagcaggtgcagaagaaattcagccgggctcaggagaaggtgcttcagaagctggggaaagccgtcgagacaaaagatgaacggtttgaacagtccgcctctaatttttatcagcagcaggctgagggccacaagctatataaagacttaaagaactttctctccgctgtcaaggtgatgcatgagtcaagcaagagggtaagtgaaactctccaggagatttatagtagcgaatgggacgggcatgaagagcttaaagctatagtatggaataatgacctgctttgggaagactacgaggagaagctggccgatcaagccgttaggaccatggaaatttatgttgcccagttctccgagataaaggagaggattgccaagcgtgggaggaaactcgtggactatgacagtgctagacaccacctcgaggccgtccagaatgcgaagaaaaaagacgaagcaaagaccgccaaagctgaggaagagtttaataaagcccaaaccgtgttcgaggacctcaaccaggagctgctcgaagagctgcctatcctctataactctagaatcggatgctatgtcacgatcttccagaacatatccaacctccgggatgtcttctaccgagaaatgtcaaagctcaatcataacttgtacgaagtgatgtctaaactcgaaaagcagcacagcaataaggtttttgtggtgaagggcctgtctagttcgtcccgacgcagcctggtgatcagcccccctgtcaggacagccactgtcagctcaccactgactagcccaacatctccctcaacacttagtttaaaatcagaatctgaatccgtgagtgccacggaagatctggctcccgatgcagcccagggggaggacaatagcgaaattaaggagttattggaggaggaggagattgaaaaagaggggtctgaagccagcagtagtgaggaggatgaacctctgcccgcctgtaacggccctgctcaggcccaaccctcccctacaactgagcgagcaaagtcccaagaggaggtactgccctcttctaccaccccgtctcccggaggggcgctgtcaccaagcgggcagcctagcagttccgcgacggaagtggtgttacgcacacgaaccgctagtgaagggagcgaacagccaaaaaaacgtgcctcaatacagcggacttcagcacctcccagtcggccaccccccccgcgcgccacagctagcccgcggccttctagcggcaatattccttcttcaccaacagctagcgggggaggctctcccaccagcccgcgagcgagcctgggaaccggcactgcgtctcctagaacgtctctggaagtttcccccaaccccgagccgcccgagaaaccagttaggaccccggaggccaaagagaacgaaaatatacataatcagaacccagaagagttgtgcacatctccaaccctaatgacgtctcaagttgcctccgaacctggggaagccaaaaaaatggaggacaaggaaaaggacaacaagttgatctcagctaatagctcggaaggtcaggatcagctgcaggtgagcatggtaccagagaacaacaacctgacagcccctgagccacaggaagaagtgtccacaagtgaaaacccacaactatag

SEQ ID NO: 180763 - DNA, 1602 bp, synthetic construct
  misc_feature 1..1602: note = Description of Artificial Sequence: Synthetic coding sequence
  source 1..1602: mol_type = other DNA
atggccgagggcaaggccggcggcgccgccggcctgttcgccaagcaagtacagaagaaattttccagagcccaggagaaggtgctccaaaagctcggtaaggctgtcgagacgaaggatgagcggttcgagcagtccgcttctaatttttaccaacagcaagcagagggacacaaattgtataaggatctgaaaaacttcctcagcgccgttaaagtcatgcacgagagtagtaagcgggtcagcgagaccctgcaggaaatctatagttcggagtgggatggacacgaggagttgaaagccatcgtgtgggaacgcattgccaagcgcggaaggaagctggtcgactatgatagcgcgcgacaccatcttgaggctgtgcagaacgctaaaaagaaagatgaggctaagacggccaaagcagaggaggagttcaacaaggcacaaaccgtgtttgaagacctgaatcaggagctgttggaggaactgccaatcttgtacaattcccgcataggctgttacgtgaccatctttcagaatatttccaacctgagggatgtgttttatcgcgaaatgtctaagttgaatcataacttgtacgaggtaatgtcgaaactcgagaaacaacattcaaataaggtgttcgtggtcaagggactatccagtagctccaggcgctcacttgttatatctccccctgtgagaacagccactgtgtcatctccactgactagtccgacgtccccaagcacactgtcgctaaagagtgaatcggagtccgtgtccgcaacagaggacctggcccctgacgccgctcagggcgaggacaacagcgaaataaaagagctacttgaggaggaggagatcgagaaggaagggagcgaggcatcgagctctgaggaggatgagcctctgccggcctgcaatggcccggcacaagcgcagccatcccccactacggagagagccaagagtcaggaagaagtcctgccaagctccacaacaccttcccctggcggagcgctgagcccaagcggccagcctagttcttccgcgacagaagttgtgctccgcactaggacagccagtgaaggatccgagcaacccaagaaacgagcgtcaatccagcgaacctccgcacctccatctcgccccccaccgccgcgggccacagcaagcccaaggccatcttccggcaacattccttcttctcctaccgcctcaggcggggggtctcccacctccccacgagcctccctcggaactggaacagcctctcctagaacatccctcgaagtgtctccaaacccagaaccccccgagaagccagtcaggacaccggaggcaaaggaaaacgaaaacatacataaccagaaccctgaagagctatgtactagccccactctcatgacatctcaggtggcatcagagcccggagaagccaagaagatggaagacaaggagaaggacaataaattgatcagcgcgaacagtagcgagggccaggatcagcttcaggtgagtatggtacccgaaaataacaatcttacagctccagagcctcaggaagaagtctcaacgagtgagaacccgcagctctag

SEQ ID NO: 180764 - DNA, 1620 bp, synthetic construct
  misc_feature 1..1620: note = Description of Artificial Sequence: Synthetic coding sequence
  source 1..1620: mol_type = other DNA
atggtgctgcagaagctgggcaaggccgtggagaccaaggacgagagattcgagcagtccgcctccaacttttaccagcagcaagctgaggggcataagctgtacaaagatctcaagaatttcctgtctgctgtgaaagtaatgcacgaatcctctaagcgggtctcagaaacccttcaggagatctatagcagcgagtgggacggccatgaagagctcaaagcaatagtgtggaataacgatttactttgggaggattatgaggagaagttggccgaccaagcagtgcgcactatggaaatctacgtggcccaattttcagagataaaggagcgtatagcgaagcgggggagaaaactcgtggattacgacagcgctcgtcatcacttggaggctgtgcagaacgcaaagaaaaaggacgaagcgaagaccgccaaagctgaagaagagtttaacaaggcccaaaccgtgttcgaagacctcaaccaggaactgcttgaggaacttccgatcctctacaacagcaggattgggtgttacgtgaccatctttcaaaatatttccaatctgcgggatgttttttatagggaaatgagcaagctcaatcacaatctttacgaagttatgtcaaaattggagaagcaacattccaataaagtgttcgtggtgaaaggcctgtcctctagtagcagacggagtctggtcatcagtcctccagttcggacggcgacagtttcgtctccccttacatctccaacgagcccgtccaccctgtccctcaaatccgagtcagaatccgtcagcgcgactgaagacctggccccggacgcagcccagggagaggataatagcgagattaaggaactacttgaggaggaagaaattgagaaagagggatctgaagcctcaagctcagaggaggacgagccgcttccagcctgcaatggccctgcacaggcccagcccagtcccaccaccgaaagggccaagagccaagaagaagtgcttccatcttctactactcctagccctggcggggccctgagcccttccggacagccttcgtccagtgccaccgaagttgtgcttcgcactcgcacagcctcagagggcagtgaacagcccaagaaaagagcaagtatccagagaacatcagcaccccccagcaggccacccccaccccgggctaccgcttccccgcgtccatcatcgggcaacattcccagctcccctactgcctccggcgggggcagcccaaccagccctagggctagcttaggaaccgggactgctagtcctagaacatcactagaagtaagcccaaatcctgaacctccggaaaagccagtgcgcacacctgaggccaaggagaatgagaacattcataaccagaatccggaggaactgtgcacctccccaactcttatgaccagtcaggtcgccagcgaacctggcgaagcaaagaaaatggaggacaaggaaaaggataacaaactcataagcgccaactcctcagagggacaagatcagctgcaggtctctatggtgcccgaaaataataatttaaccgctcccgagcctcaagaggaagtgagcaccagtgagaatccacagctttag

SEQ ID NO: 180765 - DNA, 762 bp, synthetic construct
  misc_feature 1..762: note = Description of Artificial Sequence: Synthetic coding sequence
  source 1..762: mol_type = other DNA
atgagctggatccccttcaagatcggccagcccaagaagcagatcgtgccaaagaccgttgaacgcgatttcgagagggaatatggcaaacttcagcagttggaggagcagactaggcggctgcaaaaggacatgaaaaagagcaccgacgctgacctggcgatgagtaaaagcgccgttaaaatctctttggatctcttgtcaaaccctctgtgcgagcaggaccaggatcttctgaacatggtcacagctttggacacagccatgaaacgcatggacgcatttaatcaagagaaggtcaaccagatccagaagacggtgattgagccactgaagaagtttgggagtgtctttccttctcttaacatggccgttaaaagaagggagcaggccctgcaagactataggagactgcaggccaaagttgagaagtacgaagagaaggagaaaacggggcccgtcctggctaaactccatcaagcgcgggaagaattaagacccgtgagagaggatttcgaagctaagaatcgccagctcctggaggaaatgccccggttttatggatctcggctggattactttcagccttcctttgagtccctgatcagggcccaggtcgtctattattccgaaatgcataaaatattcggcgacttatcccatcagctcgatcaaccgggccattctgatgagcagcgtgaaagggaaaatgaagccaagctgagtgagctcagggccctttctatcgtcgctgacgattag

SEQ ID NO: 180766 - DNA, 600 bp, synthetic construct
  misc_feature 1..600: note = Description of Artificial Sequence: Synthetic coding sequence
  source 1..600: mol_type = other DNA
atgagcaagagcgccgtgaagatcagcctggacctgctgagcaaccccctatgcgagcaggatcaagatctgttgaatatggtgactgcattagataccgcgatgaagaggatggatgcattcaaccaggagaaggtgaatcagatccagaaaaccgtgatcgagccactgaaaaagttcgggagtgtgttccctagccttaatatggcagtcaaacggagagagcaagcgctgcaggattatcgccgtctgcaagccaaggtggaaaaatacgaggaaaaggaaaaaactggtccagtcctcgccaaactccatcaggctagagaggaacttcgcccagtgcgggaagacttcgaggctaaaaacagacagctgctcgaagagatgccccggttctacggttcaagactcgattactttcagccatcattcgaaagcctgatcagggctcaggttgtctactattccgaaatgcacaaaatcttcggagacttgagccaccaactagatcaacctggacacagcgatgagcagcgagagagagaaaacgaggcaaaactgagtgagctgagagccctgtcgatagtggcagatgattag

SEQ ID NO: 180767 - DNA, 2343 bp, synthetic construct
  misc_feature 1..2343: note = Description of Artificial Sequence: Synthetic coding sequence
  source 1..2343: mol_type = other DNA
atgacccacacccggcggaagagcctgcccatgctgagcagcggcctgaccggtcgcagggaaccactacagatggaagacagtaacatggaacagggagtggaaggagttgaaccaggcatgcctgagagtcccggacacctgaccggccgccgtaaaaactatccccttcgaaaacgtccactggtcccagagaaaccaaaggcttgcaaggtgctactgacgcgcttggagaatgtggccggtccccgctcagcagatgaggcggacgaattaccccccgacctgcccaagcctccctctcctgcaccatcctcagaggatccagggctggcccagcccagaaagcgccggctggcctcactaaacgccgaggctctgaacaacctgctgcttgaaagagaagataccagctctttggccgggacccggaggtctagggcgggcgacccacaccggtctagggatagggatcgggccacggggggttggagttctagcaagaagagaccacgactaggggatcttggaggtggatcccgcgatctcagcccagagcccgcaccagatgaaggaccccgtcgggacggcgaccccgcacccaagaggctggcctcactgaacgctgctgcattcctcaaactgagccaggagcgcgaactacctctgaggctgccccgagcccatgctgaagtggatggccggtccacagagccccctgctcctaaggctcctaggcctaaatggccaaaggtgaacggcaaaaattatccaaaagcgtggcagggggcgagcagcggcgaggcagcaggaccgccgggctggcaaggctgcccagatgagccatggccgagcgccacaccatgtggcccaagtgtgcaaccttcacatcagcccttgagcaaagcactcgaatcacccctgggcttgcgacctcatttgccactcctgatgggagggcaggccgctctgaagccagaacccgggagacccggtgaggaatcacctgctcccaaacaggaattgcatcagccaagctttccaacccctcagctttctcccctgccaatgcccgggaatccagccgattataatggactgtgcgttgggccagaactcacagctcttggctccttctatctctactgtggtcaggaaggcctgcagtgcgggggctacagcccttgccctatgcttcctgagggcaagctcagtcccgtggccgcccctcatgaagaggggctcctgttggctccaagctctgtcccaagtggcaccccatttcaacacccgccgtggggctcaagtcgatactgtagctccgaggacacgggtgtaaacggatacagtatatgcggcgtactccccttatccgtgacccatgcgggcactacttgcgggggttgcccttacaagatgcctttcgcagctgagggctgtagatctcttgggcagctggaattccctctgcccgaagccggccatccggccagtcccgcccatccgctccttggctgcccggtaccatccgttcctccggccgctgaacccgtcccacatttgcagacaccaacgtccgagccacaaaccgtcgcaagggcctgtccacagtcggctaagccgcctagtggaagcaaaagcgggttgcgcacaggaagctcttgccgacatacagcccgaagcaaggcggctagaagaccttcccaccccaagcagccgcgcgtgcagcgacctcgtccccggaggagacgccggaggagaaccaatggttgggtgcccgtcggagccgcctgtgagaaagctgtatacgttttggatgaacctgaacctgcgatccgcaagagctaccaggctgtggaaaggcatggcgagaccatcagggtgcgtgatacagtcctgctgaagtccgggccaaggaagactagcaccccctatgtggccaagatctccgccctgtgggaaaacccggaatctggggagctcatgatgagtctcttgtggtactacagacctgaacatctacagggaggccgcagcccttccatgcacgagcctctccagaatgaagtctttgcttctcgtcatcaagaccaaaatagtgtcgcctgtatcgaagagaagtgttacgtgctaaccttcgctgagtactgccggttttgtgccatggctaagagacgaggtgaggggctgccctcccgcaaaaccgctctagtgcctccctccgcagactattcaaccccgccccataggacggtgccagaggataccgaccccgagctggtcttcctatgtcggcatgtctacgacttcaggcatggtcgaatcttaaaaaatcctcagtag

SEQ ID NO: 180768 - DNA, 2340 bp, synthetic construct
  misc_feature 1..2340: note = Description of Artificial Sequence: Synthetic coding sequence
  source 1..2340: mol_type = other DNA
atgacccacacccggcggaagagcctgcccatgctgagcagcggcctcaccgggcggcgcgaacctctgcaaatggaggatagcaacatggagcagggggtggagggcgttgaacctgggatgccagaaagcccaggccacctgaccggacgtagaaagaactatcccctgcgtaagcgaccgctggtaccagagaagccaaaagcatgcaaggtgctgctaacaaggctggagaacgtcgccggccctcgttccgccgatgaggcggacgaactcccacctgacctacctaagccaccctccccggccccaagctccgaggaccccgggttagcccagccccgcaagaggcgtctagccagtctcaatgccgaagccctgaacaatctgctgcttgaacgggaggacactagtagtcttgcagggaccaggcgttctagagctggggatccacacaggtctcgcgaccgcgaccgggccactggaggttggtcatcttccaaaaaacgcccgcggctcggcgacctgggagggggaagccgtgacctgtcccctgaacccgcgcccgacgagggcccccgccgcgatggggaccccgcaccaaaacgccttgccagtctgaatgccgccgcctttctcaaactgtcacaggagagggagctgccacttcgccttccaagggcgcacgctgaggtcgacggcaggtcaacggagcctcccgcccctaaggcgccgagacccaaatggccaaaggtgaatggtaagaactatcccaaggcatggcagggtgcctcctctggcgaagctgccggcccgcccgggtggcaaggatgcccagacgaaccatggcccagtgctaccccctgcggccccagtgtgcagcccagtcaccaaccactgagtaaagcacttgagagcccattaggcctgcgaccccatctccctttacttatggggggacaagcagctctcaaacctgagcccgggagacccggagaggaaagccctgccccaaaacaggagctgcatcaacccagcttccccacgccacaactatcccctctgccgatgcccgggaacccagccgactataacgggttatgcgtgggacccgagcttacagctcttgggtcgttttatctctactgcggacaggaaggcctccaatgcggtgggtactcgccttgtcccatgctgcctgagggtaagctgtcacccgtagccgctccacacgaggaggggctgttgctcgcaccatcaagcgtgccttcgggaaccccattccagcaccctccttggggaagctcacggtattgctctagcgaagacaccggagtgaatggatatagtatatgtggggttctgcctctcagtgtaacacacgcagggaccacctgtggaggatgcccttacaaaatgcctttcgccgccggatgccgctcgctgggacagctcgaatttccattgccagaggctggccatcctgcctcaccggcccatcccttgctgggctgtcctgtcccctccgtgccccccgccgccgagccagtaccgcacttgcagacacctacttccgaacctcagacagtggctcgggcatgtcctcagagtgccaaaccaccctccgggtctaagagtggcctgcgtactggctcatcttgccgccacactgctcgctctaaggctgctaggaggcctagccaccctaaacaacccagggttcagaggccaagaccccgacgaagaaggagacgaaggactaacggatgggtgcccgtcggcgctgcctgcgagaaagctgtctacgttcttgatgagccggaaccggccataaggaagtcttaccaggcagtggaacggcatggtgagacaatccgagtacgggacactgtactgctgaaatctggtccgcgcaagacctccacgccttatgttgccaaaattagcgcactgtgggagaaccctgagagcggtgagttgatgatgtcactcctctggtactaccgaccagaacatctgcaggggggaaggtcccctagtatgcacgagccattgcagaacgaagtgttcgcttctcggcaccaagaccagaactcggtcgcatgcatcgaagaaaagtgttatgtcctcaccttcgctgagtattgtcggttttgtgcgatggctaaacgcaggggggaagggcttccttcccggaagacagcgcttgtgcctcccagcgcagactacagcacaccaccccaccgaacggtgccagaagacacagaccctgagctggtgtttctttgtagacatgtatatgacttcagacacggcagaatcctgaaaaaccctcagtag

SEQ ID NO: 180769 - DNA, 4575 bp, synthetic construct
  misc_feature 1..4575: note = Description of Artificial Sequence: Synthetic coding sequence
  source 1..4575: mol_type = other DNA
atgcccctgctgcaccggaagcccttcgtgcggcagaagccccccgccgacttacggcctgacgaggaggtattctattgtaaagtaaccaatgagatattccggcattacgacgacttttttgagcgtaccattctgtgtaacagccttgtatggagttgtgccgtgaccggtaggcctggcctcacctatcaggaagctctggagagtgagaaaaaggcccgccaaaaccttcagagctttccagaacccctgattatccccgttctctacctgacctccctgactcaccgaagccggctgcacgaaatctgcgacgacatcttcgcatacgtcaaagaccgatactttgttgaggaaactgttgaggtgatccgcaacaacggcgctcggttgcagtgtcgcatcctcgaggtcctgcccccaagccatcagaatgggtttgcgaacgggcatgtgaatagcgtcgatggagagaccataatcatcagtgatagtgatgactcggagacacagagttgctcattccagaatggaaaaaagaaagacgccatcgacccactgttgttcaagtacaaggtacagcctaccaaaaaggagctgcatgagtcagcaatagtcaaagctacacagatttcccgcaggaaacaccttttttctagagataaattgaaactttttctaaagcaacattgcgagccccaggacggcgttattaagattaaggctagttccctgagcacatataagatcgccgaacaggacttttcatatttctttccagatgatccccccacattcatcttttccccagctaacagacgcaggggacgcccaccaaagcgtattcacatttctcaagaggacaacgtggcaaacaagcaaactcttgcgagctacaggtccaaagccaccaaggagagagataagttgctgaagcaagaggagatgaaaagcctcgccttcgaaaaggcaaagcttaagcgagaaaaggcggacgcacttgaggccaaaaagaaagagaaggaggacaaagaaaagaagcgcgaagaattgaagaaaattgtggaggaagagcgactgaagaagaaagaggagaaagaaagacttaaagtggaaagggaaaaagagagggaaaaactgcgggaggagaaaaggaagtacgtggagtatctaaagcaatggagcaaaccgcgcgaggacatggagtgtgacgatttaaaggaacttccagagcccacccccgtcaagacgaggcttcccccagaaatctttggggatgccctgatggtcctggaatttctaaatgcctttggagaactctttgatctgcaggatgaatttcctgatggagttaccctggaggtccttgaagaggctctggttggcaatgacagcgaggggcccctctgcgaactcctgttctttttcctgactgccatcttccaggccatcgcagaagaggaagaagaggtcgccaaagagcagctgacggacgcagacactaaggggtgttcgctgaagtcactcgatctggattcctgcacactaagcgaaatactgagactccacattttggcgagtggggccgacgtcaccagtgcaaatgccaaatataggtaccagaaacgaggtggcttcgacgccactgacgacgcttgtatggaactgcggctgtcgaatcccagtttagttaagaagcttagcagcacctccgtgtacgaccttacccccggcgaaaagatgaagatactccatgcattgtgtggaaaactactgaccttagtgtctaccagagatttcattgaagattacgtagacattctccggcaggctaaacaggagttcagagagctaaaagccgaacagcaccggaaggaacgggaggaggccgctgcaagaatcaggaagcgcaaggaggaaaagcttaaggagcaggagcagaaaatgaaagaaaaacaggagaaactaaaggaagacgaacagagaaacagcacagccgacatcagtatcggcgaggaggagagggaggacttcgatacctccatcgagtctaaagacacagaacagaaggaactggatcaggacatggtcacagaagatgaagacgatccagggtcacacaagcgcggtcgccgcggaaaacgggggcagaacggattcaaggagtttactcgacaggaacagataaactgtgtcaccagagagcctctcaccgcagacgaggaggaagcccttaagcaggagcatcagaggaaagagaaggaattactcgaaaaaatacaatcagctatcgcgtgcaccaatatctttccccttgggcgcgacagaatgtataggcggtactggatattcccatctatccctggcctgttcatcgaggaggattactcgggtttgaccgaggacatgcttctgccaaggccaagcagctttcagaacaatgtgcagtcccaggacccacaagttagcaccaagaccggcgagcctttaatgagcgaaagcacttcaaacatcgaccagggccctagagatcattctgtgcagctgcccaagcctgtgcataagccaaatcgctggtgtttctattcaagctgcgaacagctggaccagctaatcgaggctctgaactctcgaggccaccgcgaaagtgctctgaaggagacgctgctccaggagaagtcgcgcatatgtgcacaactggctcgtttcagtgaagagaagtttcacttttctgacaagcctcaacctgacagtaagcccacttacagcaggggccgcagtagcaatgcgtacgacccctctcagatgtgcgctgagaagcagctggaactcaggttgagagacttcctcctggatatcgaagatcgtatataccagggtacattgggagccataaaggtgaccgatcggcatatatggagaagcgcactcgagtccggaagatatgaactgttgtctgaagagaacaaagagaatggaatcattaaaaccgtaaacgaagatgtcgaagaaatggaaatagacgaacaaactaaggtgatcgttaaagatcggctcctgggcataaagaccgagacacccagcacagtgtctactaatgcctctacgccacagtcagtgtcctcagttgtccactatttggcaatggcgttatttcagatcgagcagggcatcgaaagacggttcctcaaagcgccgcttgatgcatccgattcaggccgcagctacaagactgtgcttgatcgttggcgcgaaagtctgctttcttccgctagcttaagtcaagtgtttctgcacctgtcaaccctggacaggtccgtgatttggagcaagtctatcttgaatgcccggtgtaagatctgtcggaagaagggggatgccgaaaatatggtgctgtgtgacgggtgtgatagggggcaccacacttattgcgtccgccctaagctcaaaactgtaccggaaggggattggttttgtcccgagtgtcggcccaaacagcgtagtagacgtctgtccagtcgacaacggccttctctagaatccgacgaagacgtggaggacagcatgggaggagaggacgacgaggtggacggagatgaggaagagggccaatcagaagaggaggagtacgaggtcgagcaggacgaggacgacagccaagaggaagaagaagtgagcctgccaaaaagaggccggcctcaggtccgactccctgtaaaaactaggggtaaactttcttccagtttttcctcccggggccaacagcaggagccaggcagataccctagccggagtcagcagtctactcccaagactacggtctccagtaaaaccggcagatctctgaggaagatcaacagtgcccctcccaccgaaacaaagagcctccgtattgctagccgatccacacgacactcgcacggaccactgcaggcggacgtcttcgtggagctgctctccccccgcagaaagagacggggcagaaaatctgcaaataacacacctgaaaactcaccaaatttccccaatttcagagtcattgccacaaaatccagtgaacagagccgcagtgttaacattgcaagcaaattatctctgcaggagtccgaatccaagcgcagatgcaggaagcgacaaagtccagaaccttctccagtgactttaggtagacgctcttcggggaggcaggggggtgtgcatgagcttagcgcctttgagcagctggtggtggaactcgtgcgtcatgatgactcttggcctttccttaagctagtgtctaaaatccaggtgcctgattactatgatatcatcaagaagcctatagctctgaacattatccgggagaaagtgaacaagtgtgagtacaaactggcatccgaatttatcgacgacatcgagttaatgttctccaattgtttcgagtacaacccacgtaataccagcgaggccaaagccggcactcgcctgcaggcctttttccacattcaggcccaaaaattggggttacatgttacgcctagtaacgtggatcaagtgtccaccccaccagctgcgaaaaagtctcgaatctag

SEQ ID NO: 180770 - DNA, 4671 bp, synthetic construct
  misc_feature 1..4671: note = Description of Artificial Sequence: Synthetic coding sequence
  source 1..4671: mol_type = other DNA
atgcccctgctgcaccggaagcccttcgtgcggcagaagccccccgccgaccttcgacccgatgaggaagtgttctactgtaaggtcactaacgagatatttcggcactatgacgacttcttcgagcgtactatcttgtgcaacagcttggtatggtcttgcgctgtgaccgggcggccaggattaacgtatcaggaagctctggagagcgaaaagaaggctcgtcagaatttacaatcgtttcctgaaccactgatcatccctgtattgtacctgacttctctcacccatcggtcccgtttacacgagatttgtgacgacatctttgcctatgtaaaggacaggtatttcgtggaagagactgtggaggtgattcggaataacggagccaggctgcagtgtcgtattctcgaagtgttaccaccttctcaccagaacggctttgccaacggacacgtgaattctgtggatggggagaccattatcatctctgattcggacgacagcgagacacaatcctgtagtttccagaacggtaaaaaaaaagacgctatcgacccgcttttgttcaagtacaaggtgcagccaacaaagaaggaactgcatgaatcagccattgtgaaggcaacccagattagcagacggaaacatctgttctccagagataaattgaagttatttctgaagcagcactgcgagccccaggacggcgtgataaaaattaaggctagttccctgagcacgtataagatcgcagagcaggacttttcgtattttttcccggatgatccaccaaccttcattttttcccctgcaaataggaggcgggggagaccccccaagaggattcacatctcacaggaggacaacgtcgccaacaagcaaacactcgcttcctatcggtctaaagccactaaggagcgcgacaaacttctcaagcaggaagagatgaaatctctggcgtttgagaaggctaaactgaaacgtgagaaagctgatgcactggaggctaaaaaaaaggagaaagaagataaggaaaagaagcgggaagagctaaaaaagatcgtggaagaagagcggctcaagaagaaagaggagaaagaacggctgaaagttgagagggagaaggagagagagaaactacgcgaggaaaagcgcaagtacgtggagtatcttaagcagtggtccaaaccacgagaggacatggagtgtgatgacctgaaagaactgcctgaacccactcccgtcaaaactcggcttcctccagagatattcggggatgcgctgatggtgctcgagtttttgaacgcatttggcgaactgtttgatctgcaggatgagttccccgatggcgtgacactcgaagtgttggaagaagcactggtgggcaacgactccgagggcccactgtgcgagctactgtttttcttcctgacagccatcttccaggctatcgcagaagaagaagaagaggtggctaaggagcagctgaccgatgcggatacgaaggacctgactgaagcactggatgaggatgccgaccctacaaaatccgccttgtctgccgtcgcttcattagccgctgcctggccacagctgcaccaggggtgctccctgaagtcactagacttggacagttgcacgctgtctgagatcctgcgactgcacatactcgcatcgggggccgatgtgacttctgccaacgctaaataccggtatcagaaacggggaggcttcgatgctactgacgatgcttgcatggagctgcgtctgtcaaacccatcactcgtcaaaaaactgagctccacgtcagtctacgacctgacaccaggtgaaaagatgaagatcctgcacgcattgtgtggaaaactgctaaccttggtgtctactagagattttattgaagactacgtcgacatcctccgtcaggccaagcaggagttccgagagctgaaggctgagcaacatagaaaggagcgcgaggaagcagcagctaggatcagaaaaaggaaagaagagaagctgaaggaacaggaacaaaagatgaaagaaaagcaggagaagctaaaagaagatgaacagagaaatagtactgctgacatttctataggagaggaagaacgggaggatttcgatacctcaattgagtcaaaagacacagagcagaaagagttagatcaagacatggttactgaagacgaggacgaccctggctctcacaagcgcggaagaaggggcaaacggggccagaatggtttcaaagaatttactcggcaggaacagattaactgcgtaacacgggaacctcttaccgcagacgaggaggaggctttaaagcaggagcaccagcggaaagaaaaagagctcttagagaaaattcagagcgcaattgcttgcactaatatcttcccactggggagagatcgtatgtacaggcgatattggatatttccaagcatccccgggctgttcatcgaggaggactattccggccttacggaagacatgcttctgccccggccgagctccttccagaataatgtgcagtctcaagatcctcaggtgtcgaccaagacaggggaacctctgatgtctgagagcacatcgaatattgatcagggccccagagatcacagcgtacagctccctaaaccagtccacaagcccaaccgatggtgcttctattctagctgcgagcagctggaccaactgatcgaggccctgaactcccgggggcatagagagagtgccttgaaagagacacttctgcaagagaaatcacggatatgcgcacaattggcacggttcagcgaagagaaatttcatttctctgataaaccgcagccggactctaagcccacttattcaaggggcagaagtagtaacgcatacgatccatcacaaatgtgtgccgagaaacagctggaattaaggctgcgggactttctgctcgatatcgaagacaggatttaccaaggtacactgggcgccattaaggtgactgaccggcacatctggaggtcagcgctagagagtggtcgttatgaactccttagtgaggagaataaggagaacgggattataaaaaccgtcaatgaagatgttgaggaaatggagatagatgaacagaccaaagtgattgtgaaggataggttgctgggcataaagactgaaactcctagtacggtgtcaaccaacgcctcaaccccacagagtgtgtctagcgttgtgcactacctggcgatggctctcttccagatcgagcaaggtattgagcggaggttcctgaaggccccacttgatgcttcggactccggaagaagctataaaacagtcctggatcgctggagagagagtttgttgtcttcagcgtccctgtctcaggtctttctgcacctttctacactggacagatccgttatatggtcaaagtctatcctcaacgcacgatgtaaaatatgtcgaaaaaaaggagacgccgagaacatggtgctttgtgacggctgcgacaggggccatcacacatactgcgttcgtcctaaattaaaaaccgtcccagagggtgactggttctgtcccgagtgtaggcccaagcagaggagcagaagactgtccagcagacagagaccctccctggaatcggacgaggatgtggaggatagcatgggcggcgaggacgacgaagtggatggcgatgaagaggagggccagtctgaggaggaagagtatgaagttgagcaggatgaagatgactcccaggaggaagaagaggtttcgttgcccaagaggggccgccctcaagtcaggctgcccgtgaaaacacgagggaagcttagctcgtcattttccagcaggggtcagcagcaggaaccgggccgatatccctcccggtctcagcagtcaacccctaaaaccaccgtaagctcgaagacaggccgtagcctgaggaaaattaattcagcgccccccactgagacgaaatcactgaggatagcaagtaggagcaccaggcactcccacggtcctctccaggccgacgtattcgttgaactactctctccacgcaggaaaagacgtggccgcaagtcagctaataacactcctgagaactcacctaactttccaaacttccgggtaattgcgacaaaatcaagtgagcagtccagatctgtgaacattgccagcaagctctcgctacaggagtcagaaagtaagagacgatgccggaagcgtcaaagccctgagccatctccggtcactttgggaagaaggagttctggccggcagggcggggtgcacgaactctcagcttttgagcagctggtggtcgagttggtgcgtcacgatgactcctggccattcctaaaactcgtcagcaaaattcaggtgccagactactacgatatcataaagaaacccatcgcattgaatatcatcagggaaaaggtcaataagtgcgaatataagttggcatccgagttcatcgacgacattgagctgatgttctctaattgtttcgagtataacccccgcaatactagcgaggctaaggccggtaccaggctgcaggccttcttccatattcaggctcagaagctcgggctgcatgtgacccctagcaacgttgatcaggtttctaccccacctgccgccaagaaatctcgtatctag

SEQ ID NO: 180771 - DNA, 4671 bp, synthetic construct
  misc_feature 1..4671: note = Description of Artificial Sequence: Synthetic coding sequence
  source 1..4671: mol_type = other DNA
atgcccctgctgcaccggaagcccttcgtgcggcagaagccccccgcagacctccgcccagacgaggaggttttttactgtaaggtaaccaacgagattttcagacattacgatgatttttttgagcgaactatactgtgcaactctctcgtgtggagctgcgctgtcacaggccggccgggactgacgtatcaagaggcgctagaatcggagaaaaaagccaggcagaacctgcagtcttttcccgaaccgttaatcatccctgtcctatacttgacctcactcactcatcgctcccggcttcacgagatttgtgacgacatctttgcatatgtcaaggacaggtactttgttgaagagactgtagaggtcattagaaataacggggctcggttgcaatgcagaatcctcgaggtcctgcctccgagccaccagaatgggtttgctaatgggcatgtgaactccgttgatggggaaactatcattatcagtgactcagacgactctgagacacaaagctgcagcttccagaacgggaagaaaaaggacgcaatcgatccactcctttttaaatacaaagttcaaccaactaagaaagaacttcatgagtctgccatcgtaaaagcaacccaaatcagcagaagaaagcacctttttagtcgtgataaactgaagctgttcctgaaacaacactgtgaaccacaggacggcgtaattaaaatcaaggcctcctctttatccacctataagatcgccgagcaagattttagctacttttttcctgatgatccgcccactttcattttctctcctgccaacaggcgaagggggcggccacccaagcggattcacatttcacaggaagacaacgtggccaacaagcagacccttgccagctaccgatccaaggccaccaaggagcgggacaagctgctcaagcaggaggaaatgaagagcctggcattcgaaaaggccaaactcaagagagaaaaggcagacgcgcttgaagcaaagaaaaaggagaaagaagacaaagagaagaagcgcgaagagctgaaaaagatagtggaagaggagcgcctgaagaagaaagaagaaaaggagcgtctgaaggttgaacgcgaaaaggaaagggaaaagctgcgagaggagaagaggaaatatgttgagtatctgaaacagtggagcaaacctcgggaggacatggagtgtgacgacctaaaagagctgcctgaacctacccccgtgaaaaccaggctccctccagaaattttcggtgacgcactcatggtgctggagtttctcaacgcgttcggagaactgtttgatctccaggatgagttccctgatggtgtcaccctggaggtcctagaggaagccctggtgggaaatgactccgagggccccctctgcgaacttcttttcttttttctgacagccattttccaagccatagccgaggaggaagaagaagtggctaaagagcagctcactgacgcagacacaaaggatctcactgaagccctggatgaagacgctgacccaacgaaatccgccttgtctgctgttgcctccctggccgctgcatggccccagcttcaccagggatgctcactgaaatccctggacttggattcttgtacactatctgagatactcaggctgcatatcctggcttctggtgcagacgtcacctccgccaacgccaagtatcgctatcagaaacgcggaggcttcgacgccaccgatgatgcctgcatggagttacggctttcaaacccttcactggtcaaaaaattaagcagtaccagtgtgtacgacctcactcccggcgaaaagatgaagatccttcacgcgctgtgtggcaagctgttaactctggtgtctacacgggacttcatagaggactatgtggacatccttagacaggccaaacaggagttccgagaactgaaggccgaacagcatcgcaaagagagggaggaggccgccgcgcgaatacgtaaacggaaagaggagaaactgaaggagcaggagcagaaaatgaaagaaaagcaggagaaactgaaggaggatgaacagcgcaatagcaccgccgatattagtattggagaagaggaacgagaggacttcgatactagcatcgagagcaaagacaccgagcagaaggaactcgaccaagacatggtgacagaggatgaggatgatcccggttcccataagagggggaggcggggcaaaaggggccagaatgggtttaaggagttcaccaggcaggagcagatcaattgtgtcactagagagcctctgacggccgatgaagaggaggccctgaaacaggagcatcaaaggaaagagaaggagctgttagagaaaatccagagtgcaattgcttgtaccaacattttcccactggggagggacagaatgtaccgccggtattggatcttcccaagcatccctggtctgttcattgaagaggattatagcggcctgaccgaggacatgctgctgccccgaccgagttcctttcagaacaacgtgcaaagccaagatccacaggtctccacaaaaactggagagccactgatgtcagaatccacaagcaatatcgaccaggggccccgagatcattccgtgcagttgccaaagccggtccacaaaccaaatagatggtgcttctatagctcctgcgagcaactcgatcagcttattgaggccttgaattcacgggggcatagagagtccgccctcaaggagacactgctgcaggagaaatcacgcatctgcgcccagttagcacgtttttcagaagaaaaattccattttagtgacaagccccagcccgattcaaagcccacatatagcagaggcaggagttccaacgcctatgatccttcgcaaatgtgcgctgaaaaacaacttgagctgaggttgcgcgatttcttgctcgatatcgaagacagaatttaccagggtaccctgggggctataaaagttacagatcggcacatttggagaagcgcgctggaaagcggtcggtacgagttactatcagaggagaacaaggaaaatggtatcataaagacagttaacgaagatgttgaagaaatggagatcgacgaacagacgaaggttattgtgaaggaccgactcctaggcataaaaactgaaaccccttccaccgtgtctactaacgcctccaccccgcagtcggtctcctcggtagtgcactatttggccatggccttgttccaaatcgaacaagggattgagcgtcggttcttgaaagctcccctggacgcttcagactccggccggtcctataagaccgtgctggaccgatggcgtgaatctctgttatcctccgcctccctgtctcaggtgttcttacatctcagcaccctggaccggtcagtaatctggtctaaaagtatcctgaacgctaggtgcaagatttgtcgtaaaaagggcgatgctgaaaacatggtcctgtgtgacgggtgcgacagggggcaccacacatactgcgtccggcctaaactgaagactgtgccggagggggactggttctgcccagaatgccgcccaaagcaacgaagccgacgactttccagtcgtcagcggccttccttggaatctgatgaggacgtggaagattccatgggcggggaagatgatgaggtggacggggatgaagaggaggggcagagcgaggaagaggagtacgaagtcgagcaggatgaagacgacagccaggaagaggaggaagtgtccttacctaaaagaggtagaccacaagttcgactgcctgtgaaaacgagaggaaagctctcatcttctttttcgtcgagaggacaacagcaggaacccgggcgttatccaagtagaagtcagcagtctacccccaagactacagtcagctccaagactgggcgaagcctgcggaaaatcaacagtgcccctcctactgaaaccaagtcattgcgcatcgcctcacgctccacccggcactctcatggacccctgcaggccgatgttttcgttgaattgctgagcccccgccggaagcgacggggtaggaaatctgctaataacacgcccgaaaattccccaaactttccaaattttagggttattgctactaagtcctctgaacagtcacggtcggtcaatatcgcgtctaaactaagtcttcaggagtccgagagcaaacggcgatgccggaaaaggcagtcacctgagccgtcaccagtaactttgggtagacggtccagcggacgtcagggtggtgttcacgaattgagtgcgttcgaacaactagtggtggagttggtgcgacacgatgattcctggccattcctaaaactcgtgagtaaaatccaggtgccggactattacgatatcattaaaaaacctatcgctctgaatataatccgtgagaaagtgaataagtgcgagtacaagctggcatccgaatttatcgatgacattgagttaatgttcagcaattgctttgagtacaatccgaggaatacaagcgaggccaaggccggcacgcgtctgcaggcgttttttcacatccaagcgcaaaagttaggactacacgtgacaccctccaatgtggatcaggtgagtactccgccagccgccaaaaagtcgagaatttag

SEQ ID NO: 180772 - DNA, 3702 bp, synthetic construct
  misc_feature 1..3702: note = Description of Artificial Sequence: Synthetic coding sequence
  source 1..3702: mol_type = other DNA
atgaagagcctggccttcgagaaggccaagctgaagcgggagaaggcagatgcccttgaggctaaaaaaaaagagaaggaagacaaggagaaaaaacgggaggagctaaagaaaattgtcgaggaggagaggttaaaaaaaaaggaggaaaaggaaaggctcaaggtcgagcgggagaaagagcgcgagaaactccgtgaggagaaacgtaagtatgtggagtatctgaagcagtggtcaaaaccgagagaagacatggagtgtgatgacttgaaggaactgcccgagcctaccccggttaagacgagattacccccagagatctttggcgacgcattgatggtcctagaattcttaaacgccttcggcgagttgtttgacttgcaggatgagttcccagacggtgtcaccctagaggtcttagaagaagccctggtggggaacgatagcgagggtccactttgtgaactcttgtttttctttctaaccgctatttttcaggccatagcagaagaggaagaggaagtggctaaggagcaactgactgacgcagatactaaggggtgttcactcaagagcctggatttggatagttgcacactgtctgagattctcaggctgcacatattggccagcggagccgatgtaactagcgctaacgctaaatatcggtatcagaagagaggcgggtttgacgctacagacgacgcctgcatggaattgcgactctccaatcctagtcttgtgaaaaagctctcatccactagcgtgtacgatctaacccctggagagaaaatgaagatcctgcacgccctatgcggaaaacttctaacactcgtgtccacaagagactttatcgaggactacgtagacatactccgtcaggcaaagcaggaatttagagaactgaaagccgagcagcaccggaaggaacgggaagaggccgccgcccgcatccggaagaggaaagaagaaaagcttaaggagcaggagcaaaaaatgaaagagaagcaggagaagctcaaggaagatgaacagaggaatagcacagcggacatttcaattggtgaggaagaacgtgaagactttgacaccagcatagagtcaaaggacactgaacagaaagagcttgaccaggacatggtgaccgaagacgaggacgaccctggatctcataaacggggccgtcgaggaaagagagggcagaatggattcaaggagtttaccaggcaggagcagataaactgcgtcaccagagagccactgaccgcggatgaagaggaagctctaaagcaggagcaccagcgaaaagagaaagagttgctcgagaaaatccagagcgccatcgcttgcactaatatattcccccttggccgggatagaatgtacagaagatattggatatttccatcgataccagggctatttattgaagaagactactctggcctgacagaagacatgctgcttcccaggccgtcttcctttcaaaacaatgtgcagtctcaggatccccaggtcagcactaaaactggagagccgctcatgtccgaaagcacgtcaaacatcgatcaagggccacgggatcacagtgtacagttgcccaaaccagttcacaagcccaataggtggtgcttctactcatcatgtgagcagctagatcaactgatcgaggccttgaatagccgcggacatcgtgagagcgccctgaaagaaacgctcctgcaggaaaaatccaggatctgtgcccagctggcccgattcagcgaggaaaaatttcacttctctgacaagccgcagccggactcaaaacctacatattccagagggagaagtagcaacgcctatgatccttctcagatgtgcgcagagaaacagcttgaattgcgactgcgcgactttcttctggacattgaagataggatttatcaaggtaccttgggcgcgatcaaggttaccgaccgacacatctggagaagtgcactcgaatctggcagatatgagctgctctctgaggaaaataaggagaacggtataattaaaactgtaaacgaagacgtcgaagaaatggaaattgatgaacagactaaggtgatcgtcaaggatcgtcttctggggattaagaccgaaacaccctccactgttagcacaaatgctagcacaccacaatccgtgtcctctgttgttcactatctcgctatggccctctttcaaatcgaacaggggattgagaggaggttcctcaaggcaccattggatgccagcgattccggccgttcttacaaaacagtacttgacagatggcgagagtccctgcttagctctgcctcgttatcgcaagtgtttctgcacctatcaaccctagatcggagcgtgatctggtctaagtccattcttaatgctcgctgcaaaatttgcagaaagaaaggcgacgcggaaaacatggtgctgtgtgatggttgcgatcgcggccaccacacctactgcgtccgaccaaaactgaagaccgtgcccgaaggcgactggttttgcccggagtgtagaccaaaacaaaggagtcgaagactgtcttctaggcagcgcccctctctggagtccgatgaggatgtcgaggacagcatgggaggcgaggatgatgaggtggacggcgacgaagaagaaggtcagtccgaggaggaagagtacgaagtggagcaagatgaggatgactcacaggaggaagaggaggtctccttgccgaagagagggagacctcaggtccggttgcccgtgaaaactagaggaaaactgagctcatcgtttagcagcaggggacaacagcaagagcccggaagatacccaagccggagccagcaatccacacccaagaccaccgtgtcttctaaaacaggccgatccttgcggaaaatcaactctgctccacccacagagactaaaagtttgagaattgcttcccggtccaccaggcattcacacgggcccctccaagctgatgtgttcgtagaactgttgtcacctcggcgaaagaggcggggacggaaatccgcaaacaacaccccagagaatagtcccaattttcctaactttagagtgattgccacaaagagttccgaacagtctcggagcgtgaacatagcttccaaattgtccttgcaggaatctgagtccaaacgtcggtgtagaaagcggcagtcacccgaaccttctcccgttacgcttggtcgtagaagttctggcagacaagggggtgtacacgaactgagtgcttttgaacaacttgtggtcgagctggtccgccacgatgattcttggccttttttgaaattggtgtccaaaattcaggttcctgactattacgatatcattaaaaaaccaattgctttaaacatcattcgtgagaaagtaaacaaatgcgagtataagctcgcttccgagttcatcgacgacatagaattgatgttctcgaactgtttcgaatataatccccggaacactagcgaggcgaaagctggcacacgccttcaagcgttctttatattccgattgaaatctctggattctacttcacaccccgtcatgtggactaaactggctcaccaccgccttagaaagagccatgagagtgatttcgtgcttctgaaggatatcttcgaagagaagcagatcgtccacgagaatggcacccttaatcacgccgtctag

SEQ ID NO: 180773 - DNA, 4452 bp, synthetic construct
  misc_feature 1..4452: note = Description of Artificial Sequence: Synthetic coding sequence
  source 1..4452: mol_type = other DNA
atggcccccctgctgggccggaagcccttccccctggtgaagcccctgcccggggaggaacctttgtttaccatcccccacacgcaggaagccttcaggaccagagaggagtatgaagcaaggctggaacggtatagtgagcgtatttggacgtgcaaatctaccggttcctctcagttgacacataaagaagcttgggaggaagaacaagaggtcgcagagcttctcaaggaggagttccctgcttggtatgagaaactggtcctcgaaatggtgcaccacaatactgcctcattggagaaactggtggacactgcctggctggaaatcatgaccaaatacgcggtgggcgaggagtgcgactttgaagtcgggaaagaaaagatgctgaaagtgaagattgttaagattcatccgctagagaaggtagacgaagaagccacagaaaaaaagtctgatggggcttgcgacagcccaagttccgataaagaaaattcaagccagatcgcccaggaccaccagaagaaagaaactgtggttaaggaggacgagggcagaagagagtccatcaatgaccgcgctaggcgcagtccgcgcaaactcccaacatccctgaaaaaaggggaacggaagtgggcaccgccaaaatttctccctcataaatacgatgtaaaactacagaatgaagataaaataatctcaaacgttccagccgattccctgatcagaactgaacgtcctcccaataaagaaatcgtgcgctattttattagacacaacgctcttcgggccgggacaggggaaaatgcaccttgggtcgtggaggacgagctggtaaagaaatactccctgccatctaagttcagtgactttttactcgatccctataagtatatgacactcaaccctagcaccaagcgaaaaaatactggatcccctgatcggaagccaagtaagaagagtaaaacggacaactcgtcccttagctccccgctcaaccccaaactttggtgtcatgtgcacctgaaaaaatcactcagcggctcacccctcaaagtgaaaaattccaaaaattcaaagtcacccgaggagcacttagaagaaatgatgaagatgatgtctcccaacaagcttcacaccaacttccacatcccaaagaaaggcccgcctgccaagaaacctggcaaacatagtgataagcctctgaaagccaagggaagatcaaaggggatcctgaacggtcagaagtccaccggaaactccaaatctccaaagaagggcctcaagacgccaaagactaaaatgaagcaaatgaccctgctcgatatggcaaaaggtacacagaagatgacccgggcaccccgaaactctggcggaacccctcggacctcaagtaaaccccataaacatcttcctcctgcggctctacatctgatcgcctactataaagagaataaggacagggaggacaagaggagcgctctaagctgtgtcattagtaaaacggcaagactcctttcctcagaagaccgcgcccggctccccgaggagctgcgctcactggtacaaaaaagatatgagctgctggagcacaagaagaggtgggccagcatgtcagaagaacagaggaaggaatacctcaagaaaaagagggaggaactgaagaagaaactgaaggagaaggccaaggaacgcagagaaaaggagatgctcgagcgattggagaagcagaagcggtatgaggaccaggagctcaccggtaaaaacctcccagcttttcgtttggtggatacaccagaggggctcccgaacaccctcttcggcgatgtggccatggtggtggaattccttagctgttactctggactgctgctcccagacgctcaatacccgattactgcagtttctcttatggaggccctgtccgcggataagggcgggtttttataccttaacagggtgttggtcattctgctccagactttacttcaggatgaaatcgccgaggactacggagaactagggatgaaactcagtgagattcccctaacactacacagtgtatccgagttggtacgcctgtgcctgagacgctcggacgtgcaggaggagagcgagggctctgacaccgacgacaataaggacagcgctgccttcgaggataacgaggtgcaggacgagttcctggaaaagctcgagaccagtgaattcttcgagttgacatccgaggagaagctgcagattttgactgctctctgtcacaggatcctcatgacctactccgtacaggatcatatggaaacccgacaacagatgagcgccgagctttggaaagagagactagcggttttgaaagaggaaaacgataagaagagggcggagaagcagaaacggaaggaaatggaggcgaagaacaaagagaacggcaaagtggaaaatgggctaggtaaaaccgatcgcaagaaggagattgtgaaattcgaaccacaagttgacactgaggccgaagatatgatctctgcggtcaaatcaagacgtctgcttgctatacaagccaagaaagaacgcgagattcaagagcgagaaatgaaggtgaaactggagcggcaggccgaggaagaaaggattcgaaagcacaaagctgccgctgagaaggcctttcaggaaggtattgccaaggcaaagctggtgatgcgcagaacacctatcggtactgaccggaatcacaaccgctactggttgttcagtgacgaagtccccgggctatttattgagaaggggtgggttcacgatagtatcgattatagatttaaccaccattgcaaagaccacaccgtgtcaggagatgaggactactgccctcgatcaaaaaaggctaatttagggaagaatgcgtctatgaatactcagcatggaaccgccaccgaggttgcagtggagacaacaacgcctaaacaaggccagaatctctggtttctgtgtgactctcaaaaagagctagacgaactgctaaactgtctccaccctcagggaattcgcgaatcacaactcaaggagcggcttgaaaaaagatatcaggacatcatccattccatacacctcgcccgaaaacccaaccttggcttgaagtcctgtgatggcaatcaggaattactaaatttcctcaggtctgacctcatcgaagtcgccacccggctacagaagggtggtctcggttatgttgaagaaacttccgaattcgaagcgcgagtcataagcctggaaaagcttaaagactttggtgagtgtgtgattgccctgcaagcctcagtgattaagaagttcctccagggcttcatggcaccgaagcagaagcgccgcaagctgcagtctgaagattcagcaaaaactgaagaagtggatgaagagaaaaaaatggtggaagaagccaaagttgctagcgcgttggagaagtggaagactgccatcagggaagcccagacgttcagtcggatgcacgtcttgcttgggatgctggacgcctgtattaagtgggacatgagtgcagagaacgcccggtgcaaggtgtgtcggaaaaaaggtgaggacgataaactcatcctctgcgatgagtgtaacaaagctttccacctgttctgccttcggccagctctctacgaggtaccagacggggagtggcaatgtcctgcttgtcagcccgctacagctaggaggaacagtagggggagaaattacaccgaggagagtgcctcggaggactcagaagatgatgaatctgatgaggaggaagaagaagaggaggaggaggaggaagaagaggattatgaagtggccggtctgaggctgcgcccgaggaagactatcagaggcaagcatagcgtgatccctcctgcagcccgtagtggtcgtcggcctgggaagaaaccacactcaacgcgtcgttcccagccaaaggccccccctgtggatgacgcagaggttgacgagctcgtcctgcagacaaaaagaagcagcagaaggcaaagtcttgagctccagaagtgcgaagagatcctgcacaagatcgtcaagtaccgattctcatggccattcagagaaccagttaccagagatgaagccgaagactactatgatgtgattactcaccctatggactttcagacagtgcagaacaaatgctcttgtgggagctaccggtccgtccaagaattcctgactgacatgaagcaggtgtttacgaatgcagaagtctacaattgtagaggctcacacgttctatcttgtatggtgaagaccgaacagtgcctcgtggctctgctgcataaacacttgccaggacacccatatgtgcgacgaaagcgaaagaaattcccagaccgactcgccgaggatgagggtgacagcgaacccgaggccgttggccagtcacgcggcagacggcagaagaagtag

SEQ ID NO: 180774 - DNA, 4452 bp, synthetic construct
  misc_feature 1..4452: note = Description of Artificial Sequence: Synthetic coding sequence
  source 1..4452: mol_type = other DNA
atggcccccctgctgggccggaagcccttccccctggtgaagcccctacctggagaagaacccctattcacaatcccacacacccaagaggccttccggacacgtgaagaatatgaggccagactggagcgatattcggagaggatctggacctgtaaatccaccggaagctcacagctaacacacaaggaggcttgggaagaggagcaggaggtcgccgagctgctgaaggaagagttccccgcctggtatgagaaacttgtgctcgaaatggtacaccacaatacggcctctttggagaaactagttgacacggcctggctggaaatcatgaccaagtacgccgttggcgaggaatgtgacttcgaggtgggaaaggagaagatgttgaaggtaaaaattgtgaagatacatcccctcgaaaaagtggacgaggaagccaccgagaagaaatctgacggcgcttgcgacagtccgtcttccgacaaggagaatagcagccaaatcgcgcaggaccatcagaagaaagagaccgtggtgaaggaagatgaaggccggcgggagtccatcaacgacagagccaggcggagccctaggaaactgcccacgagcctcaaaaagggggaacgcaagtgggctccccccaagttcctccctcacaagtatgacgtcaagttgcagaatgaggacaagattatttcgaatgttcccgctgactccttaattagaacagagcgacctccaaacaaagaaatcgttcggtatttcatccggcataatgctctgcgagccggaacaggcgaaaacgcgccatgggtggtagaggatgagcttgtgaagaaatattccctccctagtaagttttccgactttctattggatccctataaatatatgacactcaatccatccaccaagcgaaaaaatactggatcgcctgatagaaagccaagcaagaagtcaaagaccgacaattcctccctgagctcaccgctcaatcccaagctatggtgccacgtccacctgaagaaatctctttcgggatctccactgaaggttaaaaactcaaagaattcaaaatccccagaggagcatctagaggagatgatgaagatgatgtctccaaacaagctccacaccaatttccacatccccaagaaaggcccccccgccaagaagcccggtaaacacagcgataaaccgctgaaggccaaagggaggagcaaaggtatccttaacggccagaaaagcacagggaattctaaatcacccaaaaaggggctgaagacccccaagaccaaaatgaagcaaatgacattactcgacatggccaagggtacacaaaagatgacgcgggccccccgcaactccggtgggacacccaggactagttcgaaaccacacaaacacctaccccctgctgccttacatttgatcgcatactataaggagaataaagacagagaggataagcgcagtgcgctcagctgtgtcatctccaagactgcgcggcttttgtcttcagaggaccgtgcccggctccccgaggagcttcgcagtctcgtccagaagcggtatgagctcctcgagcataagaaaaggtgggcaagcatgtctgaagaacagcgcaaggagtacctaaagaagaagagagaggagctcaagaaaaaattaaaagagaaggcgaaagagcggagagaaaaggagatgttggagaggctggagaagcaaaaacggtacgaggaccaagaactgaccggtaaaaatctgcccgctttccggctagtcgatacgcctgaagggctccccaacacgctgtttggtgatgtggctatggtggtcgaatttctgtcgtgctactccggactgttactacccgacgcccagtacccaataacagccgtttccttgatggaggcgctgagcgccgataagggaggatttctttacttgaatagggtgcttgtgatcttgttgcagacactactgcaggatgagatcgctgaggactatggggagttaggtatgaaactgtccgagatccctctgactcttcattcggtgagtgagctggtgaggttatgtttaagacgcagtgatgtccaggaggagtctgaaggctccgataccgacgacaacaaagattctgcagctttcgaggataacgaggtgcaagatgaattcctggaaaagcttgagaccagcgaattctttgagctgacatcagaggaaaagttgcagattctgaccgccctgtgtcacaggatactgatgacctactcagttcaggaccacatggagactaggcagcaaatgagcgccgagctctggaaagaacggctcgccgtactgaaggaggaaaacgataagaaacgcgccgagaaacaaaaaagaaaagaaatggaggcaaaaaacaaagagaacgggaaagtggaaaatggcctcggcaagacagacagaaaaaaagagatcgtgaaatttgagccccaggtcgacactgaggctgaagatatgatcagtgccgttaagagcagaaggttacttgccatacaagccaaaaaggaaagagaaatccaggaaagagaaatgaaggtcaaactcgagcgccaggccgaagaggagagaattcgcaaacataaagccgccgctgagaaagcgttccaagagggtatcgccaaggcaaaattagtaatgcgccgcactcccatcggaactgaccgcaaccataatagatactggctgttttctgacgaagtgccagggttgttcattgagaagggttgggtgcacgacagtatagactatcggttcaaccatcactgcaaggaccatacagtctcgggagacgaggattactgcccaaggagtaaaaaagcgaacctaggcaaaaacgccagtatgaacacgcagcacggcaccgccacagaggtggccgtggaaacaacaaccccaaagcagggccagaatttgtggttcctgtgcgacagccaaaaggaactcgatgaactccttaattgcctccaccctcaggggatcagagaatctcaactcaaagagaggcttgaaaaaagatatcaagacatcattcacagcatccacctggcccggaagccaaacctggggctaaagtcttgcgatggtaatcaagaactgctgaactttctccggagtgacttgatagaggtggcaaccaggttgcagaaggggggactaggatacgtcgaggagaccagcgagtttgaggctagggtgatctccctggagaagttgaaggacttcggagagtgtgtaattgccctgcaggccagtgtgataaaaaaatttctccaggggttcatggcccctaaacagaaacggaggaaattgcaatccgaggattcagccaagactgaggaggttgacgaggagaagaaaatggtcgaagaggctaaagtagcaagcgccctggagaagtggaagacagcgattagggaagctcagacgttcagtcgcatgcacgttctactgggcatgttagacgcctgcatcaagtgggacatgtctgcagagaatgccaggtgcaaagtgtgtaggaagaagggggaagatgataagttgattctgtgtgatgaatgcaacaaagcgttccaccttttctgcctacgcccagccctttacgaggtgcccgacggggagtggcagtgccccgcctgtcagcctgctaccgcccggagaaacagtcgaggccgcaattacacagaggagtccgctagtgaagactccgaagacgatgagtccgatgaggaagaagaggaagaggaagaggaggaggaggaggaagattatgaggtggccggactgaggctgaggcccagaaagacgataagaggcaaacatagtgttattcctcccgccgcgagatctggtcgacgcccgggaaagaagcctcattccacacggagaagtcagcctaaggctccacctgtggacgatgcagaagtggacgagctggttttgcaaacaaagagaagcagcaggcggcagtcacttgagcttcagaagtgtgaggaaatactgcacaaaatcgtaaagtacaggttttcgtggccctttagggaacccgtcacgagagacgaggcagaagattactacgacgtaattacccaccctatggattttcagaccgttcaaaacaagtgttcatgtgggagttacagaagcgtccaggagttcctcactgacatgaagcaggtgttcactaacgctgaggtgtataattgcaggggttctcacgttttgagctgtatggtcaagactgagcagtgcctggtggcgctcctccataaacatctgcccggccatccttatgtgaggagaaaacgtaagaagttcccagatagactggccgaggatgaaggcgatagcgagccagaggctgtgggccagtccaggggcaggcgacagaagaagtag

SEQ ID NO: 180775 - DNA, 5622 bp, synthetic construct
  misc_feature 1..5622: note = Description of Artificial Sequence: Synthetic coding sequence
  source 1..5622: mol_type = other DNA
atggaggccaacgaccacttcaacttcaccggcctgccccccgcccctgccgcttcaggcctcaaaccttccccttcaagcggcgagggtttgtatacaaacgggagcccaatgaattttcctcaacaaggtaagagcctgaatggggacgtaaatgtgaatggcctctctacagtgtcccacacaaccaccagtggaatcctaaattctgcacctcactccagttcaacatcccatctgcaccatccttcggtggcttacgactgcctgtggaactattcacagtaccccagtgccaaccccgggagcaatttaaaggatccccccctcttgtctcagttttccgggggccagtaccccctgaacgggattctgggaggtagccgtcagccgtcatcaccctcacacaacacaaacctcagggccggttcccaggagttctgggctaacggaacccaaagtcctatgggcctgaattttgattctcaggagttgtacgacagctttccagatcagaactttgaggaggtgggaagcggcatccacccagacgaggcggccgaaaaggagatgacgtccgtggtggccgaaaacggtacaggtctcgtggggtccctcgaactagaggaggagcagccagaacttaaaatgtgcgggtataacggatcagtccccagcgttgagagtctccaccaggaggtctctgtgctcgtacccgacccaaccgtaagctgtctagatgatccttctcacctgcccgaccagcttgaggacacccccatcctcagcgaagatagtctagagccttttaattcactcgccccagagccagtgtcgggggggctgtatggaattgatgataccgagttaatgggtgctgaggacaaattgccgctggaggatagtccggtcatcagcgcgctcgactgtccatctttaaataatgccaccgcattcagtctgctggccgacgattctcagacaagtacctcaatcttcgcctctcctaccagccccccagtgctgggtgaatctgttttgcaggacaactcctttgacctcaataatggaagcgacgctgaacaggaagagatggagacacaaagttctgatttcccaccatctctgactcagccagcccccgaccagtcttccacaatccaactgcatccagcaacctcgcccgcagtgagccccactaccagccctgccgtgagcctggtggttagcccggctgcatcacctgagatatctcctgaggtttgccctgccgcttctactgtggtttctcccgccgtgttttccgttgtatctccagcttcctccgcggtattgccagccgtttcgctggaagtccccctaaccgcatccgtcacatctcctaaggcttcccctgtaacaagtccagctgccgctttccctactgcctcgcccgctaataaggacgtatcttcctttctggaaaccactgccgacgtcgaggagatcacaggagagggcctcacagcctcagggagcggagacgtgatgcgccgtaggatcgctacgcctgaagaggtgagattacctttgcagcatggctggcggcgggaggtcagaattaaaaaagggtcacacaggtggcagggcgaaacctggtactacggcccatgcgggaaaagaatgaaacagtttcctgaggtaatcaaatatctgtcaagaaacgtggtccacagcgtaagaagagagcacttttcatttagcccccgtatgcccgtgggagacttcttcgaggaaagagatacgcccgaggggctccaatgggtccagctttccgcagaggagatcccatcccgaattcaagcaataactggcaaacgtgggagacctaggaacaccgagaaggcaaaaactaaggaggtgccaaaggtgaagagagggcggggccgaccgcccaaggtcaaaataaccgagctgctgaataaaaccgataaccgtccacttaaaaaactggaagcacaggaaacactgaatgaggaagacaaggccaagattgcaaaaagcaagaaaaagatgagacagaaggtgcagcgtggggagtgccagacgaccatccaaggtcaggctaggaataaaaggaagcaggagactaagagcctgaagcagaaagaggcgaaaaagaaatccaaggccgagaaagaaaaagggaagactaaacaggagaagctgaaagagaaggtgaagcgggaaaagaaagagaaggtaaaaatgaaagagaaggaggaggtcaccaaggctaagcccgcctgcaaagctgataagactctggcaacgcaacggaggctagaagagcgccagcgtcagcagatgatactcgaagaaatgaaaaagcccacagaagacatgtgcctgactgatcaccagccactgccagatttttcgagggttcctggcctgacgctgcccagcggagcattctccgactgcttgacgattgtggagtttctgcacagttttgggaaggtactgggcttcgatcctgccaaggacgttccgagcttgggagtgctccaggaggggctactgtgtcagggggactccttaggtgaggtgcaggatttgctggttcgcctcttgaaggcagcccttcatgatcccggatttccttcttactgccaatcccttaagattctgggagaaaaggtgtcagagatcccactgacgcgggacaatgttagcgaaatactgagatgctttttaatggcctatggagtcgagcccgccttgtgcgatcgcttaaggacccagccttttcaggctcagccgccgcagcaaaaagctgctgtcctggctttcttggtccatgagctaaacgggtcaaccttgattatcaacgagattgataagaccctggagagcatgagtagttaccggaaaaacaaatggattgtcgaaggacgtcttcgtcgcctcaaaacggtactcgccaagcggacaggtaggtctgaagtcgagatggaggggcccgaagaatgtctcggccgaagacgttcgtcccggataatggaggagacgtccggaatggaggaggaggaggaggaggaatccatcgccgcagtgccgggacgaagggggagacgtgacggagaagtagacgcgacggcctcaagcataccagaactggagcggcagattgaaaagcttagcaaaaggcagctgttttttagaaaaaaactcctccattcgtcgcagatgctacgcgccgtctcgctcggccaagatagataccggcggcggtactgggtgctcccctatctggctggcatctttgtggaaggtacggagggcaatctggtaccagaggaagtgatcaagaaggaaactgactctctgaaagttgccgcacacgccagcctgaatcccgcccttttttcgatgaagatggaattggcaggcagtaataccacagcatcaagcccggcgcgtgctcgtggtcgaccccgaaaaacaaagccagggtctatgcagccccggcatcttaaaagtcctgttaggggacaggactcagagcagcctcaggcccaactgcagccggaagctcagctgcacgcgccagcccagccccagccccagctgcagctgcagctgcagagccataagggttttctggagcaggagggaagcccactgagtctaggacagagtcaacacgacttatctcagtccgccttcctgtcctggctctcccagactcagtcgcactcctcccttctgagcagcagtgttttaactcctgattcatcccccggaaagttggacccggctccctctcaaccacctgaggaacccgaacccgatgaggctgaaagttctccagacccccaggcgctctggtttaacatttcagcccagatgccatgtaatgctgccccgacacccccaccagctgtgtctgaggaccagcccactccatctccccagcagctggcctcatctaaaccaatgaaccggccttcagccgcaaatccctgctccccggtgcagtttagttctacaccactagctggactcgcaccaaagaggagggcaggggatcctggcgaaatgccccagtctcccactggtttggggcagcctaagcggcgggggaggcctcccagcaagttttttaaacagatggaacagagatatttgacccagctgaccgcccagccagttcccccagaaatgtgttccgggtggtggtggatacgggacccagaaatgctcgacgcaatgttgaaggccctgcacccccgcggtattagagaaaaggccttacacaaacacctgaacaagcatcgcgacttcctgcaggaggtctgtttgcggccctctgcggatccaatctttgagccacgccagctgcccgcgtttcaagagggcattatgagttggtccccaaaggagaagacatacgaaacagacctcgctgtccttcaatgggtagaagaactcgagcagcgtgtcataatgtctgatctccagatacgcggatggacctgtccatccccagatagcaccagagaggacttggcctattgcgagcacctctctgacagccaagaagacatcacatggaggggtcgaggcagggaggggctagccccccagagaaaaacaacgaaccctctggacctcgccgtgatgaggcttgcagcgcttgaacagaatgtggaaagacgctacctgagggagcccctgtggcccactcatgaagtggttcttgaaaaggctctgctgtctacccctaatggggccccagagggaaccacaaccgaaatcagttacgagatcacaccccgaatcagagtttggcgacagaccctggagcggtgccgtagtgcggcgcaggtttgcctttgcctgggccagctcgagcgatcaatcgcgtgggagaagtccgtcaataaagtgacgtgtctggtctgtcggaagggagataacgatgaattcctcctgctgtgtgatggctgcgacaggggttgccacatatactgtcacaggcctaagatggaggcagttcctgaaggagactggttttgcactgtgtgccttgcgcagcaggtcgaaggggaatttactcagaaaccgggctttccaaaacggggccagaaaagaaaatctgggtatagtcttaatttttctgaaggagatgggcgccggcgtagggttcttctgaggggacgtgagtcacccgcggccggaccccgttattccgaggagggcctcagcccatccaaaaggagacgcctgagcatgagaaaccaccactctgacctgacattctgtgagattattcttatggagatggaaagccatgatgctgcttggccttttctggaaccagtgaaccccagactcgtgtctggttacaggcggataattaagaatcccatggacttctccactatgagggaaagattgttaaggggcgggtacacatctagtgaagagtttgctgccgacgcccttctcgtctttgataactgtcagacatttaacgaggacgacagcgaggtggggaaggcaggacacattatgagaagattttttgaatctcgctgggaagaattttatcagggaaagcaggcaaatctctag

SEQ ID NO: 180776 - DNA, 2514 bp, synthetic construct
  misc_feature 1..2514: note = Description of Artificial Sequence: Synthetic coding sequence
  source 1..2514: mol_type = other DNA
gtgcccggccggcggggccggcgggacggcgaggtggacgccaccgcctctagcatacccgaactcgaacgtcagatcgagaaactctcaaagcgccagctgttttttagaaaaaagcttctccactcttcccagatgttgagagcagtgagcttgggccaggacaggtaccgccggagatactgggttctgccctacctagctggcatttttgtcgagggaacagaaggaaacctagtacctgaggaagtgattaagaaagaaacggatagcctgaaggtggctgcccacgcctctttaaatccagctctcttctcaatgaagatggagttagcaggctcaaacactactgcctccagcccagctagagctcgtggtcgcccccgcaagactaaacctggtagcatgcagccacgacatctgaaatccccagtgcgcggccaggattctgagcagccccaggcccaactccaacctgaggcccagctgcatgcccctgcccaaccacagcctcagcttcaactgcagctgcaaagtcacaagggatttctcgagcaggaggggagtcctctctctttagggcagagccagcacgatctgtcacaaagcgcgttcctgtcttggctgtctcaaactcagagccacagctcactcttaagttcaagtgtactgacgccggacagcagcccaggcaagttggatcccgccccttcccagcctcccgaggaaccagaacctgatgaggctgagagtagccctgacccacaggccctgtggttcaacatctctgcccaaatgccgtgcaatgccgctccaacaccacccccagctgtgagcgaagatcagcccacccctagcccacagcagctggcatcttctaagcccatgaaccggcccagcgcggccaacccatgcagccccgtgcagttctcgtcaacccctctggctggcctcgcgccaaaaaggagggcaggtgaccccggggagatgcctcagagcccaacaggtttagggcaacccaagaggaggggacgccccccttccaaatttttcaaacagatggaacaaagatatctgacccagttaactgcccaacccgtcccccctgggtggtggtggattcgggaccccgagatgctagacgctatgctcaaggccctccacccccgaggcattagagagaaggccctgcataagcacctcaacaaacacagagattttctgcaggaggtctgtctccgacccagcgcagaccctatcttcgaacctcgacaactgcctgcttttcaggaaggtattatgtcttggtcaccaaaagaaaaaacatacgagactgatctggcagtccttcaatgggtcgaagagctcgaacagagagttatcatgagtgatctacaaataagaggatggacctgcccctcgccagacagtacccgagaagacctagcatactgcgaacatctcagtgactctcaggaggacatcacctggagaggcaggggacgcgagggactggccccccagaggaagactacgaaccccctcgaccttgccgtgatgaggctggccgctcttgagcagaacgtggagaggcggtacctgcgggagcccctttggcccacacacgaggtggttctggagaaagccctgctgtccacaccaaatggagcaccggaagggaccaccacagagatttcgtatgaaatcactccgcggatcagagtgtggcggcagaccttggaaaggtgtagaagcgcagcccaggtctgcctctgtctgggccaattggagaggtcgatcgcctgggagaagagtgtgaataaagtcacctgtttggtgtgtcgtaaaggggataacgacgagttcctgttgctgtgtgacgggtgtgaccgagggtgtcacatttactgtcatagacctaaaatggaagccgtgcctgagggcgattggttctgcaccgtgtgcctggcccaacaggtggagggggagtttacacagaagcccggctttccaaagcgcgggcagaagagaaaatccggctattcactgaacttttctgaaggtgacgggcggcgcagacgggttctcctcaggggccgcgagtcacccgccgcagggccacgttactcggaagagggactaagcccttcaaagcggcgccgactcagcatgagaaaccaccacagcgacctgacattctgtgagattatcctcatggagatggagtctcatgacgccgcatggcccttcctcgaaccggttaaccctcgcctcgttagcggctacagaagaatcatcaagaatcccatggatttttccacaatgcgtgaacggctccttagagggggatataccagctctgaagaatttgccgcggacgctctcctggtctttgacaactgtcagaccttcaatgaagatgactccgaggtaggaaaggccggacatatcatgcgccgttttttcgaatccaggtgggaggagttttaccaggggaagcaagccaacctctag

SEQ ID NO: 180777 - DNA, 5718 bp, synthetic construct
  misc_feature 1..5718: note = Description of Artificial Sequence: Synthetic coding sequence
  source 1..5718: mol_type = other DNA
atggagatggaggccaacgaccacttcaacttcaccggcctgccccctgcaccagctgcttccggcttgaaaccctctccatctagtggagagggtttgtacaccaacggtagcccgatgaactttccccagcagggtaagtccttgaacggggacgttaacgtgaatggcttgtcaaccgttagccatacaactaccagcggcattctgaactcagctccccactcgagtagcacgtcacaccttcaccatccaagcgtcgcctacgattgcctttggaattactctcagtacccttccgccaaccccggatctaacttgaaggaccctccactgttatcccaattctcaggaggtcagtaccctcttaacgggatccttggagggtccaggcaacctagttcacctagccacaacacaaacctccgcgcaggctcccaggagttttgggcgaacggtactcagagcccaatgggacttaatttcgattcacaggagctctatgatagcttcccagaccagaatttcgaagtcatgccaaacggtccaccgtcattctttacgagtcctcagacctccccaatgcttggctcgagtattcagacttttgcaccgtcacaagaggtcgggtccgggattcacccagacgaagctgctgaaaaggagatgacatctgtggttgctgaaaacggcacgggcctggtcggtagcctggagctagaagaagaacaacctgagctcaagatgtgcgggtataatggctcggttccctccgttgagtctttgcaccaggaggtttctgtcctggtccctgatccaaccgtgtcctgtctggatgacccttcacacctgcccgatcagctggaggacactcctatcctcagcgaagatagcctcgagccattcaactcactagcccccgaaccagtcagcggaggactgtacggaatcgatgacaccgaactgatgggggccgaggataagttgcctctggaggattcccctgtgattagcgcgctagactgcccttcactaaataatgccactgcattctcactgctggctgacgatagtcagacttcgacgtccatctttgcctcacctacctctcctcccgtacttggggaatcagtgttgcaggacaacagctttgatctaaacaatggatcagacgccgaacaagaagaaatggagacccagtcatctgacttccctcccagcttaacccagcctgcccccgaccagagtagtaccattcaacttcatcctgcgacctcccctgcagtgtcacctactacctctccagctgtcagtctcgtcgttagccctgccgcctcaccagagattagcccggaggtttgcccagccgcttctaccgttgtgtcacccgcggtgttttctgtggtaagtcctgcatcttccgccgtgctcccagcggtgtctttggaggttcctctgacagcctcagtgacctctcctaaagcctctcccgtgacgtccccagccgctgcattcccgacagctagtccagcaaacaaagacgtgagtagcttccttgagaccaccgctgatgtagaggagatcactggtgaaggcctcacagcctcgggatccggagacgtcatgcgccggcgcatcgccacacccgaggaagtgcggttgcccctgcagcatggttggcgacgggaggtgcgtatcaagaaggggagtcacaggtggcagggcgagacgtggtactatgggccttgcgggaaacggatgaagcagttcccagaagtcatcaagtatctgtcacgaaacgtcgtacactccgtgcggcgcgagcacttctctttcagtcccagaatgccagtgggggacttctttgaagagagagatacccccgaaggtctgcaatgggttcaactgtctgccgaggaaatcccaagccgtatacaggctataaccggaaagaggggccggcccaggaatacagagaaagctaaaacaaaggaagtgcctaaggtgaagcgtgggcgcgggcgaccaccaaaggtgaagatcacagaacttctgaataaaaccgacaacaggccccttaaaaagctggaggcccaggaaacactcaacgaagaagataaggccaagatagccaaaagtaagaagaaaatgcgacagaaggtgcagagaggggagtgccagactacaatccaggggcaggcacgtaacaaaagaaaacaggaaacaaaatcacttaagcaaaaggaggcaaagaagaaatcgaaagcagaaaaggagaagggcaagacaaagcaggagaaattaaaggagaaggtgaagagagaaaaaaaagaaaaggtgaaaatgaaagagaaagaggaagttacaaaagcaaaacctgcgtgtaaagccgacaaaaccctggccacgcaaagaaggctcgaggagcgacagcggcagcagatgattctcgaggagatgaagaaaccgaccgaggatatgtgcctgactgatcaccagccacttcccgacttctcccgtgtacccggcctgaccctcccaagcggagccttctctgattgtctcacaattgttgaattcctgcattccttcggcaaagtattgggatttgatccagccaaggatgtgccgtccctgggcgtcctccaggaggggcttctctgccaaggcgactcactgggcgaagtgcaagacctactcgtgcggcttctaaaagcagctctgcatgaccccggctttcccagttattgccaaagtcttaagatcctgggagagaaagttagcgagatccctttaacgcgggacaatgtgtctgagattctgagatgcttcctcatggcctatggggtggaacccgccttatgcgaccgcttacgcacccaaccatttcaggctcagccacctcagcagaaggccgcagtgctcgctttcttagtccatgaactcaatggaagtaccctcattattaacgagattgataaaacgctggaaagcatgtcctcataccgaaagaataagtggatcgttgagggacgcctcagaaggctgaaaaccgttctggccaagaggactggtaggtctgaagtggagatggaagggccggaggaatgtctcggaagaaggcggtcttcacgtattatggaggagacatccgggatggaggaagaggaagaggaggagtccatcgcagctgtccccgggcgccgagggcggcgggacggagaagtggatgccacagcgtctagtatccctgagctggaacgacaaatcgagaagctctccaagcgtcagctgtttttccgaaagaagctattgcattctagccagatgctgcgggcagtgagtctggggcaagaccgatataggcgtcgctattgggtccttccatatcttgccgggatattcgtggagggcacagagggcaatctggttcctgaagaggtgatcaagaaagagacggattcactcaaagtggctgcccacgcctcgcttaacccggctctgttcagcatgaagatggagctggccggctcgaacactacagctagctcccccgccagggcacggggtcggcctagaaagacaaagccaggttccatgcagccccggcacctgaagtctccagtccgcggccaggattctgagcagcctcaggctcagttgcaacctgaagcccagttgcacgctcccgcacagccacagccgcagctgcagttacaattacagtcccacaagggctttttggaacaagagggctcgcctctttctctgggtcaatcgcaacacgatctgtcacagtccgctttcctgagctggctctctcagacacagtctcactccagtttgctgagttcgagcgtgctgacaccagacagcagccctggcaagctcgaccccgctccatcgcagcctcctgaggagccggagcccgatgaagctgagagcagtcccgacccccaggcattgtggtttaacatatcagctcagatgccttgtaatgctgcaccaacccctccacccgccgtgtcagaggaccaaccaacaccctccccccagcagctggcttcttctaagcccatgaaccggccatctgccgctaacccctgctcccccgtgcaattcagctcaacacctctggcaggacttgcacccaagcgtagagcgggggatcccggtgagatgcctcagtcacccacaggacttggccagcccaaacggaggggcaggccgcctagcaaattcttcaagcagatggagcagcggtatctaacacagctgacagcccagccggtgcccccagaaatgtgctctggatggtggtggatccgcgatcccgaaatgctggatgctatgttaaaagccttacacccacgagggatccgggagaaagctcttcataagcatttgaataaacatcgggacttcttgcaagaggtatgcttgcgcccaagcgcagaccccatattcgaaccccgtcagctccctgctttccaggagggaattatgtcatggtctccgaaggagaaaacatatgagactgacctggccgtgctccaatgggtcgaggaacttgaacaaagggtgattatgagcgacctgcagattaggggttggacttgcccctcccctgatagcacaagggaggatcttgcatactgtgagcacctgagcgattcccaagaggacatcacctggcgtggccgggggcgagaaggcttggcaccgcagagaaaaactacgaatccactggacctggctgtcatgcggctcgccgctttagaacagaatgtggagaggcggtacttgcgcgagcccttgtggcccacgcatgaggttgtgctcgagaaagcattattaagcactcctaatggtgcaccagagggcactaccacagagatcagctatgagataaccccaaggatacgagtgtggaggcagacactcgagcgatgtagatctgccgcacaggtctgtctttgccttggccagttagaacgctcaatagcctgggagaagagcgtcaacaaggtcacatgtctggtctgtaggaaaggagacaacgatgagtttcttctgttgtgtgatggatgtgacagaggatgccatatctattgccacaggcctaaaatggaggctgttcccgaaggcgattggttctgcactgtttgcttagctcagcaggtggaaggcgaatttacccaaaagccgggcttccccaagagagggcagaaaagaaaatctggctacagcctgaatttttcggagggggatggccgtcgaagaagggttctgcttaggggtagagagagccctgccgctggacctaggtacagtgaggaaggtttgtcaccctccaagaggaggcggctgtccatgagaaatcaccactctgatctgaccttttgcgagataatcctgatggagatggagtctcacgacgcggcatggccttttttagagcctgttaatccacgtctcgtctccggatataggcgcatcataaagaacccaatggacttttcaactatgagggagcgcctgttaaggggcgggtacacttcctcagaggaatttgccgccgatgctctgttggtatttgataactgccagacattcaatgaggacgatagcgaagtcggcaaggcaggccacattatgaggagatttttcgaaagtagatgggaagagttctatcaaggaaagcaagccaacctgtag

SEQ ID NO: 180778 - DNA, 6207 bp, synthetic construct
  misc_feature 1..6207: note = Description of Artificial Sequence: Synthetic coding sequence
  source 1..6207: mol_type = other DNA
atggagagcggcgagcggctgcccagcagcgccgccagcagcaccaccccaacttcatcttctactcccagcgtcgcatctgtggtctctaagggcgggctatcaactggtgtggcttctttgtcctcaaccattaacccgtgcgggcacctcttcagaactgcaggagatcaaccttttaatctctccacagtgagttccgccttcccaatggtgtcccaccccgtgttcggcctgcattccgcgtcctctggccactcggagtttggcggcctgggaacgctggggaccccgactgctttggctgcgcatccccaattggcttcgttccccgaatggtggagaacgactgatgcacatacgagaacgggagcaaccttcttcccgccactcctcgggatacctccactgttcgctccccccgcgcaaaatcacgacagtagcagcttccactccaggacctcgggtaagtccaatagaaatggaccagaaaaaggggtgaacggcagcatcaatgggagcaacactagctctgtcattggcatcaatacgtcggtgctgtctacaaccgcctcaagttcgatgggacagactaaaagcacctccagtggcggcggcaacagaaagtgcaatcaggagcaaagcaagaatcagcccttagatgcccgggtggataagattaaggacaagaagcccagaaaaaaggccatggagagcagttccaattcagactccgatagtgggaccagcagtgacacaagttccgagggtatctcaagttctgactcagacgacctcgaggaagacgaggaggaagaagaccagtctattgaggagtctgaagatgacgacagtgatagtgaatcggaggcacagcataaaagcaataatcaggtgctcctgcatggaatatccgatcctaaagctgatggacagaaagcaacagagaaggcacaggagaaacggatacaccagcccctgccgctggccagcgagtctcagactcacagttttcagtcccagcaaaaacagcctcaggttctctcccaacagcttccttttatctttcaatccagccaagcaaaagaggagtctgttaataagcatactagcgtgatccagtcgacaggtttagttagtaatgtcaaaccactgtcattagtgaatcaggctaagaaggagacttatatgaagctgattgtgcccagtccagatgtattaaaagcaggcaacaagaacacttcggaagaatcttccctattaaccagcgagttaaggtcgaaacgagaacagtataaacaggcgttcccaagccagctcaaaaaacaagaatccagcaaatctctgaagaaagtgatagctgcactgagcaacccaaaggctacctcttcctcccctgctcatcccaagcagaccctggagaacaaccatccaaacccattcttgacaaacgctttgctcggaaaccaccagcctaatggagtgatacagagcgttattcaagaggccccgcttgcattgactaccaaaacgaaaatgcagagcaagattaacgagaatatcgccgcagccagttccacccctttctcctcccctgtgaacctttctaccagcggtaggcgcactcctggcaatcagactcccgttatgccaagcgccagtcccatcttgcatagtcaaggcaaagagaaagccgtgtccaacaacgtgaacccagtcaaaacacagcaccactctcacccagcaaagagtcttgttgaacagtttagggggactgactctgatattcccagttccaaggacagtgaagactccaacgaagatgaagaggaagacgatgaagaggaggatgaggaagatgatgaggatgacgagtcagatgactctcagagcggcacttctaaacgaaggcgcgttaccgacgaacgggagcttaggatccctcttgagtacggctggcagcgcgagactcggatcaggaacttcggaggccgacttcagggcgaagtcgcgtattatgcaccttgcggtaaaaaactgaggcagtaccccgaggtgataaagtatcttagtagaaacgggattatggatatctcacgcgacaattttagcttctctgcaaagatccgcgtgggagacttttatgaggcgcgggacggcccacaggggatgcagtggtgtctgctcaaagaagaggacgtaattccaagaatcagggctatggaaggaaggcgcggccgccctcctaaccccgataggcaaagggctagagaagagtccaggatgaggaggagaaaggggcgccctccgaatgtggggaacgcagagtttctagacaacgcagacgctaagcttctgcgcaaattgcaggcccaggagatcgcacgccaggcagcccaaatcaagctcctccggaagctgcagaaacaggaacaggctagggtggctaaggaggccaaaaagcagcaggctattatggccgctgaggagaagagaaagcaaaaggagcaaattaaaataatgaaacagcaagagaaaatcaaacgcatacagcagattaggatggagaaggagctaagggcccaacagatcctggaggctaagaaaaaaaaaaaagaggaggcggccaacgccaaacttctggaagccgaaaagaggatcaaggaaaaagagatgcggaggcagcaagccgtgctgctgaagcaccaggagcgtgagaggcgccgacaacatatgatgctaatgaaggccatggaggcgcggaagaaagcagaggagaaagaacggctgaaacaggaaaaacgcgatgagaagcggctgaacaaggaacggaagcttgaacagaggcggctggagctggaaatggccaaggaactcaaaaaacccaatgaagatatgtgccttgctgatcagaaacccctgccagagttaccgcggatacctggactggtcctgtctggcagtacattttcagactgcctcatggtagtccagtttcttcggaatttcggcaaggtgttgggcttcgacgttaacatagatgtacctaacctgagcgtactgcaggaaggccttcttaacataggagactcaatgggggaggttcaggatctcttggttcggctgctaagtgccgctgtttgtgatcccgggctgatcactggatacaaagccaaaacagcgctaggcgagcatctacttaatgtgggcgtgaaccgggataatgtgtctgagatattacaaatttttatggaggcacattgtggccagactgaactgactgagtcgcttaagacaaaggcctttcaggcccacacccctgcccaaaaggcctcagttctggccttcttgattaacgagctcgcttgcagtaagagtgtcgtcagtgagatagataaaaacatcgattatatgagcaatcttaggcgggataagtgggtagtggagggtaaactgaggaagctgaggataatacacgcaaaaaagaccgggaagcgtgacactagcggagggattgacctcggagaggagcagcacccacttggcactccgacacccgggcgcaagaggcggcgcaaaggaggggactcagactacgacgatgacgatgacgacgatagtgatgaccagggcgatgaggacgacgaggatgaggaggataaggaagataagaaaggtaaaaagacagatatttgtgaagacgaggacgagggtgaccaggcagctagcgtggaagagctggagaagcagatcgagaagctgtcaaaacaacagtcccagtatcgtcgaaagctgtttgacgcaagtcacagcctcagatccgtcatgttcggacaagaccgttaccggcgcagatattggattttaccacagtgcgggggtatctttgtagagggcatggaaagcggcgagggcctggaagaaattgccaaagagagagagaaactgaagaaggccgaatctgtgcagattaaggaagagatgttcgaaacttcaggcgattctttgaattgttctaataccgatcattgcgaacagaaggaggacctgaaggagaaagacaataccaatctcttcttgcagaagcctggaagtttctcgaagctttccaagctcctggaggtggccaagatgcctcctgagtctgaagtaatgacccctaaacccaacgccggcgccaatggctgcacgttgtcttatcagaacagtggaaagcactcactcggatcagtgcagtcaaccgcaactcagtcaaatgtggagaaagctgattccaacaatttatttaatacaggttcttctggtcccggcaagttctattccccactgccaaatgaccaacttctgaagactctgactgaaaaaaaccggcagtggtttagcttattgccccgcactccttgcgatgatacttccctgacccacgcggatatgagcaccgcttcactggttaccccccagtcccagccccctagcaagagtccctcacccacaccggccccgctcggatcctctgctcagaaccccgtcggattaaacccattcgccttatctcctttacaggtaaaggggggcgtatcaatgatgggattgcagttctgtggctggccaactggggtagtcacttcaaacatcccttttacttcctcagttccctccctcggcagtggcctgggactcagcgagggtaacggaaactcttttttaaccagcaatgtggcttctagcaagtctgaaagtccggtgccccagaacgagaaagccacttctgcgcaacccgctgctgtggaggtggcaaagccagtcgactttccttcgcccaaaccgatcccagaagaaatgcaattcggctggtggagaattattgacccagaggatttgaaggccctcctgaaagtactgcatctgcgcggcataagggagaaagcactccaaaaacaaattcagaagcatctagactacataacccaggcatgcctgaagaacaaggacgttgccatcattgagctgaacgagaatgaggaaaatcaggtgaccagggacatcgtggagaattggtccgtggaagaacaagccatggagatggatctgtctgtcctgcagcaagtggaagacctggaacgacgggtggctagtgcctctctccaggtcaaaggatggatgtgtccagaaccagccagcgagagagaggatcttgtgtatttcgagcataagtcatttaccaagctgtgtaaggaacacgatggcgagttcaccggtgaggatgaatcatcagcccacgcgttggagaggaagtccgataatccactcgacattgccgttacgaggctagccgacctggaaaggaatatcgaacggcgtattgaagaggatattgcacccgggcttcgcgtctggcgacgcgccctgagtgaagccagatccgcagctcaggtggcattgtgcattcagcagctccagaaatccattgcttgggagaagagcataatgaaagtgtattgtcaaatctgcaggaaaggcgataacgaagaactccttttgctgtgcgatggctgtgataagggatgccacacgtattgccatcggcccaagatcactactatccctgatggagattggttttgtcctgcctgtattgccaaggccagtggccaaacactgaagataaaaaagctgcatgtgaaaggcaaaaagacaaacgagagcaagaagggaaagaaggtcaccctgaccggggatacggaagacgaagattcagctagtacgtcatcctctctcaagcgaggaaacaaggaccttaagaaacgaaaaatggaagaaaatactagcattaacctgagcaaacaagaatctttcacgtctgtgaagaagccgaaacgagacgactccaaagatctcgctctctgttccatgatcctgacagagatggaaacgcatgaggatgcatggcccttcctgctcccggttaatctcaagctcgtccccggctataagaaagtgatcaagaagcccatggacttttcaacaataagggaaaagctgtcctccggacagtaccccaacttagagacttttgccctcgatgtcaggctggtattcgacaattgcgaaacattcaacgaagacgatagcgatatcgggcgcgcaggtcacaacatgcgcaaatatttcgagaagaagtggaccgataccttcaaggtatcttag

SEQ ID NO: 180779 - DNA, 6405 bp, synthetic construct
  misc_feature 1..6405: note = Description of Artificial Sequence: Synthetic coding sequence
  source 1..6405: mol_type = other DNA
atggagagcggcgagcggctgcccagcagcgccgccagcagcaccacacctacttcaagctcaactccatctgtcgcctctgtcgtctctaaagggggattaagtactggcgttgcttctttgtcgagtacaatcaacccatgcggacacctgttcagaacggctggagatcaaccatttaacctcagcacagtctcctctgctttcccaatggtgagtcatcccgtatttggtttacatagcgcaagctctggacatagcgagttcggaggcctcggcaccctcggcacccctaccgctctggcagcccatccccagcttgccagcttcccaggcgccgaatggtggaggaccaccgacgcccataccaggaccggagccaccttttttccaccgttgctcggcatccccccgctatttgccccacctgcacaaaatcatgactcttccagcttccacagcagaacctccgggaagagcaatcggaacgggccggagaaaggcgtcaacggctcaatcaacggcagcaatacttctagcgtgatcgggataaacacctccgttctgtctaccactgccagcagctctatgggtcagacaaaaagtaccagctctggcggcgggaatcggaaatgcaatcaggagcagagtaagaaccagccactcgacgccagagtggacaagattaaggataaaaaaccccgcaagaaggcaatggaaagctcttctaattccgactccgactctggcacctctagtgacacaagtagcgaggggatctcctctagcgactccgacgacctggaggaggatgaggaggaagaggaccagtctatagaggagtctgaggatgacgactctgattccgaatccgaggcccagcacaagagcaacaatcaggtgcttcttcacggaattagtgatccaaaggccgacggacagaaagccacggaaaaggcccaagagaagcgcattcatcagcctctgccgctggcgtccgagagccaaacacattctttccagagccagcagaagcagcctcaagtcctgtcccaacagctaccgttcatctttcagagttctcaggctaaggaggaatcggtcaacaaacacacctctgtgattcagagtactggcctagtgagtaacgtcaaacctcttagcctggtaaaccaggctaaaaaagaaacctacatgaagttgatcgtgccctcacccgacgttcttaaagcaggcaataaaaatacgtccgaagagagctcactcctaacctccgagctccgatctaagcgagagcaatacaaacaggctttcccaagtcagctgaagaaacaagagtcgagcaaatcgcttaaaaaagtgatagccgccctctctaacccgaaggccacttcatctagtccagcgcaccccaagcagacgctggagaacaaccatccaaatcccttcctcacaaacgccctcctgggcaaccaccaaccaaacggtgtaatccagagcgtcattcaggaggcacctcttgcactgactacgaaaacgaagatgcaatctaagattaatgagaacatagcggccgcctcatctactcccttttcctctcctgtaaatctgtctacaagcggacgaagaaccccagggaaccagacaccggtcatgccttctgcttctccaatcctccacagccagggtaaagagaaggcggtaagcaataatgttaaccctgtcaagacccagcaccattcccaccctgctaagtcccttgtcgagcagttcaggggaaccgacagcgacattccatcatccaaagactctgaggattccaacgaggacgaagaggaggatgacgaggaggaagacgaggaggatgacgaagacgacgaaagcgacgattctcaatctgagtccgatagcaactccgagtcagacacagagggctccgaagaggaggatgatgatgataaggatcaggatgaaagcgactcagacactgaaggggaaaagaccagtatgaagctcaacaagaccacttcttccgtgaaaagtccttccatgtccctaacggggcatagcacgcccaggaatctccacattgcaaaggcccctggcagcgcacccgcagccctttgcagcgaatcccagtcccccgcttttcttgggacctctagcagcaccctgactagcagcccacattctgggacctccaagcgcaggcgggttacggacgagagagagttgaggatccccttagaatacggctggcagagagagacaagaattaggaactttggcggtcgactgcaaggggaagttgcttattatgcaccttgcgggaagaaattaagacagtatcccgaagtgattaagggaatgcaatggtgcctcctgaaggaagaggatgtgatccccagaatacgcgccatggaggggcgacggggacgcccaccaaatccggaccgacagcgggcccgggaagagtcccgcatgcgaagacgcaaggggagaccaccaaatgtcggcaatgctgagtttttggataacgccgacgcaaaactcctccggaagctccaggcccaggagattgcccgccaggcggctcaaattaagctgctaagaaaattacagaagcaggagcaggctcgggtggcgaaggaggcaaagaaacaacaagcaataatggccgccgaagaaaagagaaagcagaaagagcagataaagatcatgaagcaacaggagaagatcaagagaattcagcagataagaatggagaaggagctgagggcccagcaaatattggaagctaaaaaaaagaagaaagaagaggcggcaaatgccaagttgctggaggccgaaaagcggatcaaggagaaagagatgagacgacaacaggccgtgttactcaaacatcaggaacgggagcgacgcagacagcatatgatgctgatgaaggccatggaagccaggaagaaagctgaggagaaggagcgactcaagcaggaaaaacgcgacgaaaaaaggctgaataaggagagaaagttagagcagcgacggctggagctggaaatggcaaaagagctgaagaaacccaatgaagacatgtgtctggcagatcagaaaccattaccagagctgcccagaattcccggcctggtcttatcggggtcaacctttagtgactgtcttatggtcgttcagtttctccgaaactttggtaaggtgctcgggtttgatgtaaacatagacgtgcctaatttaagcgtgctgcaggagggactgctgaatattggagatagcatgggtgaagtgcaggacctgctggttcggctcctttccgctgccgtgtgcgacccgggattaatcactgggtataaggccaagaccgctcttggtgaacacctcttgaatgtcggagtgaatcgcgataatgtttcagaaatcctccaaattttcatggaggcccattgcggccagaccgagttgacagaaagtttgaagacgaaggccttccaggcacacacccctgcgcaaaaggccagcgtcctcgccttccttatcaacgagctggcttgcagcaagagcgtggtctctgaaatcgataaaaatatagactacatgtctaacttaaggcgcgataaatgggttgttgagggcaaactcagaaaactgcggatcattcatgccaagaaaactggaaaacgtgataccagcggagggatcgatctaggcgaggagcagcacccactggggacgcccacgccgggtaggaagcggaggagaaaggggggggacagtgactatgacgatgacgacgacgatgactccgacgaccagggcgatgaggatgatgaggacgaagaagacaaagaggacaaaaagggcaaaaagactgatatttgcgaggatgaagatgagggtgaccaggccgcaagcgttgaggagctggagaaacagatcgaaaagttgtccaagcagcagagtcagtaccgtcgcaagctgtttgacgcttctcatagtctgaggagcgtcatgtttggacaagatcgttaccgccgacgctactggattttacctcaatgcggcggcatcttcgttgaggggatggaaagcggcgagggcctcgaagaaattgctaaagaacgcgagaagctcaagaaggccgagtctgtacaaataaaggaggaaatgttcgagaccagcggggactcactcaactgttctaacacagaccattgcgaacagaaagaagacttgaaggagaaggacaacaccaacctgtttctccagaagcctgggtctttttcaaaactcagcaagctgttggaggtagcaaagatgccgcccgagagtgaggtcatgactcccaaaccaaatgccggagcaaatgggtgtactctttcctatcagaacagcggcaagcactcactggggagcgtgcaatctacagctacccaaagtaatgtggagaaagctgatagtaacaatctgttcaacactggctcaagtggaccgggaaagttctactctcccctgcccaacgatcagcttcttaagactctgactgaaaagaataggcagtggttttccctcttaccgcgaaccccttgtgacgacacttcactgacacacgctgatatgtccactgcaagtctggtcaccccacagagccagccacctagcaagtcccccagccctacacccgcccctctcggctccagtgcccagaaccccgttggactcaacccattcgccttatctcccctccaggtgaagggcggcgtatctatgatgggtctccagttctgtggctggcctacaggcgtggtgacatccaacatcccctttacaagttccgtaccctccctgggctctggcttgggcctttcggaaggtaatggaaacagttttctcacatcgaacgtggctagtagcaagagtgaaagccctgtgccgcagaacgagaaggccacgtccgcccagccagctgcagtggaagtagcaaaacccgttgattttcctagtcccaagcccatcccagaagaaatgcaattcggatggtggcgcatcatagatccagaagatctgaaagcactgctgaaagttctgcacctgcggggcatccgggagaaggctctgcaaaaacagatccagaaacatcttgattacatcacacaggcctgtctcaagaataaggacgtcgccatcatcgaattgaatgagaacgaggagaaccaggtgacacgggatatcgtagaaaactggtctgtagaagagcaggccatggaaatggacctctcagtactgcagcaagtagaggatctggagcggcgagtggcatccgcttcgctccaggtgaagggatggatgtgtcctgagcccgcttccgaaagggaagatttagtgtactttgaacataaaagtttcaccaaactttgcaaagaacatgacggagaattcactggcgaggatgaatcttctgctcacgctctggagcgaaagagcgacaatcccctggatattgcagtcacgcggctcgctgatctggagagaaacattgagcgccgaattgaagaagacattgcgcccggcctgcgagtttggcgccgagctcttagtgaggctcgatccgctgcccaggtcgctttgtgtatccaacaactgcagaaatcaatcgcatgggaaaaatcaatcatgaaagtctattgtcagatttgcaggaaaggagataacgaggagctgctgctcttatgcgatggttgtgataaagggtgtcacacctattgtcatcggccgaaaattactaccatacccgatggagactggttctgtccagcatgcattgcgaaagcttctggccagacactaaaaataaagaagctacatgtgaaaggaaagaagaccaatgagtcaaagaaagggaagaaagtcacactgacaggggatacggaagacgaggactccgcctctacatcttctagcctgaaacgcggcaataaggacctgaaaaaaagaaagatggaggaaaatacttctattaacttaagcaagcaggaatccttcaccagcgtgaagaagcccaaacgtgatgactcaaaggaccttgcgctgtgctctatgattttgacggagatggaaactcatgaggatgcctggccattcttgcttccggtgaaccttaaattggtgccgggatataaaaaggtcatcaaaaaaccaatggatttctctactatcagagagaagctgagctcaggacagtacccaaacctggagacattcgcactggacgtaagactcgtatttgataattgcgaaacgttcaatgaggacgattctgacattggcagggctggccataacatgcgcaagtatttcgagaagaagtggactgacacctttaaggtttcttag

SEQ ID NO: 180780 - DNA, 6399 bp, synthetic construct
  misc_feature 1..6399: note = Description of Artificial Sequence: Synthetic coding sequence
  source 1..6399: mol_type = other DNA
atggagagcggcgagcggctgcccagcagcgccgccagcagcaccaccccaacttcttcatccacacccagcgtggcttcagtcgtttcaaaaggtggcctgtctacgggggttgcctcactgtccagtacaatcaacccatgcggccacctcttccgcactgccggtgaccaaccctttaacttatccacagtctcctcggcctttcctatggtctcccatccagtttttggattgcactccgcgtctagtggccactctgaattcggagggttgggaaccttggggactcccactgctctggccgcccacccgcagctcgctagcttcccagagtggtggaggaccacagacgcccacacacgaaccggggccaccttcttccccccactgctggggataccacctttattcgccccgccagcacagaatcatgactcctcaagtttccattctaggacgagtggcaagtccaaccgcaacggccccgagaagggcgtcaatggctcaattaacgggtcaaatacgagttcagtgatagggatcaacacctccgtacttagtaccactgccagcagcagtatggggcagaccaaaagtacttccagtggcgggggcaatcgaaagtgcaaccaggagcagtcaaaaaaccaacctttggatgccagagtggataagattaaggacaaaaagcctagaaaaaaagctatggaaagctcctcaaatagcgactccgattccgggacatcgagcgatacttctagcgaagggatcagctccagcgatagcgatgacctagaggaagacgaagaggaggaggaccagagtattgaagaatctgaagacgacgactccgactcagagagcgaggcccagcacaagtcgaacaaccaagtgctgctgcacggcatctccgaccctaaggccgatggccagaaggccacggaaaaagcgcaagagaagcgcatacaccaacccctcccactggctagcgagtcccagacccactcctttcagagtcagcaaaagcaacctcaagtgttatcccagcagctgccttttatcttccagagctctcaagcaaaagaggaaagcgtgaataaacatacgtccgtcatccagagtaccgggctggtctctaacgtcaagcctctcagtctcgtgaaccaagcgaaaaaggagacttacatgaagcttattgtccccagcccagatgttctgaaagcgggcaataagaatactagtgaggagtcctccctgctgacgagcgagctcaggtccaagcgcgagcaatataaacaggcgttcccctctcagctgaagaagcaggagtcctccaagtctctgaagaaggttattgcagccctgtcaaacccgaaagctaccagctcgagccctgcccatcctaagcaaacattggagaacaatcatccaaatccgttcctcacaaatgccctgctgggcaaccatcaaccgaacggagtgatccagtccgtgattcaagaggcaccccttgccctcaccacaaaaactaagatgcagtccaaaattaacgagaatattgcagccgccagctctaccccattctcttcaccagtgaatcttagcacctccgggcggagaacccctggaaatcaaacccctgtcatgccatcggcctcccctatactgcatagccaaggaaaagagaaagccgtcagcaacaacgtgaacccggtgaaaacccagcaccattcccaccccgccaagtcactcgtcgaacaatttcgcggcactgatagcgacatcccaagttccaaggactcagaggactcaaacgaggatgaggaagaagatgatgaagaggaggatgaggaagatgacgaggatgacgaatccgatgattctcagagtgagagcgactcaaattctgagtcagacaccgagggaagcgaagaagaagacgatgacgataaagaccaggacgaatctgatagtgatactgagggagaaaagacatctatgaagctcaataagacgaccagctccgtcaaatcaccgtctatgtctctcaccgggcatagtacgccgagaaacctgcacatcgcaaaggcacctggttctgcacccgccgccttatgttctgagagccaatctccagccttcctgggaacttcttcctcaactctgacatcatccccccactccggaactagtaaacggcggcgagttactgacgaaagggaactgcgaattcctctagaatacggttggcagagagaaactcggatccggaacttcggagggaggctgcaaggagaggtggcctactacgctccatgcggcaagaagctgcggcagtatccagaagtcataaagggcatgcaatggtgtcttttaaaagaggaggacgtgatcccccggatccgagcgatggaggggcgccgcggccgccctcccaaccccgatcgccagcgggcccgcgaggagtctagaatgaggcggcgcaaggggagacccccaaacgtaggaaacgccgaatttctggacaacgcagacgccaaactgctccggaagctgcaggcgcaggagattgcaagacaggcagcccagatcaagctcctacgtaaattacagaagcaggagcaagctcgggtggcaaaggaagctaagaaacagcaggcaatcatggcagctgaggagaagcggaagcaaaaagagcagatcaagataatgaaacagcaggaaaaaatcaagcgtatccaacaaatcaggatggagaaggaattgagggctcagcaaatccttgaggctaaaaagaagaaaaaggaggaagctgctaacgccaagttgttagaggcggagaaacgtataaaggaaaaagagatgcggagacagcaggcagtgctgcttaagcatcaggagagagagagacgtcgacagcacatgatgctgatgaaagccatggaagccaggaaaaaggcggaagaaaaggagcggcttaagcaggagaagagggacgaaaaaagattgaacaaagagaggaagcttgagcaacgaagacttgagctcgagatggctaaagagcttaaaaagccaaatgaggacatgtgcctggcagaccagaagcccctcccagagcttcccaggatacccggtttagtgctgagtggctccacattcagcgactgtcttatggtggttcagtttctgcgcaattttggtaaggtcttaggtttcgatgttaacatagatgtgcccaacctttctgttctgcaggagggacttctcaatattggcgactctatgggcgaggtccaggacttgctggtccgcctgctgtcggcagcagtatgcgacccaggtctcattaccggctataaggcaaagaccgcacttggggaacacctgttgaatgtcggggtcaatcgagacaatgtgtccgagatcttgcagatattcatggaggctcactgcgggcagaccgaattaacagaatctctgaagacaaaagccttccaggctcacacacctgcgcagaaagcaagtgtgctggcctttctgattaacgagctcgcttgctcaaaatctgtcgtgtcagaaattgataaaaatatcgactatatgtctaatttaaggcgtgataagtgggtagttgagggcaagctgcgcaaactgagaatcattcacgccaagaaaacaggaaagcgcgacacatccggaggaatagacctgggtgaggagcaacacccactggggacgcccacaccaggccgaaaacgcaggaggaagggcggtgattccgattatgatgacgatgacgacgatgattctgacgatcagggggatgaagacgacgaagacgaggaagacaaggaggataaaaagggaaaaaagacagacatatgtgaggacgaggatgagggagatcaagccgcaagcgtcgaggagctggaaaagcagatcgaaaaactgagcaagcaacaaagtcagtacagaagaaaactgtttgatgctagtcactcactgagaagcgtgatgtttgggcaggaccgttaccgtagaaggtactggattttaccccaatgtggggggatctttgtcgagggaatggaatcaggagaaggcctcgaggaaatagcaaaggaaagagagaaactaaaaaaggcagagagtgtacaaattaaagaagaaatgtttgagactagcggggactccctcaactgttcaaataccgatcattgcgaacagaaagaggacctgaaagaaaaggataacacaaatctatttctgcagaagccagggtcattttctaaactgtcgaaacttcttgaagtggccaagatgccacccgagtcagaagtgatgacccccaaaccaaatgctggggctaatgggtgcacacttagctaccaaaactccggaaaacattctctcggttccgttcaatcaaccgcgacccagtccaatgttgagaaggcagacagcaataatctgttcaacaccggatcttctggccctggtaagttctatagcccactgcctaacgatcagcttctcaagaccttaaccgaaaaaaatagacagtggttctcactcctcccgcgaactccgtgcgatgacaccagtttgacacatgcggacatgtctacagcgagcctagtaactccacagtctcagcctcctagcaaaagtccctccccaacaccagcccccctcggatcttcagctcagaaccccgtggggctaaatccttttgcactgtcacccctccaggtgaaggggggcgtctcgatgatggggctgcagttttgcggatggccaacaggggtggtgacttccaatattcctttcacatcgtctgtcccgtcactgggaagtggactaggtctatcagagggcaatggtaattcatttctaacttctaacgttgccagctcaaagagcgaatccccggtaccccagaatgagaaggcgacttcagcccaaccagcggctgtcgaagtagcaaaacccgtggacttcccatctccaaaacccatcccggaagagatgcagtttggatggtggcggataatcgatccagaagacctcaaagccctcctgaaggtgttgcacctccgaggaattagggagaaagccctgcagaaacagatccagaagcaccttgactacatcacgcaggcatgcctgaagaacaaggatgtggctattattgaactgaatgagaacgaggaaaaccaggttacacgagacatcgtcgaaaattggtccgtggaagagcaggccatggagatggatctaagtgttttgcaacaggtagaagaccttgagcgacgcgtggcctccgcttccttacaggtaaagggatggatgtgccccgagccagcatccgaaagagaggacctcgtgtattttgagcacaagagcttcacgaagctgtgcaaagagcacgacggagagtttacaggtgaggacgaatcttccgcacacgctctcgagaggaaatcagacaacccattggatattgccgttactagactggcggacttggaacgcaacatcgaacggcgaatcgaagaagatatcgccccaggattgagagtgtggcgtcgagccctttccgaggcacggtccgccgcacaggtggcactgtgcatccagcagctgcaaaaatccatcgcctgggagaagagcatcatgaaagtctattgtcagatctgccgaaaaggagacaacgaagagctgctcctactttgcgacggatgcgacaagggctgccatacgtactgccacagacctaagattaccactatcccagatggagactggttttgccctgcttgcatcgcgaaagccagtggtcagacactaaaaattaagaaactgcacgtgaaaggcaaaaaaaccaacgaaagcaagaagggtaagaaggtcacacttaccggagacacagaggacgaagatagtgcctctacaagttcctctttgaagaggggcaacaaagatctgaagaaacgcaagatggaggaaaacacatccattaacctgtctaagcaggaatcttttacatcagtcaaaaaacctaagagagatgactcaaaggatcttgccctgtgtagcatgatcctgacagagatggaaacccacgaggatgcttggcccttcctgctccctgtgaatctgaagttggtgcccggctataagaaagttataaagaagccaatggatttcagcacaataagggagaaactttcctcaggccaataccccaacctggaaaccttcgctctggacgttcgcctcgttttcgataactgcgaaacatttaacgaggatgactcagatattggccgcgcaggacacaatatgagaaaatattttgaaaagaaatggactgatacatttaaagtctcctag

SEQ ID NO: 180781 - DNA, 6507 bp, synthetic construct
  misc_feature 1..6507: note = Description of Artificial Sequence: Synthetic coding sequence
  source 1..6507: mol_type = other DNA
atggagagcggcgagcggctgcccagcagcgccgccagcagcaccactcccacctctagcagcacaccctctgtggcctctgtggtctctaaggggggcctatccaccggcgtagcctccctttcttccaccatcaacccatgtgggcacctgttccgcactgccggggaccaaccatttaacctttccaccgtgagcagtgccttccccatggtgagtcaccccgtattcggtctccatagtgctagttctggtcactcagaattcgggggcctcggcaccctgggcactccaactgcactggcagcccatcctcagttagcaagctttccaggagccgaatggtggcgtacaacggatgcccatacacgaaccggcgccactttcttccctccgctactggggataccacctctgtttgcgccccccgcacagaaccacgattcttctagcttccacagccgcacatcggggaaaagtaaccgcaacggccctgaaaaaggtgttaacgggtcgatcaatggctcaaatacatctagcgtgattggaatcaacacatcagtgctgtcaactaccgccagttcttctatgggccagactaagagcacatcatcaggtggtggcaatcgcaaatgcaaccaggagcagtctaaaaatcaacctctcgatgccagggtcgacaaaatcaaggacaaaaagccgcgcaaaaaagccatggagtcatcaagtaatagcgatagtgacagtggcacaagcagtgatacatctagtgaaggtatatcatcctcagacagcgatgatctggaagaggacgaagaggaggaggaccagtccatcgaggaaagtgaggacgatgactcagactccgaaagtgaggcccagcacaaatctaacaatcaagtgctgttgcacggcatctccgaccctaaagctgatggccagaaggcaaccgaaaaggcccaggagaagcgaatccatcaacccctccccctggcctcagaaagccagacgcacagttttcaatcgcaacagaagcagccacaggtgcttagccagcagctgccttttatctttcaatcgagtcaagccaaagaagaaagtgtgaacaagcacaccagtgtgattcagtccacagggttggttagcaacgtcaaacctctgagcttggttaaccaagcaaaaaaagaaacctacatgaaattgattgttccgtcccctgacgttctgaaggctggaaacaagaatacatccgaggaatccagcctgctgacaagcgagctgcggtcaaaaagagaacagtacaagcaggctttccccagtcaactaaagaagcaggagtcttcaaaatcgcttaagaaggtaattgcggcactgagcaatcccaaagctacctcatcctccccagctcatcctaagcaaactcttgagaacaatcaccctaatcctttcctgaccaatgcgctgctgggcaaccaccaacccaacggtgttatccagtctgttattcaagaagccccactggcactgaccactaagactaagatgcagtctaagattaacgaaaacattgcagccgctagcagtaccccattttctagccccgttaatctttctacctcaggtcgtcgcacaccgggaaatcaaacaccggttatgccatctgcaagcccaattctgcactctcagggtaaggaaaaggcagtgtcaaataatgttaacccagttaaaactcagcatcatagccaccctgcaaaatcccttgtcgaacagttcagagggacagactccgatatcccctcttctaaggactctgaggatagtaatgaggatgaggaggaggatgacgaggaggaagatgaagaggacgatgaggacgacgaatctgatgacagtcagtctgagtccgattctaattccgagtcagacactgagggctctgaagaagaggatgacgacgataaggaccaagacgagtccgactctgacactgaaggcgagaaaacatcgatgaagctcaacaagactaccagctccgtaaaatctccctcaatgtctctaacagggcactcaactccgaggaacctacatatcgccaaagctccagggtctgcccccgccgccctttgcagcgagagtcaatcccccgcattcctcggtaccagcagctctaccctgacctctagcccacatagtggtacaagcaagcggagacgcgtcacagacgaacgcgagttacgcatccccctggagtatgggtggcagcgcgagacgcgcattagaaatttcggcgggcgcttacagggcgaggtcgcatactatgccccctgcggcaagaagctccgccagtatccagaggtgattaagtacctgagtagaaatggaatcatggatatttcccgggacaatttcagcttctctgccaaaatccgggttggtgatttctatgaagctcgggatgggccacaaggaatgcagtggtgcctgctcaaagaggaggatgttattccacggataagggcgatggaaggtagaaggggccggccacctaacccggaccggcagagagctcgcgaggagtcccggatgcgcaggcggaagggcagaccaccaaacgtgggtaacgccgagttccttgacaacgctgacgccaagttgctgagaaagctgcaggcacaagagatcgctcgacaggcagcccagattaaacttctcaggaaactgcaaaagcaagaacaggcacgcgtggctaaagaagccaagaaacagcaggcaatcatggctgccgaggagaagagaaaacagaaagagcagatcaagataatgaaacaacaggagaagattaagaggattcagcagatcaggatggagaaagagctccgcgctcagcaaatcctcgaggccaaaaagaagaagaaagaagaggcagccaacgcaaaacttctggaagctgagaaacggatcaaggagaaagagatgcggaggcaacaggccgtgctgctcaagcatcaggagcgcgagaggagaaggcaacatatgatgcttatgaaggccatggaggctagaaaaaaggcggaagaaaaagagcgccttaaacaggaaaaaagagacgagaaaaggctgaacaaggaacgcaaacttgaacagagacggctggagctagaaatggcaaaagagcttaaaaaaccaaatgaagacatgtgcttggccgaccagaagcccctgccggagttaccacggattcctgggctggtgctgagcggaagtaccttcagtgactgtctcatggtcgtgcagtttcttaggaattttggaaaggtactgggatttgatgtcaatatagacgtgcctaatttatccgtgctgcaggaggggcttctcaatattggggactcaatgggggaagttcaggatctcctggtcagattactgtcggccgcagtttgcgatcccggactgataactggatacaaggccaagacagccctgggagagcacttgctgaacgtgggcgtcaatagagataacgttagtgaaatcctgcagatcttcatggaagcccactgcggccagacagagcttacagaatccctgaaaacgaaagcgtttcaggctcacacacctgcgcagaaggcctctgttttagcattcctgatcaacgaattagcctgctctaaaagtgtggtgagtgaaatcgacaaaaacattgactatatgagtaatttgcgacgggacaagtgggtagtggagggcaaattgcgcaagttgagaatcattcacgctaagaaaaccggcaaaagggatacctccggagggatcgacctgggcgaggagcagcacccacttggaaccccaacacctggccgcaagcggaggcgcaaagggggagactctgactacgacgatgatgatgacgatgactcagatgatcagggcgacgaggatgatgaggatgaagaagataaggaggacaaaaaggggaaaaagacggacatttgcgaggacgaggatgaaggggatcaagccgctagcgtggaagagctcgagaaacagattgagaagctgagtaaacagcagtcccaatatcggcgaaaactctttgacgcctcccacagcttgagatccgtgatgtttggacaggataggtatagacgtagatattggattcttcctcagtgtgggggcatctttgtggaaggaatggagtccggcgagggcctggaggagattgcaaaggaaagggagaagctgaaaaaggctgagtctgtccaaattaaagaagagatgtttgagacatctggagactccttgaattgcagtaatacagaccattgtgagcagaaggaagatttgaaggaaaaagataacactaatcttttccttcaaaagccggggagttttagtaagctttccaaactcctggaagtggcaaaaatgccaccggagagcgaagtgatgacgcctaagcccaacgccggagccaacggttgcactctctcttaccaaaactcaggaaagcattccctgggctccgtgcagagtactgcaacacagtctaacgtcgagaaggccgatagtaataatctgttcaacacaggaagctcagggccaggcaaattttactctcccctgcccaacgaccagttgctcaaaacactgaccgagaagaacaggcaatggttttcactgctgcctcgcaccccctgtgatgatacctccctgacgcacgccgatatgagtacagcctccctggtcactccccagtctcagcctcctagcaagtcacctagtccaactccagccccgttgggttcatcggcacagaacccggtcgggctgaatcccttcgcactcagtccactccaggtaaaaggtggggtgtctatgatgggtctccagttttgcggctggccaactggcgtggtcacttctaacataccttttacgagtagcgtcccaagcctgggctcaggcttggggcttagcgagggaaacggaaactccttcttgacgtctaacgtagcctcatccaaatccgagtcccctgtgcctcagaacgaaaaggcaacctccgcgcagcccgctgctgtggaggtggctaaaccggtggattttccaagccctaagcccatccctgaggagatgcagttcggatggtggcgtataatcgatccagaagacttgaaggcgcttttaaaggtcctgcacctgcgtggcatccgcgaaaaagctcttcagaaacagatccagaaacatctggattatatcacccaagcttgtctcaaaaacaaagacgtggcaattatcgagctgaatgagaacgaagagaaccaagtgacaagggacattgtggagaactggtctgtagaagaacaggctatggaaatggatctctctgtccttcaacaagtagaagatcttgaacgaagagttgcttccgccagcctgcaggttaaggggtggatgtgtcctgaacctgcttcggagcgggaggacctggtttattttgagcataagtctttcaccaagctatgtaaggaacacgatggcgaattcaccggggaggatgaatcttctgcccacgcactcgaacggaaaagtgacaatcccctggacatcgccgtgacacgactggccgaccttgaacggaacatagagcgaagaatcgaagaagatatagcacccggcctccgagtttggcgcagagccttatccgaagcgagatctgccgctcaggtcgcgctctgcatacagcagttacagaagagcattgcctgggaaaaaagcattatgaaagtctattgtcagatatgcaggaagggagacaatgaggagttgttgcttctgtgtgatgggtgtgacaaggggtgtcacacatattgccacagaccaaaaattactaccatcccagatggggactggttctgtcctgcatgcattgcgaaagccagtggacagactcttaagattaaaaaattacatgtgaaagggaaaaagaccaatgaaagcaagaaaggaaaaaaggtcactctgacgggagacaccgaggacgaggattcagcctcaacgagcagttctctgaagcggggcaacaaagacctcaagaaacggaaaatggaagaaaacacctctatcaatctgtccaagcaggaatccttcacaagtgtcaagaagcctaagcgcgatgactccaaggatctggcgctctgctccatgatccttaccgagatggagacacatgaggacgcgtggcccttcctattgcctgtcaacctgaagctcgtcccaggctataagaaagtgattaagaagcctatggatttctccactattagagagaaactgtcctctggtcagtaccctaatttggagactttcgcactggatgtgcggcttgttttcgataattgtgagacattcaacgaggatgactctgacatcgggcgagcagggcacaatatgagaaaatatttcgagaagaaatggactgatacatttaaagtgtcttag

SEQ ID NO: 180782 - DNA, 432 bp, synthetic construct
  misc_feature 1..432: note = Description of Artificial Sequence: Synthetic coding sequence
  source 1..432: mol_type = other DNA
atggagagcggcgagcggctgcccagcagcgccgccagcagcaccacacccacctcgtcctctacaccttcagttgccagtgtggttagtaaaggaggcctcagcactggggtggcctctctctcttccaccataaacccgtgtgggcacctgtttcggactgccggggatcagcccttcaacctctctactgtgtcatcggcctttcccatggttagccacccggtgtttggcctgcactcagctagcagtggccacagtgaattcggcggactggggacacttgggactcctactgccctggccgcccacccacaattggcttctttccccggagctgaatggtggcgcacaaccgatgcgcatacaaggaccggcgcaaccttttttcctccactactagggataccacccctcttcgcccctccttag

SEQ ID NO: 180783 - DNA, 1563 bp, synthetic construct
  misc_feature 1..1563: note = Description of Artificial Sequence: Synthetic coding sequence
  source 1..1563: mol_type = other DNA
atggagagcggcgagcggctgcccagcagcgccgccagcagcaccaccccgacatccagctcaacccccagcgtcgcttctgtggtaagcaagggtggactgagcacaggggttgcctcgctctcgagcacgatcaatccttgtggggcagaatggtggcggacgaccgatgcgcatacgaggaccggcgctaccttcttccctccccttttaggaatccccccactctttgctccgcccgcacagaaccatgacagttcctcgttccatagtcggacttccgggaagagcaaccggaacggccctgaaaaaggtgtaaatgggagcatcaacggctctaatacttccagtgtaatcggcatcaacacctccgtcttgtctacgactgccagctctagcatgggtcagactaagagcacttcatcgggtggcgggaatagaaagtgcaaccaggagcagtccaaaaatcagcctctcgatgcacgcgtagataagataaaagataagaaacccagaaagaaggcgatggagtcgtcctcaaactccgattcagacagcgggacatcctccgatactagcagtgaaggaatcagcagctccgacagtgacgatctggaggaagacgaggaagaagaggatcaaagcatcgaggaatcagaagacgacgactctgattcggaatcagaggcacagcataagtctaacaaccaggtgcttctgcacggtatcagtgaccctaaggctgacggccagaaggctacggagaaggcccaggagaaacgcatccaccaacctctgcccctggcatccgagagtcagactcattcctttcagtcacagcaaaagcagcctcaggtgctgagtcagcagctgccgtttattttccaatcttctcaggctaaagaggagtccgttaacaagcacacaagtgtgattcaatctacggggttagtttcaaacgtgaaacccctgtcacttgtgaaccaagcaaaaaaggagacttatatgaagctcatcgtcccaagccctgacgtcctcaaggctgggaacaaaaatacaagtgaggagtcaagcctccttacttccgagcttcgatcaaagcgtgagcagtacaagcaggccttccctagccagctgaaaaaacaggagagttcaaagagccttaagaaagtcattgctgcactgagcaacccgaaagccaccagttcatcccccgcccatcccaagcagactctggagaacaaccaccctaatccctttcttactaacgcgctgttagggaatcatcagcccaacggcgtgatccagtctgtaattcaggaagcgccactcgccttaaccacaaaaacgaaaatgcagagcaaaatcaatgaaaacatagcagccgcatcctctactcctttttccagtccagtcaatctcagcacctctggaagacgtactcccggaaaccaaacaccagtgatgcccagtgctagtcctatcctgcacagccagggcaaggagaaagccgtgtccaacaatgtgaatccccgcaagatgatgaagaaaaagatgcgctag

SEQ ID NO: 180784 - DNA, 3645 bp, synthetic construct
  misc_feature 1..3645: note = Description of Artificial Sequence: Synthetic coding sequence
  source 1..3645: mol_type = other DNA
atgggcgtggacttcgacgtgaagaccttctgccacaacctgcgggctaccaagcccccctacgaatgtccagtcgagacttgccggaaggtctataaatcatactccggcattgaataccatctttaccactacgatcatgataacccacctccgcctcagcaaacaccactaagaaagcacaagaaaaagggccggcaatccagacccgccaacaaacagtcgcccagtccgagcgaggtgagtcagtcccccggccgcgaggtaatgtcttatgcccaagcgcaacgtatggtagaagtggatttgcatgggagggtccataggattagcatctttgataacctggatgtggtgtccgaggatgaagaagctcctgaggaggcgccagaaaacgggtctaataaagagaacactgagacgcctgcggccacaccaaaaagcggaaaacataagaacaaagaaaaaagaaaagattcaaatcatcatcatcatcacaacgtgtccgcaagcactaccccgaagctgcccgaagttgtgtacagggagttagagcaggacacaccagacgcgccgccgagacctacaagttactatcgatacatagagaagagcgccgaggagctcgacgaagaagtcgaatacgatatggatgaagaggactacatttggctcgatataatgaacgagcgtcgaaagaccgagggcgtctcgcctatcccacaggaaatcttcgaatacctgatggaccgccttgagaaggagtcttatttcgaatcccataataaaggcgatcccaatgcccttgtggacgaggacgcagtttgttgtatctgtaacgatggcgaatgccaaaactcaaatgtgatccttttctgcgatatgtgtaacctggctgtgcatcaggaatgttacggcgtgccttatataccggaaggccaatggctgtgccgaagatgtctgcaatctccctctcgtgcggtggactgcgctctatgccccaataagggaggagcattcaagcagacagatgatggccgctgggcccacgtcgtttgcgccctctggattcctgaggtgtgcttcgcaaataccgtgttccttgaaccaatcgacagcattgagcatataccacctgctaggtggaagctgacgtgttatatttgcaaacagcggggctctggggcctgtattcagtgccacaaagccaactgctacacagctttccatgtcacttgcgctcagcaagcgggactgtatatgaagatggaaccagtgagggagaccggggctaatggcactagcttctcagttcgcaagactgcatactgcgatatccacacaccacctggaagcgccaggagattgccggctttgtctcactcagagggggaagaggatgaggacgaggaggaggatgaaggcaaggggtggagctcggagaaggttaaaaaggccaaagctaaatcccgaataaaaatgaaaaaagctagaaaaattctcgcagaaaagagagccgcggcacccgtggtgagcgtaccctgtatacccccacacaggcttagcaaaattaccaatcggcttactattcagaggaagtcgcaattcatgcaaagactccattcttattggactttgaaacggcagtctcgcaatggagtgcccttgctcaggcggctgcaaacccacctccagagtcagcggaactgcgaccaggtggggagagattctgaagacaaaaattgggcactaaaggagcaactgaaaagctggcagaggctccgccacgacctcgagcgagcgcggctgctagttgagctcattcgaaaaagggaaaaactgaagcgggagactataaaagtccagcagattgcaatggaaatgcagctgacgccttttttaattctgttgagaaagacattggagcagctccaagagaaagacacgggcaacatattcagtgaacccgtgcccctgagtgaggtaccagattatttggaccatatcaagaagcccatggacttctttacgatgaaacagaatctggaggcatatagatatcttaatttcgacgactttgaggaagacttcaatctcattgtctctaattgtctaaaatacaatgctaaggatacaattttttatagagccgctgttcggctccgagagcagggcggcgctgttcttcggcaagcccggcgacaagccgaaaaaatgggaatcgacttcgagacagggatgcatataccacatagtttagctggcgacgaagccactcaccacaccgaggatgccgcggaagaggagcgactcgtcttgctggaaaatcagaagcacctgccagtggaagaacagctgaagctgctgctggaacggttggacgaggtgaatgcaagcaagcaatcagtgggccggtcacggagggccaagatgataaagaaagaaatgacagcccttagaaggaagctggcccaccaaagagagacaggccgtgacggaccagagcgtcacggtccctcatcgcgcggcagcctgactccgcaccctgctgcatgtgacaaggatgggcagacagattccgctgccgaagagagttcatcgcaagagacctccaaaggtctaggtccaaatatgtcaagcacaccagctcacgaggtggggcggagaacctctgtacttttctctaaaaaaaacccaaaaactgcagggcctccaaaaagacccggcaggccacctaagaatcgcgaaagtcagatgacaccctctcacggcggttctcctgtaggcccaccacaactgcccatcatgtctagcctgcggcagcgcaaacgcggacgctcacctagaccaagctcctcgtccgattccgatagtgataaatcgaccgaggatcccccaatggatttgcctgccaacgggttctcgggagggaatcaacccgttaagaagtcattcctggtgtacaggaacgattgttccctcccgagatcttccagcgattccgagtcttcctctagctcctcttcttcagcagcctccgacaggacatcaaccacaccttccaagcaggggagagggaaaccttcttttagtcggggtactttccccgaggatagctctgaagacacttccggcaccgagaacgaagcctactccgtgggcaccggcagaggggtagggcattcaatggtcagaaagagtttagggaggggagctggctggctatcagaggatgaggattctcctctggacgctctggatttggtgtgggcaaagtgccggggctacccttcttacccggcactgatcattgaccctaagatgccacgcgaggggatgttccaccatggggtccccatacctgtgccacccctcgaggtactcaagctcggggagcagatgacacaggaggcccgggagcacctatacctggtcctgttcttcgacaataagcgtacctggcaatggcttccaagaaccaagctggtgcccctgggggtcaaccaagatctcgataaagaaaagatgctcgaaggccgcaagtccaacattcggaaatctgtgcagatcgcctatcatcgcgccttgcagcatcgttcaaaagtccagggggaacaaagtagcgagacatcagattcggattag

SEQ ID NO: 180785 - DNA, 3663 bp, synthetic construct
  misc_feature 1..3663: note = Description of Artificial Sequence: Synthetic coding sequence
  source 1..3663: mol_type = other DNA
atgggcgtggacttcgacgtgaagaccttctgccacaacctgcgggctacaaagcccccatatgagtgcccagtcgaaacatgtaggaaagtttataagtcatattctggcattgagtatcatctgtaccactacgaccacgataacccaccacccccccagcaaacccccctccgcaagcataaaaaaaaggggaggcagagcaggccagcgaacaagcagtcccccagtcccagcgaggtgtcccaaagtcctggacgcgaagtcatgtcttacgcacaggcacagcgcatggtagaggtggacctgcacggacgtgtccataggatctccatcttcgataacctcgatgtagtgtccgaggatgaggaggcccctgaagaagcgcctgaaaatggcagtaacaaggaaaatacggagactcccgccgcgacccctaagagcgggaagcacaagaacaaagagaaaagaaaggattctaaccatcaccaccatcacaacgtgagcgcatccactaccccgaaactccccgaagtggtataccgagaactggaacaggatactcctgatgccccacccaggccaacctcttattatcgttacatcgaaaagtccgctgaggagctcgacgaggaggtagaatacgacatggatgaagaggactacatctggctggacattatgaatgagcggagaaagaccgaaggcgtttcccctatacctcaggaaatctttgagtacttaatggacagattggagaaggagtcctacttcgaaagccacaacaaaggcgaccccaacgccctagtcgacgaagatgccgtgtgttgtatctgcaacgatggcgagtgccagaacagcaacgttattctgttctgcgatatgtgcaatctcgcggttcatcaggaatgttacggagtgccttacattcctgaaggccagtggctgtgtagacgctgtctgcagtccccaagcagggctgtcgactgcgccctttgccctaataaaggaggcgccttcaagcagacagacgacgggagatgggctcacgtggtctgtgcgctgtggattccagaagtctgcttcgcgaatacagtattcctggaacccattgactctattgaacatatcccccccgcacggtggaaattaacctgctatatttgcaagcaacgagggtccggggcttgtattcagtgtcacaaagctaattgttacaccgccttccatgtaacgtgtgcacagcaggccggactctacatgaaaatggaaccagtgagagaaaccggcgcaaatgggacttccttttcagtcaggaaaaccgcctattgcgatatccacaccccacctggctctgccaggcgtcttcctgctctaagtcattccgagggtgaggaggacgaggatgaggaagaggacgaggggaagggctggtcttccgagaaagtgaagaaagcaaaggcaaaaagtagaatcaaaatgaagaaggccaggaaaatcctggccgaaaaaagggcagcggctcctgtggtgagcgtaccatgcatcccgccccaccgcttgagcaagattaccaaccgcctgactatacagaggaagtcacagttcatgcagagactgcacagctattggacactgaagcggcagtcccgaaatggtgtcccactcctacgccgtctgcagacacatctgcagtctcagcgcaactgtgatcaggtcggcagagactcagaagacaaaaactgggcccttaaagaacagcttaaaagctggcagcgactgcggcacgatctggaacgagctcggctgctggttgagctcattcgtaagagagaaaagctaaagagggagacgattaaagtgcagcagattgccatggagatgcagttgaccccctttctgatcctgcttcgtaagacccttgagcagttacaggagaaagatacagggaacatcttttccgagcccgtgccattaagtgaggtgaccgagctggatgaggtgcccgactatctagatcacattaaaaagcctatggattttttcaccatgaaacagaatctggaggcatatcgctatctaaacttcgacgacttcgaggaagacttcaacctcatcgtatccaactgtctcaaatacaacgctaaggacaccattttctatagggcagccgtgcgtctccgcgagcaaggcggagccgtgctgagacaggcacgtcggcaggctgaaaagatgggaattgatttcgaaactgggatgcacataccccattctctggccggagacgaggcaacgcatcacacggaagacgccgcagaggaagagcgtttagtcctgctggaaaaccagaaacatctgccagtggaggagcagctaaagttgctccttgaacgacttgacgaggtgaatgctagcaaacagtctgtgggtagatctcggcgcgcaaagatgattaaaaaggagatgactgccctgcggagaaagttggcacaccagcgagaaacgggccgagatggccctgagcggcacggaccctccagtagaggctccctcacaccccacccagctgcttgcgacaaagatggccaaaccgactcagccgctgaggagagctcatctcaagaaacctcgaaaggcctgggcccaaacatgtccagcactccggctcacgaggtgggcagacggacctcagttttgttcagtaaaaagaatcccaagaccgctggaccacccaaacggcccggcagaccccccaaaaatagggagtcccagatgacccctagtcacgggggaagccccgtgggacccccacagctgccaatcatgtcctcactgaggcagaggaaacgggggcgtagtcctcggccgagcagttcgtcagattccgactccgacaagtcgacagaggatcctcccatggatttgccagccaacggatttagtggtggcaatcagccagtaaagaaatcattcctcgtatatcgtaacgattgttctctgcctcgaagttcatccgacagcgaatctagctcaagttcctcctcatcagcagcctccgaccgtaccagtactacccccagcaagcaaggtcgcggcaagccatcttttagccgcgggacctttcccgaggacagtagcgaggatacctcaggaacagagaacgaggcctactccgtgggcaccgggcgaggcgtggggcattctatggttcgaaagagcctaggaaggggagctggttggctctctgaagacgaagacagtccactggacgccctggatcttgtgtgggccaaatgcagggggtacccatcttacccagcactgattattgaccccaagatgccaagggaggggatgtttcatcatggtgtacccatccccgtcccccctctcgaagtactgaaactcggagagcagatgacgcaagaagctcgggagcatttgtatcttgtcttgtttttcgataacaagcggacctggcagtggctaccacgtactaagcttgtcccactgggggtaaatcaggatttggacaaggagaagatgttggagggacgtaagtcaaacatcaggaagagcgtgcaaatcgcctatcatagagctttgcagcaccggtcgaaagttcagggtgagcaatcatctgagacatccgactctgattag

SEQ ID NO: 180786 - DNA, 303 bp, synthetic construct
  misc_feature 1..303: note = Description of Artificial Sequence: Synthetic coding sequence
  source 1..303: mol_type = other DNA
atgggcgtggacttcgacgtgaagaccttctgccacaacctgcgggccaccaagccaccatacgaatgtcccgtcgagacatgcagaaaggtatataaaagctacagcggcatagagtaccacctatatcactacgaccatgacaacccccccccgccacagcagactcccttgcgcaagcataagaagaagggccgccagagcaggcctgcaaacaagcagagccccagccccagcgaagttagccagtcccccggtcgggaggttatgtcctatgctcaagcccagagaatggtggagtag

SEQ ID NO: 180787 - DNA, 318 bp, synthetic construct
  misc_feature 1..318: note = Description of Artificial Sequence: Synthetic coding sequence
  source 1..318: mol_type = other DNA
atgggcgtggacttcgacgtgaagaccttctgccacaacctgcgggctacaaagcccccgtatgaatgtcctgtggagacttgccgcaaagtctataagagttattctggcatcgagtaccacctataccattacgatcatgacaatccaccccctcctcagcaaacgccgcttaggaagcataaaaaaaaagggcggcagagtagacctgcgaataaacagagtccgagtcctagcgaagtatcccagagcccgggccgggaggtcatgtcatacgctcaggctcagcgcatggtagaagtggacctgcacggatag

SEQ ID NO: 180788 - DNA, 3645 bp, synthetic construct
  misc_feature 1..3645: note = Description of Artificial Sequence: Synthetic coding sequence
  source 1..3645: mol_type = other DNA
atgggcgtggacttcgacgtgaagaccttctgccacaacctgcgggcgacgaaaccgccttacgagtgccctgtagagacgtgtcgcaaagtttataagtcttactctggtattgagtaccacctctatcactacgaccatgataatccgccacccccgcaacagacaccactgcggaagcacaagaagaagggcagacagtcgcggcccgccaacaaacagagtccctctccttccgaggtcagtcagagtcccggcagggaggttatgtcttatgcacaggctcagcggatggtggaagtagacctccacgggcgagtgcaccggatctccatcttcgacaacctggacgtggtatcagaagacgaagaagcgcccgaggaggcacctgagaatggtagtaacaaggagaacacagagacccccgctgctaccccgaaaagcggaaaacacaaaaacaaagaaaagcgcaaggacagtaatcaccaccaccaccacaatgtgtccgctagcaccacacctaaactgcctgaggttgtgtaccgcgagttggaacaggatacacccgatgccccgccaagaccgacctcctattatagatatattgagaaaagcgccgaggagcttgacgaagaggtcgaatatgatatggacgaggaagactatatctggctggatatcatgaacgaacgtcggaagaccgagggagtatcaccaattccacaggaaatttttgaatacctgatggaccgcttggaaaaggagagctattttgaatcccataacaagggagatccgaacgctctggtggatgaagatgcagtgtgctgtatatgtaacgacggagaatgtcaaaactcaaatgtgatcctgttctgtgacatgtgtaacctcgcagtacaccaggaatgttacggggtgccctatatcccagaaggtcagtggctgtgcagacgctgcctacagtccccatctcgggctgtagactgtgccttgtgtcccaacaaagggggggcctttaagcagaccgacgacgggagatgggcccacgtggtctgcgcactctggatccctgaggtctgcttcgctaatacagtgttcctggagcctattgattccattgaacacatcccacccgctcggtggaagcttacctgctacatctgtaaacagcgtgggagcggcgcctgcatccaatgccacaaggcaaactgttacactgcatttcacgtgacctgtgcacagcaagccggtctatacatgaagatggagcccgtgcgggagacaggcgcaaatggcactagttttagcgtgcggaaaaccgcttactgcgacattcacacccccccagggtctgcacgacggctccctgctttgagccattcggaaggagaagaggacgaggacgaagaggaagatgaaggtaaaggctggagtagcgagaaggttaagaaggcaaaagcaaaatcacgcataaagatgaaaaaagcccgtaaaatcctggccgagaagcgagcagcagctcccgtcgtgtcagtgccctgcatcccaccccaccggctgtcaaaaattactaacagactgacaattcaacgcaaatcacagttcatgcaacgcctgcacagctactggacgttgaagaggcaaagtcgaaacggtgtaccactgttacggcgattgcaaacccatcttcaatctcaaaggaattgcgatcaggtcggtcgggacagcgaggacaagaattgggctctgaaggaacagctcaagagctggcagcgcttgcggcacgacctggagagagctagactcttggtcgagctgattagaaagagagagaagctcaaaagggaaacgatcaaggtccagcagattgctatggagatgcagctgaccccatttttgatcctcctgagaaagactctggaacaactgcaggagaaagacaccggaaatatcttctccgaacccgtgcccctcagcgaggtcccagattatctggaccatattaaaaaacctatggactttttcactatgaagcagaatttggaagcctatcgatatcttaactttgatgattttgaagaggactttaacctcattgtgagcaactgcctcaagtataatgccaaggataccattttttaccgggccgccgtcagactaagggagcaggggggcgccgtgttgcgccaggcccggagacaggccgaaaagatgggtatcgacttcgaaactggaatgcacatcccacactccctggcaggagacgaagccacacatcacacagaagacgctgccgaggaggagcgcctggtgctgcttgagaatcagaaacacctccccgtggaagaacagctaaaactgctgctggagaggttagacgaagtgaatgccagcaagcagagtgtgggacggtccaggcgggctaagatgatcaagaaggagatgacagctctgaggcggaagttagctcaccagagggagaccggccgagacggaccggagagacacggtccaagttcacggggatcacttacccctcatccagccgcctgcgataaagacgggcagaccgatagtgccgcagaggagtcttcatcccaggagacttcaaaagggctgggacccaatatgagttccacccccgcccacgaggtcgggcgtaggacatccgtgctgttcagcaaaaagaacccaaagacagcaggaccgcccaagaggccaggaaggccaccgaagaaccgagagagccaaatgacccctagccatgggggctcccctgttggcccccctcagctgccaattatgtcctcattgaggcaacgcaagcgcggcagaagtccaagaccctcctcctcctcagattctgatagcgacaaatctacagaggaccccccaatggacctcccggctaatggtttctcaggcggtaatcaaccggtaaagaaaagtttccttgtgtaccgcaacgactgttcgctgcctcgaagcagcagtgacagcgaatctagttcatcgtccagctcttctgccgcttctgaccgcacgtcaaccacacccagtaagcaaggacgtgggaaaccatcattctcaaggggaacttttcccgaagacagctccgaggatacatcaggtactgagaatgaggcatacagcgtgggaaccgggcgaggagtggggcactcaatggttcgcaaatcactggggcggggagcagggtggctatcagaggacgaagactctccgctggatgccttagacctggtatgggccaagtgcagaggctacccctcgtaccctgctctaatcatcgatcctaaaatgccacgggaaggaatgtttcatcacggagtgcctatccccgtgcctccactcgaggtactaaagcttggtgagcagatgactcaggaagcccgtgaacatctgtacctggtgttgtttttcgacaataaacgcacctggcagtggttaccacgtacaaaactcgttcctcttggagtcaaccaggatcttgacaaggagaaaatgcttgagggccgtaagagcaatattaggaaatctgtgcagatcgcttatcaccgcgccctgcagcaccgctcaaaagtgcagggtgaacagagtagtgaaacatccgactctgattag

SEQ ID NO: 180789 - DNA, 5409 bp, synthetic construct
  misc_feature 1..5409: note = Description of Artificial Sequence: Synthetic coding sequence
  source 1..5409: mol_type = other DNA
atggccgccgcccccacccagatcgaggccgagctgtactacctgattgcaaggtttttacaaagcggaccctgtaacaagtcagcgcaagtgctggtacaagagctagaggagcaccagctcattccccggcggctagattgggaaggtaaagagcatcgacggtctttcgaagacctcgtggctgcaaacgcacacattcctcctgattatcttctgaagatatgtgagaggattgggcctctcctcgacaaggagattccacagtccgtgccaggagtgcaaaccctcctgggagtgggtagacaatctttgttgcgcgatgcaaaggactgtaagagtacattatggaacggaagcgcctttgcagctctgcaccggggtcgtcccccagaactgcccgtgaattatgtgaagccccctaacgtggtaaacatcactagcgcaaggcagctcacaggttgttcccgcttcgggcacatattcccttcaagcgcttatcaacacattaagatgcacaagagaatcctgggtcacctgtcatccgtgtattgtgtggcattcgatcgctctggacgacgtatcttcaccgggtccgatgactgtttggtcaagatctgggccactgacgatggacgcctacttgccactcttcgaggacacagtgcggaaatcagtgacatggccgtaaactacgagaataccctgattgccgcaggctcctgcgataaggtggtgagagtctggtgcctcagaacatgcgcaccagtggcagtgctgcaggggcacagcgcctcaattacatctatacagttctgtccgtccaccaaagggaccaatagatacctgacatctaccggagctgatggcaccatttgtttctggcagtggcatgtgaaaactatgaaattccgggataggcccgtgaaatttacagagaggtctcgccccggcgttcagataagctgttccagtttctccagtggcggcatgttcattacaaccggcagcacagatcacgtgatccggatttactatctggggtccgaggtcccggagaaaatcgcagaactggagagtcacacagataaggtggttgccgtacagttttgcaataatggcgattccttgcgatttgtgtcaggctctagagacggcaccgcacgtatatggcaataccagcagcaagaatggaagagtatagtgttggatatggccacgaaaatgaccggcaataacctgccctctggggaggataaaatcacaaagcttaaagtaacaatggtggcttgggacagatatgatacaacagttattaccgcggtcaataattttctcctgaaggtgtggaatagcattactggacagctgctccatacactctccggacacgatgacgaagttttcgtattagaggcacacccttttgaccagcggatcatactcagcgcaggacacgacggaaatatctttatatgggacctggacagaggcacaaagataagaaattacttcaacatgattgagggacaaggacacggcgcggtctttgattgcaagttctctcccgacggcaatcatttcgcctgcaccgatagccacggacacctgctgttatttggtttcggatgtagtaagtattatgagaagatacccgatcaaatgttcttccataccgattatcggccactgatcagagatgcgaataactacgtgctggatgagcagactcagcaggcacctcacctgatgccacccccattcctcgtcgatgttgacgggaacccccacccaacaaagttccagcggctggttcccgggagggagaattgtaaggacgaacaactgatcccccagctaggctacgttgctaatggtgacggtgaagtagtggagcaggttatcgggcagcagaccaatgatcaggacgaaagcatcctggacggaataatcagagagctgcaaagggagcaggatctgaggctgattaatgagggggacgtgcctcatctgcctgtaaacagagcatactcagttaatggcgctcttcgctccccaaatatggacatttcctcctcccctaatatcaggctcaggagacactcttcacaaatcgagggggttaggcaaatgcacaacaacgccccacggagccagatggcaacagagagggatctgatggcttggtcccgccgagtggtggtgaacgagcttaataacggagtatcccgcgttcaggaggaatgtcgtaccgctaagggcgacatagaaatttctctctatacggtggagaaaaagaaaaagccttcttataccacgcaacgtaacgactatgagccgagctgtggcaggagtcttcggcgcacacagcggaagcgacagcacacctaccaaactcgctctaacatcgaacacaacagccaagcctcttgccagaactcaggcgtccaggaggactctgattcctcttcggaggaggacgagaccgtcggaactagtgacgcatctgtggaggatcccgttgtcgaatggcagtctgaaagttcgtcaagcgactcaagctcagaatatagcgactggacggccgatgcaggtataaacctgcagccaccaaagcgccagacgcggcagacaacccggaaaatctgcagttctagtgatgaagagaatctgaagtcactcgaggagcggcagaagaaacccaagcaaacccggaagaaaaagggaggactcgtcagcatcgccggcgaaccgaatgaggaatggtttgccccccagtggatcttagacactatacctcgacgtagcccctttgtgcctcagatgggagatgaactgatttatttcaggcaaggccacgaggcatacgtgcgtgcagttcgcaagagcaagatctatagtgtaaatctgcaaaagcagccttggaacaaaatggacctcagagagcaggaattcgtgaagatcgtagggatcaagtatgaggtcggcccccctactctgtgctgcctgaagctggcatttctcgaccccataagtggcaagatgacgggcgagtccttcagtatcaagtaccacgacatgccagacgtgatcgactttttggtcctccaccaattctataatgaggctaaagagcggaactggcaaattggggataggttccgttcaatcattgatgatgcctggtggtttggcacagtggagtctcagcagccatttcagcctgaatacccggacagctccttccaatgctattccgtccattgggacaataacgagcgtgaaaaaatgagcccatgggatatggagcctatccccgaaggtaccgcgttcccggatgaggtgggcgccggagtgccagtttcacaggaggaattgacagctttgctctacaaacctcaggagggtgaatggggggcgcattcaagagatgaggaatgtgagcgggttatccagggcatcaaccatcttctgtctcttgatttcgcctctcctttcgccgtcccagttgacctctctgcttatccactgtattgcaccgtcgtcgcgtacccgacagatttaaatacaatccgcagacgcctggagaatcgtttttatcgccgaatctccgctttaatgtgggaggtcagatatatcgaacacaatgctcgtacatttaatgagcctgactcgcctatcgttaaagctgcaaaaatcgtgacggacgtgttgctgcgctttatcggagatcagtcctgcaccgacatcctggatacctataacaaaatcaaggcagaagaaaggaattccaccgatgctgaagaggataccgagatcgtggacttggacagtgatggacctggcacctcatcagggagaaaagtaaagtgcaggggcaggagacagagccttaagtgcaaccccgacgcctggaagaagcaatgtaaagagctgctctcgctgatctacgagagggaagattccgagcccttccgccagcctgcggatttgctgtcataccctggccaccaggagcaagaaggcgagagctcggaaagcgtagtgcccgagaggcagcaagacagcagcctgtctgaagactatcaggatgttatcgacacccccgtcgatttcagtaccgtcaaagaaacactggaagctggtaattacggtagcccactggagttttataaagatgtccgtcaaatctttaataattcaaaagcatataccagtaataaaaagtctaggatctatagcatgatgttgagactgtccgctctgtttgagtctcatattaaaaacatcataagtgagtacaaatctgctatccagtcccagaagagaagacgacctagataccgcaaacgcctccggtcaagctcctccagtctatcatcatctggcgcaccctctccaaaaggtaagcagaagcagatgaagctgcagcccaagaacgatcagaacaccagcgtgtctcatgctagaacatcaagtcctttcagcagcccggtgtccgatgccgccgaggggcttagtctttacttgctagacgatgagcctgacggacccttttcctcgagctcttttggaggttattcacggtcaggaaactctcacgacccaggcaaggccaaatccttccgaaatcgcgtactgccagtcaagcaggatcatagcttggacgggccattgaccaacggcgacggaagggaaccccgcaccggaataaaacgtaagctgcttagcgcttcagaggaggacgagaatatgggcggcgaggataaggaaaagaaggaaacaaaggagaagtctcatctgtccacatccgagagcggcgagctaggctcttctttgtcgagtgagagtacgtgcggcagtgattctgattctgagtctacatcacggacagaccaagattacgtggacggcgatcatgactacagtaagtttattcagaccagaccgaaacgcaagttgaggaaacagcacggcaacggcaagcgtaattggaagacccgtgggacgggcggtcggggcagatgggggcggtggggccggtggagtagaggcgggaggggcaggggaggcaggggtcgtggatcccgcggacgcggcggaggtggcacaagggggcggggccgtggtcgcggtggcagaggagcttccagaggtgccaccagagccaagagggccaggatagccgacgatgagtttgatactatgtttagtggccggttttcccgcctgccccgaattaagacgaggaaccaggggaggagaaccgtcctctataacgatgattccgacaacgacaacttcgtgagtaccgaggaccccctcaatctcggcacgagccgatcgggccgcgtccggaaaatgaccgaaaaggcaagagtgtctcacctgatgggctggaattactag

SEQ ID NO: 180790 - DNA, 2406 bp, synthetic construct
  misc_feature 1..2406: note = Description of Artificial Sequence: Synthetic coding sequence
  source 1..2406: mol_type = other DNA
atgctgcagaacgtgaccccccacaacaagctgcccggcgagggcaatgctggcctgctgggattgggccccgaagccgctgctccagggaagcgtattcgcaagccttctctcctctacgaaggattcgaatccccaactatggcctctgttcccgccttgcagctgacgcccgcaaatcctcccccgcccgaggtgagcaaccctaagaagcccggacgggtgaccaaccagctccagtatctgcacaaagtggttatgaaagccctctggaagcaccaattcgcatggccgtttcgtcagcctgtggacgccgtgaagctgggacttccagattatcacaaaatcatcaaacagcccatggacatgggaacgatcaagcggagactcgagaacaactattattgggcagccagcgagtgtatgcaggacttcaacaccatgttcacaaactgctacatctacaataagcccaccgacgacatagtgcttatggctcagaccctggaaaagatcttcctgcaaaaggtggcctctatgccccaggaggagcaagaattagttgtgactatccccaagaattcacacaagaaaggagcaaaattggcggccctccagggatcggtcacatctgcccaccaggttcctgctgtgagctccgtttctcacacagcactatacaccccaccacccgagattccgacaaccgtactgaacataccgcacccttctgtgatttcctcaccactgctgaaatcactccactccgccggacccccgcttctagccgtaactgcagccccacctgctcaacctcttgcaaagaaaaagggtgtgaaacgcaaagcagacacaactacaccaacaccaaccgcaattctcgcgccaggctccccagcgtcaccacctggcagcctcgagccgaaggcagctagactcccccctatgcggcgcgaatctggcaggcccattaagccaccgcgcaaggacctgcccgattcacagcagcaacaccaatcaagcaaaaaggggaagttaagcgagcagttaaagcactgtaacggtatccttaaggagttgttgtctaagaaacatgcagcttacgcatggccgttttacaagcccgtagatgcctctgcactgggtttgcatgactaccacgatataatcaagcatccaatggacctctccaccgtgaaacggaaaatggagaatcgcgattaccgggatgcgcaggaattcgcagcagacgtgaggttgatgttcagtaattgttacaaatacaatccaccggatcacgatgtagtagccatggcccggaaattacaggacgttttcgagttccgctacgccaagatgcccgacgaacctctcgaaccaggccctttacccgtttccaccgccatgcctcccgggctcgccaagagttcctctgaatcctcatctgaggagagctcatccgaatcctcctccgaggaggaagaggaggaggatgaagaagatgaagaagaagaggagtcagagtcgtctgacagcgaagaggaaagggcccaccggctagccgaactacaggaacagctgcgggctgtgcatgagcagttagcggctctgtcacagggaccaattagtaaaccaaagcgtaagagagagaagaaggagaagaaaaagaaaagaaaggccgagaagcacaggggaagggctggcgcagacgaggacgataaaggacctcgggctccccgccccccacagcccaaaaagagcaaaaaagcaagcggcagcggtggaggttccgcggccctgggtcccagcgggttcggtccaagtggtggatctggcactaagctaccgaaaaaagcaacaaagactgctccccctgcgctgcctactggatatgacagtgaagaggaagaagagagccgaccgatgagctacgatgaaaaacgtcagctgagtctggatattaacaagctgccaggcgaaaagctgggaagagtggtgcatattatccaggcccgagagccaagtctgcgggacagcaatcccgaagaaatagagattgattttgaaacactaaaaccctccacgctacgcgaactggaacgctacgtgctctcctgcctacggaagaagccaagaaagccatataccatcaagaagccagtgggaaagacaaaagaagaactggccctggagaaaaagcgggaattagaaaagcgcctccaggatgtgtccggacaactgaactcgaccaaaaaacccccgaagaaggcaaacgagaaaaccgaatcttcctccgcacagcaggtggccgtgtcacgactcagcgcgtcaagttccagctcagatagttcctcgagctcctcctcgtcttcatcaagcgatacaagtgactcagattccggctag

SEQ ID NO: 180791 - DNA, 2406 bp, synthetic construct
  misc_feature 1..2406: note = Description of Artificial Sequence: Synthetic coding sequence
  source 1..2406: mol_type = other DNA
atgctgcagaacgtgaccccccacaacaagctgcccggcgagggcaatgccggactgctcggactcggtcctgaggctgctgcccccggcaaacgcattcgaaagccgagcctcctttacgagggcttcgagtcaccgaccatggcctctgtgcctgctcttcagctaactccagctaatcctcctccacccgaagtgtcgaacccgaagaagccggggagggtgaccaatcagctccagtatctacacaaagtggtgatgaaggccctgtggaagcatcagttcgcctggccattccgacagccagtggacgcggttaaactggggctgcctgactaccacaaaattatcaagcaaccgatggatatgggcacaataaagcggcggctcgaaaacaattattactgggccgcctcagagtgtatgcaggacttcaacaccatgtttaccaattgctacatttacaataagccaactgatgacattgtgctcatggcccagacattagagaagatctttcttcagaaagttgccagcatgcctcaggaggaacaggagttagtggtgacgatcccaaaaaactctcataaaaaaggcgccaagctggccgccttgcagggaagcgtgacatccgcccaccaagtacctgctgtgtcctccgtaagtcataccgccttgtatactccaccccctgagattcctaccactgtcttaaacatccctcacccttccgtgattagcagtcctcttttaaagagccttcactccgctggtccccccctcctagctgtgactgctgctccaccagcccagccccttgccaagaagaagggtgtgaagcggaaagctgacaccactactccgacacctaccgctatactggcccccggctctccagctagccccccgggaagcctggagccaaaggcagccaggctccctcctatgcggcgggagagcggccggcccataaagccaccacgaaaagacctgccagattctcagcagcaacaccagagtagcaaaaagggaaagttgtccgaacagctaaagcattgcaatgggatcctaaaggaactgctgagtaaaaagcacgctgcatacgcttggccattctataagccagtggacgcaagcgccctcgggctacacgactatcatgacataatcaaacatcccatggacctgtcaacagtgaaacgaaagatggaaaaccgtgattaccgcgacgcccaggagttcgcagctgatgtacggttaatgttctccaactgctacaaatataacccaccggatcacgacgtcgtcgcgatggcccgcaagctgcaggacgtgttcgagtttagatacgcgaagatgccggacgagccgctagagcctggacccctgcccgtctccactgctatgcctccaggattggccaaaagctcatcagagtcgtcttctgaggaatcttcttctgaaagtagcagcgaggaggaagaagaggaggatgaggaggacgaagaagaggaggagagtgagtcttcagactctgaggaggagcgcgcccacagactcgccgaactgcaggagcagcttcgagctgtacatgagcaactggcagcactgagtcagggtcccatctccaagccgaagcgcaaacgggaaaagaaagaaaagaaaaagaaacgcaaagccgagaagcatcgcgggagagctggtgccgacgaagatgataaaggcccaagggcccccagaccaccccagcccaagaaaagtaaaaaggccagtggcagcggtgggggaagcgctgcactgggaccttctggttttggtccctcgggcggctcagggaccaagcttcctaagaaggccaccaaaaccgctccgccagccctccctacaggctatgacagcgaagaagaagaagaaagccgcccaatgtcctatgatgaaaagaggcaactgtcactggacatcaacaagttaccaggagaaaaactggggagagtggtccatatcattcaggcccgcgagccatccctccgtgatagcaatcccgaagaaatagagattgatttcgagaccctgaagccctcaaccttgcgtgaactggaacgctatgtgctgtcctgtcttcgtaagaaacctcgtaaaccctacaccattaaaaagccagtgggtaagacaaaggaagaactcgctttagagaagaaaagagaactggagaagcgccttcaggacgtttctggtcagctcaactccaccaaaaaacctcctaagaaagctaacgagaaaactgaaagcagcagcgcccaacaggtggcggtgtctcggttgagtgccagcagcagcagttccgattcctcaagcagttcctcttcgtctagcagctccgacacctctgattctgatagcggctag

SEQ ID NO: 180792 - DNA, 2406 bp, synthetic construct
  misc_feature 1..2406: note = Description of Artificial Sequence: Synthetic coding sequence
  source 1..2406: mol_type = other DNA
atgctgcagaacgtgaccccccacaacaagctgcccggcgagggcaacgcaggcctgctgggcttaggcccagaggcagccgctcctggcaagcgcattaggaagccatccctcctgtatgaagggtttgagagccccaccatggcctcagttcccgccctccagctgacccccgcgaatcctcccccacctgaggtatcaaaccccaagaaacctggacgggtgacgaatcaacttcagtacttgcataaggttgtcatgaaagcactgtggaagcaccagttcgcatggcccttcaggcagccagtggatgccgtgaaactgggtttgccggactatcacaaaataattaagcagcccatggacatgggtaccattaaacgtcgcctggagaacaattactattgggccgctagcgaatgtatgcaagatttcaataccatgtttacaaattgctacatctacaacaagcccaccgacgatatcgttctcatggcacagacgttggaaaagatctttttgcagaaggtcgcgagcatgccccaggaggagcaggagctggtcgtgaccattcccaaaaattcccataaaaagggggccaagttagccgcactgcaaggctccgtaacctcggcccaccaggtgccggccgtgagcagtgtgagtcacacagctctgtataccccaccccccgagatccccacgaccgttctgaacatcccgcacccctccgtcatctcatccccacttcttaaatccctgcattcggccggccccccgctgctagccgttaccgcagctccgcccgcccagcccctggcaaaaaagaagggggtcaagaggaaggccgacacaacgaccccaactcctacagctatactagccccgggcagccctgcctccccacctgggagtctggagccaaaagctgctagattgccaccgatgcgtcgcgagtccggcaggccgattaagcccccccggaaagatttacccgattctcaacagcagcaccagtcatcaaagaaaggaaagctgagcgaacagctaaagcactgtaacggaatcctcaaagagctgctatccaagaagcatgccgcatacgcatggcctttttacaagccagtcgacgctagcgctctgggcctgcacgattatcacgacatcataaaacacccgatggatttgagtactgtcaagagaaagatggagaaccgagattatcgcgacgctcaggaattcgctgctgacgtaaggctcatgttctctaactgctacaagtataatccccctgaccacgacgtagtggctatggcccggaagctgcaggatgtctttgaattcagatatgcaaaaatgcccgatgaaccactcgagccagggcctctgcctgtgagcacggccatgccacccggtctcgcaaagtccagcagcgaaagctcaagcgaagaatcttccagcgagtcctcatctgaagaagaagaggaagaagacgaggaagatgaggaagaggaggagtccgagtcctcggacagcgaagaagaacgggcccatcggcttgcggaactgcaggagcagcttagggccgtgcacgagcaattggccgccctgagccagggcccaatcagcaaacctaaacggaaaagggaaaaaaaggagaaaaagaaaaaacgcaaggcagaaaaacacaggggaagagccggtgccgatgaggatgacaaaggtccgagagctcctcggccaccacagcctaaaaaatcaaagaaggccagcggcagcggcggaggatctgcggcactggggccgagtggatttgggccctccggcggctcaggcacgaagctccctaagaaggctaccaagacagctccccctgcattgccaaccggatatgacagcgaggaggaagaagagagccggccaatgtcctacgatgagaagcggcagctctcactagacattaataaacttcccggggaaaagctgggaagagtggtccatataattcaagcgagagagccatcactccgggacagcaatcctgaagaaattgagatcgactttgaaaccctgaaaccttcaacattgagagagctcgagcggtacgtactcagttgccttaggaagaagccccgcaagccctatacgatcaagaaacccgtggggaaaactaaggaagaactggctctggaaaaaaagcgggagttggagaagcgtttacaagatgtgtccggccagctcaactctaccaaaaagcctccaaagaaggccaacgaaaaaaccgagtcatctagcgcgcagcaggttgcagtgtctaggttgtcggcatcaagttcttcatcagattccagcagttctagttcctcgtccagctcatcagacacctccgattccgatagtggatag

SEQ ID NO: 180793 - DNA, 2511 bp, synthetic construct
  misc_feature 1..2511: note = Description of Artificial Sequence: Synthetic coding sequence
  source 1..2511: mol_type = other DNA
atgctgcagaacgtgaccccccacaacaagctgcccggcgagggcaacgccggacttctaggtctgggcccagaagccgccgcacccggcaagcgaattagaaaaccctccctcctttatgaaggattcgaatctcctaccatggcatccgtcccggccctgcagctgacaccggcaaaccctcccccccctgaggtgtccaatccaaaaaagcccggtagagtgacaaaccagttacagtatctgcataaagtggtgatgaaggctctttggaaacaccagtttgcctggccattccggcagccggtcgacgcagtgaagctgggcctcccagattaccacaagatcatcaagcagcctatggatatgggaactatcaaacgtagactggaaaacaactattattgggccgcatcggaatgtatgcaggatttcaataccatgtttactaattgttatatctacaacaaacctacagacgatattgtcttaatggctcagactctggaaaagatatttcttcagaaggtggcgtccatgccacaagaggagcaggagcttgtcgtgaccattccaaagaacagccacaagaagggcgctaagctggccgcacttcaaggctccgtgacttccgcacatcaggttccagcagtatcttccgtttcacacaccgccttatatacccccccacctgaaatccccacgacagtcctgaatattccgcatccttctgtgatctcctccccgcttcttaaatcactgcattcagcgggaccaccgctgctcgccgtaactgccgccccacctgcgcaaccccttgccaagaagaagggcgtgaaaaggaaggccgatactactacccccacacccactgcgatcctcgcccctggatctcctgcctcacccccaggcagcctagagcccaaagctgcccgattacccccgatgagacgggaaagcggtaggcctattaaacccccaaggaaagatctgcccgattctcagcagcaacatcagtcgtctaagaaaggcaaattatccgaacagctcaaacattgtaatggcatactaaaggaactcctctcaaaaaagcatgccgcctacgcctggccgttttacaagcccgtcgatgccagcgctctggggttgcacgactatcacgacataatcaaacatcccatggatctgagtaccgtgaagaggaagatggagaatcgcgattaccgtgatgcccaagagttcgccgccgatgtgcgacttatgttcagtaactgctataaatataacccacccgatcacgacgtggtggcaatggcccgcaagttgcaggacgttttcgaatttcggtatgctaaaatgccagacgaaccgctggagcccggaccactgccggtgtctaccgcgatgccacctggtctggctaagagttcctctgagtccagcagcgaagaatcctcatcagagtcaagttccgaggaagaagaggaagaggatgaggaagatgaagaggaagaggagtcggagtcatctgactcagaggaggaacgtgcacaccggttagccgagctgcaagaacagctgagggcagtacatgaacaattggcagccctttcgcagggccctatatcaaaacctaagcgaaagcgggagaaaaaagaaaaaaagaagaagcgaaaggccgaaaagcatcgaggccgggctggcgcagatgaggacgataagggaccccgcgctccacggccaccccagccaaaaaagagtaaaaaggcttccgggtccggcggcggaagcgctgctctcggacctagtgggtttggcccatcaggagggagcggcacaaaactccaggctggcgtgcagtggagggacttgggcctgttacaaccgcctttattggggtttaagcggtttagctgcctgtccctgcccagttcacaggactacagacttcccaagaaggccactaagaccgcgccccccgcccttcccacagggtatgattcggaggaagaagaggaaagcagacccatgtcatacgatgaaaagagacagctgagcttggatatcaataagctgccaggagagaagctgggaagggtggtccacatcattcaggctagagaaccgtctctaagagattcaaatcccgaagaaattgagatagacttcgagaccttaaagcccagtacactgcgcgagctagaacgttatgttctcagttgcctgagaaaaaagccaagaaaaccatataccattaagaagcccgtgggcaaaacaaaagaggaattagccctcgagaagaagcgagagctggaaaagaggctccaggatgtctcaggacagttgaactctaccaagaaacccccaaaaaaggctaatgagaagacagaaagctccagcgcccagcaggtcgccgtcagccgcctgagcgcgagctccagttcctctgacagctccagcagctcctctagtagtagttcatcagacacctccgactcagattccggttag

SEQ ID NO: 180794 - DNA, 2511 bp, synthetic construct
  misc_feature 1..2511: note = Description of Artificial Sequence: Synthetic coding sequence
  source 1..2511: mol_type = other DNA
atgctgcagaacgtgaccccccacaacaagctgcccggcgagggcaacgctgggctattgggactgggacccgaggctgccgcacctggcaagaggatcagaaagccatcgctgttgtatgaaggttttgaatctccaacgatggcctccgttcctgctttgcagctcacacctgcaaacccgccaccccccgaggtaagtaatccaaaaaagcctggtagggtgaccaaccagcttcagtacttgcataaagtggtcatgaaggccctctggaagcatcagttcgcatggcctttcaggcagccagttgacgcagtcaagctggggttaccagactaccataagatcatcaaacagcctatggacatggggacaatcaagcggaggctggaaaataactactactgggccgctagcgagtgcatgcaggattttaacaccatgttcaccaactgctatatctacaataagcccacggacgacatcgttctaatggcccagacgctggagaaaatttttctgcaaaaggtggcttccatgccccaggaggagcaggagctggtagtgacgatacctaagaacagccacaagaagggtgccaagctggcggctctccaaggtagcgtgacgagcgcccaccaggtcccagctgtctctagtgtgagccacacagccctctatacccctcctccagagataccgacaacagttctgaacatccctcacccaagtgttattagttcacctctcctgaaaagcttgcactctgccgggccgcccctcctggccgttacggccgcacccccagcccaaccactagctaagaaaaaaggtgtcaaacgcaaagccgatacaacaactcctacaccaacggctattttggctcccggatcgccggcaagcccaccagggtcgcttgaacctaaagccgctcggttaccccctatgcgtcgggagtccggaagaccaattaagcctcccaggaaagacctgcccgattcccagcagcagcaccagtccagcaagaagggtaagctttccgaacagctaaaacactgtaatggcattttgaaggagctactgtccaagaagcacgctgcgtatgcttggcccttttataagccggtggatgcctcagcactaggcctacatgattaccatgacattatcaagcatccaatggatttatccactgtcaagagaaaaatggaaaatagggactacagggacgcgcaggagtttgctgctgacgtgcgactgatgttctccaactgttataaatataatccacccgatcatgatgtcgtggccatggcacgaaagctccaggacgtgtttgagtttcgctacgccaagatgccagacgagcctctggagcccgggcctctgcccgtcagtactgccatgccacctgggttggccaagagcagctcagagtccagcagcgaggaatcctcatccgagtcctctagcgaagaggaggaggaggaggacgaggaggacgaggaggaagaagaatctgaatctagcgacagcgaggaagagcgggcacaccgactggccgagttacaggagcaactgcgtgccgtgcatgagcagttagctgcgttgtcgcaggggccaattagcaaacccaagaggaagcgggagaaaaaggaaaagaagaagaagcgtaaggccgagaagcaccgggggagagccggcgctgatgaggatgataaaggcccgagagcccccagacccccccaacccaaaaagagtaaaaaggcctcgggaagcggggggggatcagcagcactcggcccttccgggtttggccccagtggtggatccggtacgaaactgcaggctggtgttcagtggagggacttaggtctgctccagccacctttgctcgggtttaagcgcttcagttgcctgagcctgccatcttcacaggattatagactgcctaagaaggcgactaagactgcgccgccagccctgcccaccggctacgacagtgaggaggaagaggaaagcaggcccatgtcctatgatgagaagagacaactttctttagacatcaacaagttacctggagagaaactcggtcgggtggtccacattatccaggcgcgagagccgagcttaagggatagcaatcccgaagaaattgaaattgatttcgaaactctgaagccctccacgcttagagagctggagcgatatgtgctatcctgtcttaggaaaaaaccacgtaaaccgtacacaatcaagaagcctgtgggcaaaacgaaagaagagctagcattggagaaaaaaagggagctggagaagaggctccaggacgtgtctggccaactgaactcgactaagaagcctcctaaaaaggccaatgagaaaaccgagtcctcatcagctcagcaagtggccgtgagcaggctgtccgcctcaagtagttcttccgattcctcaagctcctcatcatcgtccagctccagtgatacatccgatagcgactcggggtag

SEQ ID NO: 180795 - DNA, 2511 bp, synthetic construct
  misc_feature 1..2511: note = Description of Artificial Sequence: Synthetic coding sequence
  source 1..2511: mol_type = other DNA
atgctgcagaacgtgaccccccacaacaagctgcccggcgagggcaacgcgggtctgctgggacttggtccagaagccgcagcccccgggaagcgtatcaggaaaccttcgcttctgtacgaaggctttgagtctcctactatggcaagtgtgccagccctgcaattgacacccgcaaatccccccccgcctgaggtatccaaccccaaaaagcccggccgcgtaacgaatcagttgcagtatctgcacaaggttgtaatgaaagctttgtggaaacatcagttcgcatggccatttaggcagcctgtggacgccgtcaagttgggtctccctgattaccacaagattattaaacagcctatggacatggggactatcaagcgaagactggagaataactactattgggccgcctcggaatgcatgcaggattttaacaccatgttcacaaattgttacatctacaacaagccaaccgatgacattgtgctgatggcacagacattggaaaaaattttcctgcagaaagtggctagtatgccacaagaggagcaagagctcgtcgtgacgatcccgaaaaatagtcacaagaaaggcgccaagcttgctgccctacagggctcggtcacatctgctcatcaggtgcctgccgtctcttcagtcagccacacggctttgtatacacccccgcccgagattccaacaactgttctcaatatcccacacccgtctgtgatctcttcccccttgctgaagtcactacattctgccggcccaccacttcttgctgttaccgcggctccccctgcacagcctcttgcaaaaaaaaaaggagtcaagagaaaggccgatacgacaacacctacccccacagcgatcttagcaccagggtctccagcctcaccccctggctctctggagcccaaggccgcaaggctgcctccaatgcgacgagagagtggccggcccattaagcctccacgcaaggatttaccagacagccagcagcaacatcagtcatcaaaaaagggtaaactgagcgagcagcttaagcattgtaacggaatcctgaaggaacttctctcaaagaaacatgccgcctacgcctggcccttttacaaacctgtggacgcctctgcgttggggctccatgactaccacgatatcattaagcacccaatggatctgagcaccgtcaaacgtaaaatggagaatagggactatcgggacgcacaggagttcgcagctgatgtacgtctcatgttctccaactgctataaatataacccccctgatcacgatgtggtcgcgatggcaaggaagctacaggacgtctttgagttcagatacgccaagatgccagacgagccactggagcctggccccttgcctgtgagcaccgccatgccacctggactcgctaagtcaagttctgagagctcaagcgaagaatcatctagcgagtcttcctctgaagaggaagaagaggaggatgaggaggacgaggaggaggaggagagcgagagttccgattcagaagaggagcgggcacacagactggccgagctgcaggaacaattgagggcagtgcatgagcagttggccgctctgagtcagggccctatcagtaagcctaaaagaaagagggagaagaaggagaaaaagaagaaaagaaaggctgagaaacacaggggcagagctggcgccgatgaggacgataaaggtcccagagccccgcgccccccccagcccaagaagtccaaaaaagcgagtggatccggtggcggcagcgcggccttgggaccctccggctttggcccaagcggggggagcggcacgaagctccaggccggtgtccagtggagagatttgggcctgctacagccaccactgctgggatttaaacggttcagctgtttgtccttgccgtctagtcaggattatcggctgccaaagaaggcaacgaaaaccgcacctcctgcactgcctaccggttacgactctgaagaggaagaggagagtcgacctatgtcatatgacgagaaaaggcagctgtcgcttgacattaacaaactgcccggcgagaagctgggtcgggtcgtgcacataattcaggcgagggaacccagcctacgcgactctaacccagaggagatcgaaattgactttgaaacactgaagccatctacgctcagagaattggagcgctatgttctgtcctgccttaggaaaaaaccgcggaagccatacactatcaaaaaacccgtgggaaagaccaaagaagaactggcattagaaaaaaaacgggaactggagaaaaggcttcaggatgtcagtggccagcttaatagtaccaagaaacccccaaagaaagctaatgagaagaccgagtcatctagcgcgcagcaggtggccgtcagccgcttatctgcctcttcgagttcttcagacagctcatcgagttcatcctcttcgagcagcagcgatactagcgattcagactctggctag

SEQ ID NO: 180796 - DNA, 2406 bp, synthetic construct
  misc_feature 1..2406: note = Description of Artificial Sequence: Synthetic coding sequence
  source 1..2406: mol_type = other DNA
atgctgcagaacgtgaccccccacaacaagctgcccggcgagggcaatgcgggcttactgggcctcggtcctgaagccgcagcccctggaaagcggattaggaagcccagtctgctgtacgaaggctttgaatccccaaccatggcaagtgtcccggctcttcagctaaccccagctaacccccccccccctgaagttagtaaccctaagaagcccgggagagtcactaaccagttacaatacctgcacaaggtggtaatgaaggcactgtggaaacatcagttcgcgtggccattcagacaacccgttgatgccgttaagctgggtctcccagactatcataagattatcaagcagcccatggacatgggcactattaaacggcgtcttgaaaataactattactgggcagcatctgagtgcatgcaggactttaacaccatgttcaccaactgctatatctataataagcctacagacgacattgtgctgatggcccaaaccttggaaaaaatattcttgcagaaagtggccagtatgccacaggaagagcaagagttggtggtcactatccccaagaattcacataagaagggggcaaaactcgccgcattacaaggcagcgtcaccagcgcccaccaggttcctgccgtttccagcgtgtctcacacggcactgtatactcctcctcccgagatccccactaccgttctgaacatcccacacccgtctgtgatatcctcccccctactgaagtcccttcatagcgcggggccacctctgctcgctgtaaccgctgccccacccgcacagcctctggccaagaagaagggggttaagcggaaggctgacactaccacccctacccccacagccattctcgcccctgggtccccagccagccctcctggatcgctagaaccaaaggcagcaaggctacctccgatgcggagagagagcggaagaccaatcaagccgccacgcaaggatcttccggacagccagcagcaacaccagtccagcaaaaagggcaaactgagcgagcagctgaagcactgtaatggcatcctgaaagaacttctgtccaaaaaacacgccgcatatgcctggcccttctacaaacctgtggatgcctcagctttgggcctccacgactaccacgacataattaaacatcctatggatctaagtactgtaaaaagaaaaatggagaatcgagactaccgcgacgcccaagaatttgctgccgacgtgcgccttatgttctccaattgttacaagtacaatccacctgaccacgacgtggtcgcaatggctcggaagctgcaggacgtgttcgaatttcgctacgccaagatgcccgatgagcccctggagcctggcccgttgcctgttagtacagccatgcctcctggcttagccaagagctctagcgaatcctcttccgaagaaagctctagtgagtctagctccgaggaagaagaggaagaagatgaggaagacgaggaggaagaggagtcagagtcttcggacagcgaagaagaaagggcacaccgactggccgagctgcaggaacaactgagggccgttcacgaacagttggctgcactctctcagggcccgatctcaaaaccaaagcgcaagagggaaaaaaaggagaagaagaagaagagaaaagctgaaaaacatagagggcgcgcaggggccgacgaagacgataaggggcctagagctcctcgccctccacaacctaaaaagagcaaaaaagcctctggaagcggtggcgggagcgcagccctgggtcccagcggctttggaccctcaggtgggtctggcaccaagcttcctaagaaggcaactaagaccgccccccctgcgctccctaccggttatgattcagaggaagaggaagagtctcgacctatgtcctacgacgagaagcggcaattgtccctggatatcaacaagctgccaggggaaaaactgggtagggtggtgcacatcatacaggcccgcgaacctagcctgcgggactctaatccagaggaaatcgagattgattttgaaacactgaagcccagcactctgagggagttggaaagatatgtactgtcgtgcttacggaagaagccgagaaaaccctacaccatcaagaaaccggttggcaagactaaggaagagctcgccctggagaagaaaagggaactggaaaaacggctgcaggatgtgtccggccagctcaattcaacaaagaaaccacctaagaaggccaatgagaaaacagagagctcgtcagcccagcaggtggctgtctcccgactgtctgcaagttcctcctccagcgactcatcttcgtcaagctccagtagttcgtctagtgatacatccgactccgactccggctag

SEQ ID NO: 180797 - DNA, 2406 bp, synthetic construct
  misc_feature 1..2406: note = Description of Artificial Sequence: Synthetic coding sequence
  source 1..2406: mol_type = other DNA
atgctgcagaacgtgaccccccacaacaagctgcccggcgagggcaatgcagggcttcttggactcggtcctgaggccgccgctcccggcaaaaggatacgcaagccatctctactgtatgaaggtttcgagagtcccacaatggcatcggtaccagcattgcagttgacgccagccaacccgccccctccggaggtgtcaaaccctaagaaacccgggagagtcacaaatcagttgcagtacctgcacaaggtcgttatgaaagcattatggaagcatcaatttgcttggccgtttcgccaacctgtggacgcagtgaaactcgggttacccgattaccacaaaatcatcaaacaacctatggatatgggcaccattaaacgaagattggaaaacaattactattgggccgccagtgagtgtatgcaggatttcaacaccatgttcacgaactgttacatctacaacaagccaacagacgacatcgtactgatggcccagactctggaaaaaattttcctccaaaaggtggcttcgatgcctcaggaagagcaggaattggttgttacaattcccaaaaacagtcataaaaagggagccaaactcgccgctctccagggcagcgttacctcagcacatcaagtgccggctgtgagtagtgtgtctcacaccgcactgtacactccccctcctgaaattccaacaacagttctgaacatccctcacccctccgttatctcctcacctcttctaaagtccctgcacagcgccggacctcctttattggctgttacagctgcgcctccagctcagccgttagcaaagaagaagggggtgaagagaaaggccgatactacaacgcctactcccactgccattctcgcacccggcagtcctgcgtcccctcctggcagcttagaacctaaggccgctaggctgccacccatgcgccgggagagtgggcgtccaatcaagccaccgaggaaagatctacccgatagccagcagcagcaccagagcagcaagaaaggaaagttgtccgagcagttaaagcactgtaatggcattctgaaagaactgttgtcgaagaaacacgctgcctacgcctggcccttctacaagcccgtggatgcctccgctctgggactgcacgattaccacgacatcattaaacaccccatggacctctccactgtgaaaaggaagatggagaaccgagactaccgggacgcgcaagagtttgctgcagatgtgagactcatgttctctaattgctacaaatacaatcccccagaccatgacgtagtggccatggcccgcaagcttcaagacgtgtttgaattcaggtacgctaagatgcccgatgaaccactcgaacccggccccctacccgttagtactgcaatgccacctggccttgcaaagagcagtagcgagagttcgagcgaggagtcaagtagtgaatcttcttcggaagaagaggaggaggaggacgaggaggacgaggaggaggaggaatctgagtcatctgattctgaggaagaacgcgctcaccgcctggccgaactacaggagcagctgagggcggtgcatgagcagctcgccgccctgagccaggggccgatctccaagccaaaacgcaagcgtgagaagaaagaaaagaagaagaaacgaaaggccgagaagcacagaggcagagcaggagcggatgaggacgacaaaggccctcgggcaccaagacccccacaacctaagaaatctaaaaaggcctcaggcagtggagggggctcggctgctttaggccccagtggattcggcccctccgggggcagtggtaccaaattgccaaaaaaggctacaaagacagcccctcccgcactgcccacaggttatgatagcgaggaagaggaggagtctcgcccgatgtcatatgacgagaaaagacaactgtccctcgacattaataaactgccgggagagaaactgggccgcgtggtccacatcattcaggcgcgggaaccctcactgcgggattcaaatcctgaggaaatagagattgacttcgaaactctcaagccaagcactctcagagaactcgaaagatacgtgctgagctgtctcagaaaaaaacccagaaaaccatataccattaaaaagccggtcgggaaaacaaaggaggaattggcccttgagaaaaagagggagctagagaagcgtctacaggacgtgtccggccagctgaattctactaagaagccacctaaaaaggctaatgagaagacagagagtagttctgcgcagcaagtggccgtttcacgtctcagtgcttcttcatcttcctcggacagcagttcaagctcctcctcctctagctcttcagatactagcgattctgactccggctag

SEQ ID NO: 180798 - DNA, 891 bp, synthetic construct
  misc_feature 1..891: note = Description of Artificial Sequence: Synthetic coding sequence
  source 1..891: mol_type = other DNA
tgacggcccctgggcgtgcagcagcccggcgcccggctgcccggcgaaggcaacgcaggcctgctgggcctaggtcccgaagcagccgctcctgggaagcgaatacggaaaccctccctgttgtacgagggttttgagagtcctaccatggcaagcgtgcctgctctgcagttaacacccgcgaaccctccaccaccagaggtgtccaaccccaaaaagcccgggagggtcactaatcagctgcagtacctccataaggtggtcatgaaagctctttggaagcaccagtttgcatggccgttcagacagccggtcgacgccgtgaagctcggtctgcctgattaccacaagattatcaaacaacccatggacatgggcacaattaaacgacggctggaaaataactactactgggccgcttccgaatgtatgcaggatttcaatacaatgttcaccaactgctatatctacaataagcccactgatgatatcgtgcttatggcacagacacttgaaaaaatcttcttgcagaaagtggcttcaatgccacaggaggaacaggagctggttgttactatcccaaagaattcccacaaaaagggcgccaaactcgctgcactccaggggagcgtgacttccgcccaccaggttcctgccgtctcgtccgtgtctcacaccgctctgtatacacctccaccagagatccccacaactgtactcaatatcccgcatccttcagtgatcagttctcccctgctgaagtctctccacagcgccggacctccccttctcgccgtgacagcggcccctccagcccagccattagccaaaaaaaaaggcgttaaacggaaggcagataccacaacccctactccaaccgcgattctatag

SEQ ID NO: 180799 - DNA, 2406 bp, synthetic construct
  misc_feature 1..2406: note = Description of Artificial Sequence: Synthetic coding sequence
  source 1..2406: mol_type = other DNA
atgctgcagaacgtgaccccccacaacaagctgcccggcgagggcaacgccggactgctgggactaggcccagaagctgcagcgccaggtaagcgcatcaggaagccttccctgctgtacgaagggtttgagagccccaccatggcttccgtgcctgccctgcagttgacccccgcaaatccgccgccccctgaggtctctaaccctaagaagccaggcagagtgactaatcagttacagtatctccacaaagtggtgatgaaagcactgtggaagcaccagtttgcttggccgttcagacaaccggtggatgcagttaaactggggctccccgactaccataaaataattaagcagccaatggatatgggtaccattaaacggaggctggagaacaactattactgggccgcaagtgagtgcatgcaagatttcaataccatgtttaccaactgttacatctacaataagcccactgacgacattgtgctcatggctcagaccctagaaaagatcttcctgcagaaagtggcgtcaatgccccaggaggaacaggagttggtggtgacaattccgaaaaactctcataaaaagggggctaagctggccgctcttcagggttctgttacctcagcccaccaggtacccgctgttagttcagttagtcacacggcactctacaccccgcctccggagatacccaccacagtctttaatattccacacccctcagtgatcagcagtcctctcctgaagtccttacactcagccggccctcccttgctcgcagtgactgcagctccccctgcccaacctctggccaagaaaaagggggtgaaaagaaaagccgacaccacaactccgactcctaccgccatcctcgctcctgggtccccagccagtcccccaggctcattggagcccaaagccgctaggctgccgcctatgcgccgggaaagcggaaggccaattaagccccctagaaaagacctaccagattcacagcaacagcaccagagttcaaaaaagggaaaattgagcgaacagctgaagcactgtaacggaattctgaaagaattgttgtctaaaaaacacgcagcctatgcctggccattctacaagccagtggatgccagtgcactgggcttgcacgattatcatgatattattaagcatccgatggacctgtccacagtaaaacggaagatggagaatcgggattatcgtgacgcgcaggaattcgctgccgatgtgcgcctgatgttttcaaactgttataaatacaatcctccagaccatgacgtcgtcgcaatggcaagaaaattgcaagacgtctttgagttcaggtatgctaagatgcccgatgagccactggagccggggcctttgccagtgtctactgccatgcccccgggccttgccaagagcagttctgaaagcagctctgaggaatcaagcagcgagtcaagcagcgaggaagaggaggaggaggacgaagaggacgaagaagaagaggagtcagagagctctgacagtgaagaggaacgcgcacaccgactggctgagctgcaggaacagctgcgggccgtccacgaacagctcgcagctctttcccaaggacccataagcaagcccaagcggaagagggaaaagaaggagaaaaagaagaaacggaaagcggagaaacatagagggcgtgcaggggccgacgaagatgacaagggaccacgcgcgcctcgacccccccagcctaaaaagagtaaaaaggcctcagggtccggggggggatctgctgccctgggccccagcggtttcggaccatctggtggctctggaacgaagctccctaagaaggctactaaaaccgcaccaccagccttaccaacagggtacgactccgaggaagaggaagagtcaaggccgatgtcttatgacgagaagcgtcagctgtctctcgatatcaataaacttccaggggagaagctgggcagggtggtgcacatcatccaggcaagggagccatccctgcgtgatagcaatccagaagaaattgagattgattttgaaaccttaaaacctagcacactcagagaactcgagcggtacgtgctatcgtgcctgcgaaaaaagcccagaaagccctacaccatcaagaagccagtggggaaaactaaggaagaattagctttggaaaagaaaagggagctggagaagaggctgcaggatgtctccggacagttaaactcaaccaagaaaccccccaaaaaagcaaacgagaaaactgagagcagttccgctcagcaagttgccgtgagccggctcagcgcgagcagtagcagctccgacagtagctcctcaagcagtagtagttcctcctccgatactagtgactccgattcaggatag

SEQ ID NO: 180800 - DNA, 1842 bp, synthetic construct
  misc_feature 1..1842: note = Description of Artificial Sequence: Synthetic coding sequence
  source 1..1842: mol_type = other DNA
atgctgcagaacgtgaccccccacaacaagctgcccggcgagggcaacgctggtttactggggctggggccagaggctgctgcccccgggaagagaatacggaagccaagcctgctgtatgagggttttgagtccccgactatggccagcgttccggcactccaactaacccccgccaatcctcctccgcccgaagtctcaaacccaaagaaaccaggacgggtcacaaatcagctgcagtacttgcataaggtagtgatgaaggctctctggaagcatcagtttgcatggccgtttcggcaaccagtggacgccgtgaagcttggtctgcccgactatcataaaattatcaagcagccaatggatatgggcactataaaacgccgactcgaaaataactactactgggcagcctcagagtgtatgcaggattttaataccatgttcaccaactgttatatttacaacaagcccacagacgatatcgtgctgatggcccaaactctcgagaagatttttctgcagaaagtggcctcaatgcctcaagaggagcaagaactggttgtgacgattcctaagaattctcataagaagggtgcaaaattggccgcccttcaaggttcggtgacctctgcccaccaggtccccgcagtatctagtgtgagccacaccgccctgtatacacctccgcccgagatacccaccacagtgctgaatattccccatcccagcgtgatcagctcacctctgctgaaatctttgcattcagccggaccccctttgttagccgtgaccgcagccccacctgcccagcccctggctaaaaagaaaggagtgaaacggaaggccgataccactacccccactccgaccgccatcctggccccaggctcaccagcctctccgcctggatcactggaacccaaggccgctcgactcccaccgatgcggcgagaaagtgggaggccaatcaaaccaccaagaaaggacctaccagattcgcaacagcagcatcagagctcaaagaagggtaagctgagtgagcagctgaagcattgtaacggtatcctcaaagaactgctctcgaagaagcacgccgcctatgcatggcccttttataagcccgtagatgcgagcgccctgggcctccatgactaccacgatattattaagcaccccatggatctcagcacagtgaagagaaaaatggagaatagagattaccgcgacgcgcaggagttcgccgctgacgtcagattgatgttctccaattgctacaaatataatcctccagatcacgatgtggtcgccatggctcgcaaactacaagatgtcttcgaattccggtacgctaaaatgcctgatgaacccctggaaccaggaccactgcccgtgtcaactgcaatgccacctggcctggctaaatcttcttctgaaagtagttctgaagaatccagctctgagagcagttccgaagaggaagaggaggaggacgaggaggacgaggaggaagaagagtcagagagctctgattcagaagaagaacgagcccacagactggccgagctgcaggagcaactgcgagcagttcacgaacagttagccgcccttagccagggtcccattagcaagccgaaaagaaagagggagaagaaagagaagaaaaaaaagcggaaagctgagaagcatcgtggtcgggctggcgctgatgaagacgacaaggggcctagagcccccagacccccacaaccgaagaaaagtaagaaggcaagcgggagtgggggaggctctgccgctctaggtccgagtgggtttggtccaagcggggggtccgggacgtag

SEQ ID NO: 180801 - DNA, 1842 bp, synthetic construct
  misc_feature 1..1842: note = Description of Artificial Sequence: Synthetic coding sequence
  source 1..1842: mol_type = other DNA
atgctgcagaacgtgaccccccacaacaagctgcccggcgagggcaacgctgggctgctcggcctcgggcctgaagccgccgcccccggaaagcggattcgaaaaccctccctgctttacgagggctttgagtcacccactatggcttcagtccccgctctacagctcactcctgcgaatcctcctccacctgaggtctctaacccaaaaaaacccgggcgggtgactaatcaactgcagtaccttcataaggtagtaatgaaggccctgtggaaacatcaattcgcgtggcctttccgacagccagtggacgccgtaaagctgggactgccagactatcacaaaattattaagcagcccatggatatgggaactatcaagaggagactcgaaaataactactactgggcggcgagcgaatgcatgcaagactttaacaccatgttcacaaattgctacatatacaataaacctacagatgacatcgtcctgatggcacagactctggagaaaattttcttacaaaaggtggctagtatgccacaagaagaacaggagctggtggttactattcccaaaaactcccataagaaaggagcaaagttagcagctttgcagggatctgtcacaagtgcccaccaggtccccgccgtgtcaagcgtcagccataccgctctgtacaccccacctcccgaaattcctactactgtcctgaatattccccatccttctgtcatctcaagtcctttacttaaatccctgcatagcgcaggcccgcccctgttggccgtcacagccgcccctccagctcagcctctggcaaagaaaaaaggcgtgaagcgcaaggcagacactaccaccccaaccccaacagcaattctcgcacccggttcccccgcctctccgccaggctcactcgagccaaaagccgcccgcctgcccccaatgagacgcgaaagcggtcggccaatcaaacctcctaggaaagacctgcctgattctcagcaacagcaccagtcgagtaaaaaggggaagctgagtgaacagctcaagcactgcaatggcattctaaaggaactgctgagtaaaaaacacgctgcctacgcttggcctttctacaagccagtggacgcctccgctttgggcttgcacgactaccacgacattattaaacaccccatggacctgagcaccgtgaagaggaagatggaaaacagagactatagagatgcccaggagttcgctgccgatgtgcggctgatgtttagtaactgctacaaatataatccccctgaccacgacgtcgtggctatggcgaggaagctccaagacgtgtttgagtttcgctatgctaagatgcccgatgagccattagagcctgggcctctgccggtgtcaactgctatgcctcctggtttggccaagtcatcaagtgagagctcaagcgaggaatcgagttccgaaagctcctcagaagaagaggaagaggaggatgaagaggacgaagaggaggaggaaagtgaatctagcgactccgaagaagaaagggcacacagattggccgaactccaggagcagcttcgtgccgttcacgaacagctcgccgcactttcgcagggacccatcagcaaaccgaaaagaaaaagagagaaaaaggagaagaagaagaagcgcaaagccgaaaaacacagagggcgtgccggtgcggacgaggacgataaagggcccagagcaccccggccacctcagccaaagaagtcaaaaaaggcctctggcagtggaggcggcagcgccgcgctgggcccttccggcttcggcccatcagggggctccggaacctag

SEQ ID NO: 180802 - DNA, 987 bp, synthetic construct
  misc_feature 1..987: note = Description of Artificial Sequence: Synthetic coding sequence
  source 1..987: mol_type = other DNA
tgagccaagagcagcagcgagagcagcagcgaggagagcagcagcgagagttccagcgaagaagaggaggaagaagatgaggacgaggaagaggaggagtcggagtcaagcgacagcgaagaggagagagcgcatcggctggccgaactgcaggaacagctccgcgctgttcatgaacagcttgctgcgttatcccaggggcccatcagtaagcccaagcgcaagcgcgagaaaaaggaaaaaaaaaagaagagaaaggcagaaaagcatagaggccgagccggagcagatgaggatgataagggacctagggctccacgacccccccagcctaagaagtcgaaaaaggcttccggatctggcgggggatccgccgctctcggcccatccgggttcggtcccagcggcggaagcggcaccaaactccccaagaaagctactaagacagcaccacccgctttgccaacaggatacgattcggaggaggaggaggagtcccgacctatgagctacgacgagaaacgccagttaagcctggatatcaataaacttcctggtgagaaactgggcagggtggtccacatcatccaggcacgcgagccatcactgcgtgattctaatcccgaagaaattgaaattgactttgagacccttaagccctccaccctgagagaattagagaggtacgtactgtcctgcctccggaaaaaacctcgaaaaccctataccatcaagaagccggtgggaaagacaaaagaagaattagctctggaaaagaagagggaattggaaaagcgcctccaagatgtatccggacagttgaacagcaccaagaaaccacctaaaaaggctaacgaaaaaactgagtccagctctgctcagcaggtggcggtgagtcggctttctgcctcctcatcctcttcagatagcagcagttcatcctcatcttccagttccagtgatacctccgactcggacagcggctag

SEQ ID NO: 180803 - DNA, 1947 bp, synthetic construct
  misc_feature 1..1947: note = Description of Artificial Sequence: Synthetic coding sequence
  source 1..1947: mol_type = other DNA
atgctgcagaacgtgaccccccacaacaagctgcccggcgagggcaatgccggactactcgggctgggccccgaggcagctgcgcccggcaagaggatacgtaagccttccctgttatacgagggtttcgaaagtccaactatggcttctgtaccagccctgcagctcaccccggcgaatccaccgcccccagaagtgagtaaccccaagaaaccaggacgggtcaccaaccagctgcagtatctgcataaagttgtgatgaaagctctttggaagcaccagtttgcatggccattcagacaacccgtggacgccgtcaagctcggcctgcctgactatcacaaaatcataaagcagcccatggacatgggcacaattaaacgtcggctagaaaacaactactactgggccgcctctgaatgtatgcaggactttaacacaatgttcaccaactgctacatctacaataaacctaccgatgacatcgtgctcatggcacagactcttgaaaaaatcttcctacagaaggtcgcaagcatgccacaggaggaacaagaactggtggtgaccatccctaagaactcgcataaaaagggggctaagttggccgctttgcagggcagcgttactagcgcccaccaagtgcctgcggtgagttccgtgagccatacagctctgtacacgccaccccctgagatccctacaacagtgctgaacataccacatccatccgtgatatcctcaccacttttgaaatctttgcatagtgccgggccccccttactggccgtgacagcagctccgcctgcccagccgctggctaagaagaaaggagtcaaacggaaggcagacaccactacccctactccaacagctatcctcgcacccggtagtcctgcctccccccctggatccctcgagccaaaggcagctagactgccacctatgcgccgcgagtcaggaagaccaattaagcctcctagaaaagatctgcccgactcacagcagcaacatcagtcctccaagaaggggaaactgtccgaacaacttaaacattgcaatggcatcctgaaagagcttctgtcaaaaaagcacgccgcttacgcttggcccttttataaacctgtcgacgcctcagcactcggattacacgactaccacgatattattaagcatcctatggacctatccacggtgaagcggaagatggaaaatcgagattatcgcgacgcccaggagttcgccgctgacgtgcgcctcatgtttagtaactgttataagtataatccccccgaccacgacgtggtcgcaatggccagaaaactccaggatgtgtttgaattccgctacgcaaagatgcccgatgaaccgcttgagcctggacctctccccgtgtcaacggctatgccccctggtctggcgaagagtagcagtgaaagctcttctgaagagtcctcgtccgagtccagctctgaggaggaagaggaggaggacgaagaggatgaagaagaagaggaatctgaatcatctgatagcgaggaagaacgtgctcaccgcctggcagaacttcaggagcaactgcgggcggtgcacgaacagctggcggcactcagtcaggggccaatatccaagcccaagaggaaacgcgaaaagaaggagaaaaaaaagaaaaggaaggccgagaaacaccggggaagggctggggcagacgaagacgataaaggacctagggcaccccgtcctccgcaaccaaaaaagtccaagaaagcttctggcagcggcgggggaagcgcagccctgggcccctctggatttggcccgtccgggggtagtggaactaaactccaggctggcgtgcagtggcgtgacctggggctcttgcagccacctctacttggctttaaaaggttcagctgcttaagtctgcctagctcccaggattattag

SEQ ID NO: 180804 - DNA, 2424 bp, synthetic construct
  misc_feature 1..2424: note = Description of Artificial Sequence: Synthetic coding sequence
  source 1..2424: mol_type = other DNA
tgaaacggcggcggcggcagcgccaccgcccggggcggcgagtaccggcttccaggtgaaggtaacgctggactcttgggactcggtccagaagccgcggccccaggcaaacggattcgcaagccatcactgctatacgaggggttcgagagtcccaccatggccagtgtacctgccttgcagctgaccccagccaacccgccaccccccgaagtgagcaaccctaaaaagcctggccgtgtgacaaatcagttacagtacttgcacaaggtggtgatgaaggcattatggaagcaccagttcgcttggccattcagacagcccgtggacgcggtgaagctggggctgcccgattaccacaaaatcataaagcaaccaatggacatgggcaccattaagagaagattggagaataattactattgggccgcgagtgaatgtatgcaggactttaatacaatgttcacaaactgttacatttataataagccaacagatgacattgtcctcatggctcagacattagaaaagattttcctgcaaaaggtggcatcaatgcctcaggaagagcaggaactggtggtgacgatcccgaagaattctcacaagaagggtgctaagctagcggcgctgcaggggtccgtaacgtcagcgcatcaagtcccggccgtaagctcagtcagccatactgccctgtatacacctcccccagagatacctacgacggtcttcaatataccacaccctagtgtcattagttcgccactcttgaaaagtttgcatagtgccggaccccccttgctggctgtcaccgccgcccctcctgcccaaccattggctaaaaaaaaaggcgtcaaacggaaggccgatactacaacaccaacacctactgcaatcctggctcccggttctcccgcatcccctccaggaagcctggagcctaaggccgcccgcttgcctccgatgagacgcgagagtggccggcccatcaagcctcctaggaaggatctccctgattcacaacaacagcaccaatcatctaagaagggtaagctctcagagcaactaaagcattgcaatgggattcttaaggaacttttgtccaagaaacatgccgcttatgcgtggcccttctacaagccagtggatgcctccgcattagggttgcacgactatcacgatatcatcaagcaccctatggacctgagtacagtgaagcgcaagatggaaaaccgcgactatagggacgctcaggagtttgctgcagacgtgcgcctcatgtttagcaattgctacaagtataacccccccgaccatgatgtcgtggccatggcccgcaagctgcaagatgtgttcgaattccgctacgcaaagatgcccgacgagcccttggaacccgggcccctaccagtgtcaacggccatgccccccggtctggccaaaagctcatctgaatcctcgagcgaagaatcaagtagcgagagctcctcggaggaagaggaagaagaagatgaggaggacgaagaggaggaagagtccgagagctctgacagcgaagaggaacgagctcaccgactggcggaactgcaggagcagttgcgggcagtccatgaacagctggccgcactcagccaaggacctattagcaagcctaaaaggaaacgggagaagaaggagaagaaaaaaaagcgaaaggcggaaaaacacagagggagggccggcgctgatgaagacgacaagggccccagggcacccagaccccctcagcctaaaaagtctaaaaaggctagtggctcaggcggaggatcggctgccttaggaccaagtgggttcggcccgtctggcggatctggaacaaaattacctaaaaaggcgacgaagactgccccccctgccttacctactggctatgactccgaggaggaggaagagagccgcccaatgtcttacgacgaaaagcgtcaactatctctggacatcaacaagctccccggcgaaaaattgggcagggtcgtgcacataatccaagctcgtgagcctagtctgcgtgattctaatcctgaggaaatagagatagattttgagactctcaagccaagtaccctccgtgaactcgaacggtacgtgctgtcctgcttgaggaagaagcctcgcaaaccctacacaatcaagaagcccgtgggcaagactaaggaggagctcgcattagagaagaagcgggaattggagaagagactgcaggatgtgagcggccagctgaacagtaccaagaaaccacccaagaaggctaatgaaaagactgagtccagtagcgcacagcaggtggctgtgtcaaggttgtccgcctcctcttccagctccgatagtagctcttcatcatcttcaagttcatctagtgatactagcgattctgattctgggtag

SEQ ID NO: 180805 - DNA, 891 bp, synthetic construct
  misc_feature 1..891: note = Description of Artificial Sequence: Synthetic coding sequence
  source 1..891: mol_type = other DNA
tgacggcccctgggcgtgcagcagcccggcgcccggctgcccggcgaagggaatgcgggactcctgggacttggtccggaggcagccgctcctggaaaaaggataaggaagcccagcctgctgtacgaagggtttgagtcacccaccatggcctctgttccggccctacagctcacaccggccaacccccccccccctgaagtatccaacccaaaaaagcccggtcgagtgacaaaccagctgcaatacctgcataaagtcgtcatgaaagccctgtggaaacatcagtttgcttggccgtttagacagcctgttgacgctgtcaaactaggtcttcctgattaccacaaaataatcaagcagcccatggatatgggcaccatcaaaaggcgactcgagaataactattattgggctgccagcgagtgtatgcaggatttcaacacaatgtttaccaattgctatatatataataagcctactgatgacatcgtccttatggcacaaactctcgagaaaattttcttgcagaaggtcgcttccatgcctcaagaggaacaagagctggtcgtcaccattccaaagaacagtcacaaaaagggtgcaaaattggctgccctccagggctcagtgacgagcgcacaccaggtgccagctgtttcctcggtgagccacacagctttgtatacccctccacccgagatccccactacagtcttcaatatcccacacccgagcgtgatctcatcacccctgctgaaaagcttgcactcagcgggtcccccgctgctcgcagtgactgcagccccacctgcacagccactggccaaaaaaaagggagtgaaacgcaaagctgacaccaccacgccaactcctactgccatcctgtag

SEQ ID NO: 180806 - DNA, 2265 bp, synthetic construct
  misc_feature 1..2265: note = Description of Artificial Sequence: Synthetic coding sequence
  source 1..2265: mol_type = other DNA
atggccagcgtgcccgccctgcagctgacccccgccaaccccccccctccggaggtgagcaaccctaagaagccgggcagagtgacaaaccagctacagtacctgcacaaggtggtcatgaaggccctgtggaagcatcaattcgcctggccctttcggcagcccgttgacgcggttaagctgggtttgcctgattaccacaagattataaagcagccaatggacatggggaccatcaagcgcaggctggaaaataattattactgggccgcctccgagtgtatgcaagactttaataccatgtttacaaattgctacatttacaacaagccgaccgatgatatagtcctgatggcacagacgctagagaaaatttttttacagaaagtggcttccatgccccaggaagagcaggaactggtagtgaccatccccaaaaatagtcacaaaaagggggcgaaactagccgccttgcaggggtctgtgacatcagctcaccaggtcccagcagtctcctctgtgtcacacaccgcactgtataccccaccccctgagattcctactaccgtcttgaatattccccacccgtcagtaatttcaagtcctcttttaaagtccctccacagcgccggccctcccctgcttgctgttactgcagcaccacctgctcagccattggccaaaaaaaaaggagtgaagcgaaaagccgataccaccaccccaactcccacagctatcctggctccagggtctcctgccagtcctcccggatcgctcgagccgaaagccgccagactgccccccatgcggcgcgagtccggtcggccgataaaaccccccaggaaagatttgccagactcgcagcagcaacatcaaagctcaaagaaaggaaaactgagtgagcagcttaagcactgcaacgggatcctcaaggaactgctgtcaaagaaacatgcggcttacgcttggcctttttacaaacccgtggatgcatctgctctgggactgcacgattatcatgatatcattaaacaccctatggacctcagcaccgtgaagagaaaaatggaaaatagagactaccgggacgcccaggagtttgccgccgatgtgcgcctgatgttttctaactgttacaagtacaacccccctgaccatgacgtggtagcaatggccagaaaattgcaagatgtgttcgaattcaggtacgccaagatgccggatgaaccccttgagcccgggccgctccccgtgagcaccgctatgcctccaggcctggcgaagtcatctagtgaatcttcgtccgaggagagcagttccgagtcttcgtccgaagaagaggaagaggaggacgaagaagatgaggaagaggaggagtccgaatccagcgacagtgaggaggagcgcgctcaccgattggcggagttacaggagcagctacgggctgttcacgaacagctggccgccttgtcgcaggggcccatcagtaagcccaagagaaagagagagaagaaggagaaaaaaaagaaaaggaaagctgaaaagcaccgcgggcgcgcgggagctgacgaagacgataagggaccgcgggcacccagacccccacaacccaagaaatctaagaaagcttcaggttcaggaggaggctccgcagcactcgggccttctggattcggacctagcggcggtagtggcacaaaactgcccaaaaaagccacaaaaaccgccccacccgcattgccgaccggctatgactccgaggaagaggaggagagcagacctatgtcatacgatgaaaaacgtcagctttctctggacatcaacaagctgcctggagagaagctggggagagtggtgcacattattcaggctcgagagccctcactccgcgatagcaatccggaggagatagagatcgattttgaaactcttaagcccagtaccctgcgcgagttggagcggtacgtcctgtcttgtctgcgcaaaaaacctcggaaaccctacactatcaaaaagcctgtgggtaagacaaaggaggagttggcactggagaagaaaagggagctagaaaaaaggctccaagacgtgtcaggacaattgaatagcacgaagaagcctccaaagaaagctaatgaaaaaactgagtcctcctcggcccagcaggtggccgtatcaaggctgtccgctagtagttcctcatctgactcaagttcttccagttcgtcaagctcctcaagcgatacctctgactctgatagcggatag

SEQ ID NO: 180807 - DNA, 2406 bp, synthetic construct
  misc_feature 1..2406: note = Description of Artificial Sequence: Synthetic coding sequence
  source 1..2406: mol_type = other DNA
atgctgcagaacgtgaccccccacaacaagctgcccggcgagggcaatgccggtctgctcggactgggtccggaggcagctgcacccggaaagcgcatcaggaaacccagccttttgtacgaagggtttgaatctccaacaatggccagcgtgccagctctgcagttgactcccgcaaacccaccacctcctgaggtcagcaacccaaaaaagcctggccgagttacaaaccaactgcaataccttcataaggtggtaatgaaagcgctatggaagcaccagttcgcttggcctttcagacagcccgttgacgccgtcaaacttggactgcccgactatcataagatcatcaagcagccaatggatatggggacgataaagcgccgtctcgagaacaattactactgggcagcgagtgaatgcatgcaagattttaacactatgttcacaaattgttacatttataataaacccaccgatgatatcgtgctgatggctcagacactggaaaagattttcctccagaaggtggcctccatgcctcaggaagaacaggagctggtggtgaccatccccaaaaacagccataagaaaggtgcaaagctcgccgctctgcaaggcagtgtgaccagtgcccatcaagtgcccgccgtatcaagtgtgtcccataccgcgctttacacgccaccacctgagatccccacaaccgtcttgaatattcctcatccttcagtaatcagttccccgctgctcaaaagccttcactccgccggcccaccactgctggccgtgaccgccgccccaccagcccagccattagccaagaaaaagggcgtgaagcgaaaagctgacacaacaacacctacccctaccgcgatattagccccaggctcaccagctagccctcccggctccctggaaccaaaggctgcaagactgccacccatgaggagagagagcggaagacccataaagccccccaggaaggacttgccggatagccagcagcagcatcagtcatctaaaaagggcaagctgtctgaacaactcaaacactgtaatgggattctcaaggagcttctgtctaagaagcatgcagcatacgcctggcccttttacaagccagtggacgcctctgctcttggactccatgactaccacgacatcattaagcaccccatggacctttcaacagtgaagagaaaaatggagaatcgcgattatcgggacgctcaggagttcgcagctgacgtgaggttaatgttctctaattgctataagtataatccacctgaccacgacgtggtggcgatggctcgaaaactgcaagacgtgttcgagtttaggtacgccaagatgcctgatgaacccttagagccaggccctctgcccgtgtccacagctatgccccctgggctggctaagagctccagcgaatcaagctctgaggaaagctccagtgaatcaagctctgaagaggaagaagaagaggatgaggaggacgaagaggaggaggagagcgaaagttctgattcggaggaggagagggctcaccgtctcgcggagctgcaagagcagttaagggctgtccacgaacagctggcagcgctttcccaggggccgatttcaaagccaaagagaaagagggaaaaaaaggagaagaagaaaaagcggaaagccgagaagcatcgtggacgtgctggggccgacgaggacgacaaaggacctcgggccccacgaccgccccaacctaagaaatccaagaaagcgtccgggtccggcggtggtagtgccgccttgggaccttcgggctttggtcccagtggagggagcggcacgaaacttcccaagaaagctaccaaaacagcaccacccgcattgccgacagggtatgactccgaggaggaagaggagagccgacctatgtcttatgatgaaaagcggcagcttagcctcgatatcaataagctgccgggcgagaagctgggtagggtcgttcatatcatccaggcacgcgagccaagcctgcgtgattcgaatcccgaggaaattgaaatcgatttcgagacgctgaaaccgagcaccctcagagaactagaacgttatgtattatcttgccttagaaaaaagccacgtaagccttataccatcaaaaaacctgtcggcaaaaccaaggaggaattggctttggagaagaaacgcgaacttgaaaagcgcctgcaggacgttagcgggcagttaaatagcactaaaaaacctcccaagaaggccaatgaaaagactgagtcttctagcgcacagcaggttgccgtcagccgcctgagcgcgagctcaagcagttctgactcctcatctagtagttccagttctagcagctccgacacctccgacagcgattcaggatag

SEQ ID NO: 180808 - DNA, 2424 bp, synthetic construct
  misc_feature 1..2424: note = Description of Artificial Sequence: Synthetic coding sequence
  source 1..2424: mol_type = other DNA
tgaaacggcggcggcggcagcgccaccgcccggggcggcgagtacagactgccaggtgaaggcaacgctggactgcttggcctgggccctgaggccgctgctcctggcaagaggatccgcaagccgtctctgctttacgagggctttgagtcgccaacaatggcctccgtgcctgctctacaactgacaccggctaaccccccaccaccggaggtttccaacccaaagaaaccgggaagggtcactaatcaactgcagtaccttcacaaggtcgtgatgaaagccctgtggaaacaccaatttgcttggcctttcagacagcccgtggatgctgtgaaactggggctgcctgattaccacaagattattaaacagcccatggatatgggaaccataaagagaaggttagaaaataactactactgggccgccagtgagtgcatgcaggattttaatacgatgttcacgaattgctacatctataacaagcccacagacgacattgtgctgatggcacagactcttgaaaagatattcttgcaaaaagtagcgagcatgccacaggaagagcaggaattagtagtgacaatacccaagaactcccacaagaagggcgctaagctggcagctctccagggtagcgtgacatcagctcaccaggtgcccgccgtgtcatccgtgtcacacactgcactgtatacacccccaccagaaattcccactacagtcttgaacatcccacaccctagcgttatcagcagtccactccttaaaagcctccatagcgctggtcctcctctattggccgtcactgctgctcctccggcccagcccttagcgaagaagaagggagtgaagcggaaggcagataccacaacgcctactccgaccgcaatactcgcaccagggagcccggcttccccaccggggagcttggagcctaaagccgcccgtctccctccaatgagaagagaaagcggtagaccaattaagcctcccaggaaagatcttccagattcccaacagcagcatcagagcagtaagaaggggaagttgagcgagcagctcaagcactgcaatggcatcctgaaggaactgctttcgaagaagcacgctgcctatgcatggcctttctacaagccagtggatgcttccgctctggggctgcatgactaccatgacataataaaacatccaatggacctgtctacggtcaaacggaagatggagaatcgagactacagggatgctcaagaattcgccgctgatgttcgcctgatgttctccaactgctacaagtataatccacctgaccacgacgtcgtcgccatggccaggaaattgcaagacgtgttcgaatttcgatacgcaaagatgcccgatgaacccctggagcccggcccactccctgtgtccacggccatgcccccaggcctggccaagtcatcttcggagtcttcaagtgaagagtccagcagcgagagctcttctgaagaagaggaagaagaggacgaagaggacgaggaagaagaggagtccgaatctagcgattctgaagaggagagagctcatcggctcgctgagctgcaggaacagctgcgggccgtgcacgaacagttagccgctctgtcgcaggggccgatcagcaagcctaagcggaaacgcgaaaaaaaggaaaaaaagaaaaaacgaaaagctgagaaacacaggggacgcgccggagctgatgaggacgacaagggacctagagcacctagaccccctcaacccaagaaaagcaagaaagccagtgggtcaggaggaggatccgctgccctgggacctagcggctttgggccttctggcggcagtggcacaaagttgccaaagaaggcaactaaaactgcaccacccgcccttcccaccgggtatgacagcgaagaagaggaggagtcgcgtcctatgtcctatgacgagaagcggcagttgagcctcgacattaataaactcccaggagagaaactagggagagtggtccacattatccaggctcgagaaccttccttacgggacagcaaccccgaagaaatagaaatagacttcgagaccctgaagccgtctaccttacgcgaactggagcgctatgtgttgagttgccttaggaagaagccccggaaaccatatactattaaaaaacctgttggaaaaacaaaggaggaacttgcacttgagaagaaaagagaactggagaagcgactgcaggacgtgtcgggccagctgaattccaccaagaaaccccctaaaaaagccaacgagaagactgagagttcgtctgcacagcaggtggcagtgagcaggctgtcggccagctcatcttcatctgactcgagttccagctcgtctagtagctcttcctccgatacaagtgactctgacagcgggtag

SEQ ID NO: 180809 - DNA, 1092 bp, synthetic construct
  misc_feature 1..1092: note = Description of Artificial Sequence: Synthetic coding sequence
  source 1..1092: mol_type = other DNA
tgagccaagagcagcagcgagagcagcagcgaggagagcagcagcgaatcatctagtgaggaagaggaggaggaggacgaggatgaagaggaggaagagtcagagtcgagcgacagtgaggaggaacgcgctcatagactcgccgaattgcaggagcagcttcgcgcagtgcacgaacagcttgctgcattgagccagggtcccatcagcaagcccaaaagaaagcgggaaaagaaagaaaagaaaaagaaacggaaggctgagaagcatagaggtcgcgctggcgctgacgaggatgataaaggtccccgcgctccccggccgccacagccgaagaagtctaaaaaggcttctggatccggcggtggaagcgccgcactgggaccctcagggtttggaccctccgggggttccggtaccaagctgcaagccggcgtgcagtggagggatctggggctccttcagcctcccctcctgggattcaaacggtttagttgtctctctttacccagttcccaggactaccgtcttcccaagaaggccacaaagacggcacccccggcccttcctaccggctacgatagcgaagaggaggaagagtcccgccccatgtcctatgacgagaagcgacagctgtcattagatatcaacaaactgcccggtgagaaattgggacgagtggtgcatattattcaagctagagagcccagcttgagagattccaatccggaagaaatcgagatcgacttcgagacgttaaagccgagcactcttcgcgagttagaaagatacgtgctgtcgtgtctcaggaaaaagccacgaaaaccttacacaattaagaagcctgtggggaaaaccaaggaggagctggcactggaaaaaaagagggagctggagaaaaggctccaggacgtctcagggcaactgaattccaccaagaaaccccctaagaaggccaatgagaaaaccgaaagttcatctgcccagcaggtcgctgtaagccggttgagcgcatcatccagcagctcggattcttctagcagtagcagctcatccagtagcagcgatacatcagatagcgattctggctag

SEQ ID NO: 180810 - DNA, 2511 bp, synthetic construct
  misc_feature 1..2511: note = Description of Artificial Sequence: Synthetic coding sequence
  source 1..2511: mol_type = other DNA
atgctgcagaacgtgaccccccacaacaagctgcccggcgagggcaatgccgggctgcttggcctaggtcctgaggccgcggctcccgggaaaagaattcgcaagcccagcctgctctatgagggttttgaatctcctacaatggcttctgtacccgcattgcagctcactcctgccaatcccccccctcccgaagtatcaaatccgaagaaacctgggagagttacaaaccagctgcaatacctgcacaaagtggtcatgaaggctctgtggaaacaccagtttgcctggcctttcagacagcccgtcgatgccgtgaaattgggccttccggactatcataagatcatcaaacagcccatggatatgggcactatcaagagaaggctggaaaacaattattattgggccgctagcgaatgcatgcaggattttaacacgatgtttaccaattgctacatctacaacaagcctactgacgatattgtcctgatggcacaaacgctcgagaagattttcctccagaaagtagctagcatgccccaggaggaacaagagcttgtcgtgaccattccaaaaaatagtcacaagaagggagccaaactggcggccctacaaggtagcgtgaccagcgcccatcaagtccctgctgtaagtagtgttagccacactgccctctatactcctccgccagagatccctactaccgtcctgaacataccacatccgtcagtgatcagttccccgctcctcaaaagcttgcattccgccggccctcccctcttggctgttaccgctgctccgccggctcagccactagccaaaaagaagggggtgaagcgcaaggcagatacaacaaccccaactcccaccgccatactcgctcccggtagtcctgctagcccgcctggcagccttgagccaaaggccgcccggctaccccctatgcggagggaatccggcagacccatcaaaccaccacggaaagaccttcccgatagccaacagcagcaccaatcatccaagaaaggaaagctcagtgaacaactgaagcattgtaatggcatcctgaaggagctcctgagtaaaaaacacgcagcttatgcctggccattctataagcccgtggacgcctctgcgcttggtctccacgactaccatgatattatcaaacaccccatggatctctccacggtgaagcggaagatggagaatagagactatagggatgctcaggagtttgctgcggacgtgcgacttatgttcagtaactgctacaagtacaaccctccagatcacgacgtggtcgccatggcaaggaaactgcaggatgttttcgaattcagatacgctaaaatgccagatgagcctttagagcccgggcccttacctgtgtccacagcaatgccccctggccttgcaaagagctcttcagaaagctcctcggaagaatctagtagcgaatccagcagcgaagaggaagaggaagaggacgaggaagacgaggaggaggaggagtcggagagctccgactccgaagaggaacgcgcccaccgcctcgcagaactacaggagcagctgcgggcggtgcatgaacagctggctgcactctcacaaggccccatctctaagccaaagcgcaaaagggaaaaaaaagagaaaaagaagaagaggaaggccgagaagcataggggaagagctggcgcagatgaggatgataaaggaccaagggctccccgccctccacagcccaaaaaatccaagaaagcgtccggctccgggggagggagcgcagccctgggcccatctggtttcgggccctccggagggtccggtacaaagctgcaagccggggtccaatggcgggacctaggactgttacagccacctctcctgggattcaaaagatttagttgtctaagtctaccaagttcccaggactaccgactacctaaaaaagcaacgaagactgcgcctcccgctctgcccaccgggtacgattccgaggaggaagaggagtcccgtcctatgagctacgacgagaagcgccagctgtctctggatatcaataagctaccgggggagaagctggggagggtagtccatataattcaagctcgggaaccctccctccgagactctaaccccgaggagatagaaattgacttcgagactttgaagccctcgactctgcgggagttggagcggtatgtattgtcctgtctaagaaagaaacctcggaagccttatacaattaagaaacctgttgggaaaaccaaagaagaactggcccttgagaagaagagggagctggagaagaggttgcaggacgtcagtggacagctcaattccactaagaagccaccaaagaaggcgaacgagaagacggagtcttcttctgctcagcaggtggccgtcagccggctaagcgcctcatcctcttcgtctgactcttccagtagcagtagcagtagtagctcgtcggacacgtccgactcagattccgggtag

SEQ ID NO: 180811 - DNA, 2046 bp, synthetic construct
  misc_feature 1..2046: note = Description of Artificial Sequence: Synthetic coding sequence
  source 1..2046: mol_type = other DNA
atggacatgggcaccatcaagcggcggctggagaacaactactactgggcagcaagcgagtgcatgcaagactttaataccatgtttaccaattgctacatctataataagccaacggacgacatagtcttaatggcgcagactctcgaaaagatctttctccagaaggtcgccagtatgccacaagaggagcaagagcttgtggtcacaattccaaaaaattcccacaaaaagggggccaagctggccgccctacagggctcagttactagcgcacaccaggtgccagctgtgtcttccgtcagccataccgcattgtatacaccaccacccgaaattcctaccaccgtgctgaatatccctcatccttctgtgatctcgtcccccctgttgaagagcctacacagcgcgggcccacctcttctcgctgtaacagccgctcctccagcccagccactcgcgaagaaaaaaggggtcaaaagaaaggctgatactacgacccccacgccaaccgccatcctggcaccaggatccccagctagccctccggggagtctggagccgaaagccgcccggctgcccccaatgagacgagaatccgggcggccgatcaagccaccgaggaaggatctgccggattcccagcagcagcatcagtccagtaagaagggaaagctgagcgagcagctcaaacattgcaatgggatcctgaaagaactgctcagtaagaagcacgcagcttatgcgtggcccttctataagcctgtagatgccagtgcactggggctgcatgattatcacgatatcattaaacaccccatggaccttagcacagtaaagagaaaaatggaaaacagggattatcgcgacgcccaggaatttgcggccgatgtcagattgatgttttcgaactgctacaaatataatccacctgaccatgacgtcgtggcaatggcgcggaaattgcaggacgtgttcgagttcaggtatgctaagatgcccgatgagccgcttgaaccaggccccctgccagttagcactgccatgcccccgggtcttgccaagtccagtagcgaatcttccagtgaagaatcatcttctgagtcgtctagcgaggaggaggaggaggaagatgaagaagacgaggaggaggaggaatctgaatctagcgatagtgaagaagagcgggcacaccgcctggccgagctgcaggaacagcttagagccgtccacgaacagctcgctgctctaagtcaggggcctatctccaagccgaagaggaagcgagagaagaaggaaaagaaaaagaaacgtaaagccgagaagcacaggggacgcgctggagctgatgaggatgacaaaggcccccgagcgcctcgaccaccccagcccaaaaagagcaaaaaagcctccggcagcggtggtggcagtgctgcccttgggccatccgggttcgggccctccgggggatctggaacaaaactccccaaaaaagccacgaaaacggccccccctgccctgcctaccgggtatgacagcgaggaagaagaagaaagccgccccatgtcctacgacgaaaaaaggcagctatccttggatataaacaaactccctggcgagaaacttggaagagttgtgcacatcatacaggcacgcgaacccagcctgcgggatagcaaccctgaggagatcgaaatcgatttcgagactctgaaacctagcactctgagggaactggagcgctacgttctctcatgcctgaggaaaaaacctcgcaagccttatacgataaaaaaacctgtggggaagacaaaagaagagctggctcttgagaagaaacgggagcttgaaaagagactccaagacgtgtctgggcaattgaactccaccaagaagcctccaaaaaaggcaaacgagaaaacagaatctagttcagcacagcaagtagcagtttcccggctgtcagcaagttcgagttcgtcagattcgagctcgagttccagttcctccagttcatctgatacctccgacagcgacagcggatag

SEQ ID NO: 180812 - DNA, 2424 bp, synthetic construct
  misc_feature 1..2424: note = Description of Artificial Sequence: Synthetic coding sequence
  source 1..2424: mol_type = other DNA
tgaaacggcggcggcggcagcgccaccgcccggggcggcgagtacagactgcccggggagggcaacgcagggctgttgggcttggggcctgaggccgccgccccagggaaaagaatccgtaagcctagtctcctctacgagggctttgagtcacccaccatggcctccgtccctgcgctccagttgacgcctgccaatccacctccacctgaagtgtccaacccaaaaaaacctggccgcgtaacaaaccaacttcagtacttacacaaggtcgtgatgaaggcactatggaaacatcagttcgcctggccatttcgacaaccagtggatgccgtgaaacttggactgcctgactatcacaagatcataaaacagccaatggatatgggcactatcaagcggagactggagaataattactattgggcagcctctgagtgcatgcaggacttcaataccatgttcacgaattgttacatctataataagcccaccgatgacatagttcttatggcgcagacactggaaaaaatttttctgcaaaaggtggccagtatgccacaggaagaacaggagctcgtggtcaccatccccaagaattcccataaaaagggggcgaaactggccgccttgcaggggtccgttacaagcgcccaccaggtcccagccgtgagtagtgtcagccataccgcactgtataccccccctccagagatacctaccaccgttctgaacattccccacccctctgtgatctccagtcccctcttgaaaagtctccacagcgccggtccacctctcctggcagtcacggctgcacctcccgcacaacctctggccaagaaaaaaggcgttaaaaggaaggccgacaccacgacccccactccaaccgccattctggcaccaggctctcctgcatcccccccagggtccttagaacctaaggcggcacggctgccgcccatgcgcagagaaagcggtcgccccataaaaccccctcgaaaggatctgcccgacagtcaacagcagcaccaaagttctaaaaagggcaagctgtctgaacaattgaaacactgtaatgggatactgaaagaattactcagtaaaaagcatgcagcttacgcctggccattttataaacctgtggatgcctccgcccttgggttgcacgactaccacgatattatcaaacaccccatggaccttagcaccgttaagcgtaaaatggaaaacagggactaccgcgacgcccaggagtttgccgcagacgtgcgcctgatgttctccaattgctacaagtacaatcctcccgatcacgatgtagtagctatggctaggaaactccaggacgtctttgaatttaggtatgccaagatgcccgacgagcccctggagccaggccctctgccggtctctacggctatgcctcctgggctggcaaaatcatcatctgagtcctcaagcgaggaatcttcttccgaaagttctagtgaggaggaagaggaggaggacgaggaggatgaagaggaggaagagagcgaatctagcgactcagaggaggagagagcccatcgccttgccgagttacaggagcagttgcgtgccgttcatgagcagctcgccgcactgtcccagggtcccatcagcaagccgaagaggaagcgcgagaaaaaagaaaagaagaaaaaaagaaaagcagagaagcacaggggccgagccggggccgacgaagatgataaaggtcctagagctccacggccaccacagcccaagaaaagtaaaaaggcctcaggatccggaggtgggagtgccgctttgggaccaagtgggtttgggccaagtggaggatccggaacaaaattgcccaaaaaagctaccaagacagctccccccgccctgccgaccggttatgatagcgaggaggaagaagagagcagacctatgtcttacgatgaaaagcgtcagctgtctcttgatattaataaacttcctggggaaaaattggggagggtcgtgcacattatccaggcacgtgaaccttccctgcgagacagtaacccggaagagatcgagatagactttgagacgttaaagccttctactctccgagagttggagcggtacgttttgagctgtctcagaaagaagcccaggaagccctatactatcaaaaaaccagtcggcaagacaaaggaagaactcgcccttgagaaaaagcgtgagctcgagaagcggttgcaggatgtgtcagggcagctcaacagtacaaagaaaccccccaagaaggccaacgaaaagactgagtcgagttcggctcagcaggtggctgtgtcccgactttctgcttcttcgtccagtagtgattcatcttcatccagcagcagttctagctcttccgatacaagtgactccgacagtgggtag

SEQ ID NO: 180813 - DNA, 987 bp, synthetic construct
  misc_feature 1..987: note = Description of Artificial Sequence: Synthetic coding sequence
  source 1..987: mol_type = other DNA
tgagccaagagcagcagcgagagcagcagcgaggagagcagcagcgaatcgtctagcgaggaggaagaagaagaagatgaagacgaagaagaggaggagtccgagtcttctgactcagaggaagaacgggcccacaggctggcagagttacaggagcagttacgggccgtgcacgaacagctagcagcactgtcacaaggacccatctccaagccaaaacgtaagcgggagaagaaagaaaagaagaagaaacgtaaagccgagaagcatagggggcgcgctggcgccgatgaggacgataagggccctcgtgcgcctaggccaccgcagccaaaaaagtcgaagaaggcgagtggtagtgggggcgggtctgcggctcttggccccagtggtttcggaccctctggcgggagcgggaccaagcttcccaagaaggccacaaagactgcaccacctgccctgcccacaggatacgacagcgaagaagaggaggagagcaggcccatgtcctacgacgagaagagacagctgtcccttgacattaacaagctccctggcgagaaactgggtcgtgtggtgcatatcatccaggcccgagaaccctctctgcgagattctaatcctgaggaaatcgagattgatttcgagacccttaagccctccacactgagagaactcgagcggtacgtgctctcctgtttgagaaagaagccgagaaagccttacacgatcaagaagccagtaggcaagacaaaggaggaactcgcacttgagaagaaacgggagttggagaagaggctgcaggatgtctcaggccagctcaattctaccaagaagcctccaaagaaggccaatgaaaaaaccgaatcatcttcggcgcagcaggtggcagtgtcccgattgtccgcttctagcagttcctccgattcttcctcatcctcctcgtccagcagttcctctgacactagcgattccgattcaggttag

SEQ ID NO: 180814 - DNA, 2511 bp, synthetic construct
  misc_feature 1..2511: note = Description of Artificial Sequence: Synthetic coding sequence
  source 1..2511: mol_type = other DNA
atgctgcagaacgtgaccccccacaacaagctgcccggcgagggcaacgctggcttgttgggtctcggacctgaggccgctgcccccggtaaacgcatacgtaaaccaagccttctgtacgagggtttcgaatcacccacaatggcatccgtgccggccctgcagctcacgcctgccaatccgccaccccctgaggtgtccaatccaaaaaaacctggacgggttacaaaccagctgcagtacctgcacaaggtcgtgatgaaagccctttggaagcatcagtttgcatggcccttccgccagcccgttgacgctgtgaaactggggctgcccgattaccataagattatcaagcagccaatggatatgggcacgatcaagcgacgcctagagaataactactactgggctgcctcagaatgtatgcaggactttaacactatgttcaccaattgctacatttataacaaaccaactgacgacattgtcctgatggcccagacactggaaaaaatcttcctccagaaggttgcgagcatgccccaggaagaacaggaactggtcgtgaccatacccaagaactctcacaaaaaaggggcaaaattggccgcccttcaggggtctgtgacatctgcccaccaggtcccagccgtgtcatctgtgagccatacagcactttacacccctccgcctgagattccaaccactgtgctcaatatcccccatccctcagtgatttcgtcaccacttctaaagagtctgcacagcgccggtccgcccttactggcagtcactgccgctccccccgcccagccactagctaagaagaagggagtgaagcgcaaggcagacaccacaacacctacacccacggcaattctggcccctggtagtcctgccagtcccccaggcagcctggaaccgaaagccgcacgcctgcctcccatgaggcgggaatcaggcaggcccattaaacctccaaggaaagacttgccggactcccagcaacaacatcaatcttcaaaaaaaggcaagctttccgagcagcttaaacactgcaacggcatcctgaaggagctgttaagcaagaagcacgccgcttacgcttggcctttctacaagccggtcgacgctagcgccctcggtctccacgattatcatgacataatcaaacaccctatggatctcagcaccgttaaacgtaaaatggaaaatcgagattatcgcgacgcccaagagttcgctgccgacgtccgcttgatgttttcaaactgctacaaatacaatcctccagaccatgatgtggtggccatggccaggaagctgcaagacgtgttcgagttcaggtacgccaaaatgcccgacgagcctctcgagcccggccctctgccagtgtcaactgctatgccccccgggttagcgaagagctcaagtgagtcaagttcagaagaatctagcagcgagagcagttcggaagaagaggaagaagaggacgaagaagacgaggaagaggaagagagcgaatcttccgacagcgaggaagagcgcgcccataggctcgccgagcttcaggagcaattaagggccgtgcatgagcaactggccgccctatcgcaggggcctatcagtaaacccaaacggaaacgtgagaaaaaagagaagaaaaagaagagaaaagccgagaagcaccgcgggagagccggggccgacgaggatgataaaggcccgagggctccaagacccccacaacctaagaagtcgaagaaggcttctggaagcgggggggggtcagctgcattaggcccatctggctttggtccaagcggggggagcgggacgaagctgcaggccggtgtccagtggcgcgacttgggtctgctgcagccgcctttactgggctttaagagattttcctgcctcagtctgcccagctctcaagattaccggctgcctaaaaaggccacaaagactgcaccacctgcattacccacggggtacgatagcgaagaggaggaggagtctagacctatgtcctatgacgagaagcgccagctttcactggacatcaataagctcccaggagagaagcttggtagagtcgtgcacattattcaggcccgtgagccaagcctcagggactcaaacccagaggagattgagattgacttcgagactctgaaaccctctacgctgagagagctggagagatatgtgctatcttgcctgaggaagaagcctagaaaaccgtatacgatcaaaaagcctgtggggaagaccaaggaagagctagcactggagaagaaacgcgaactggagaaacggctccaggacgtctctggccagcttaactcaactaagaagccccccaagaaggcaaatgaaaaaacagagtcctccagcgctcagcaggtcgccgtctctaggctctccgcaagttccagctcatccgattcctcttctagcagctcaagttcaagctcttcggacacatcagactcggatagcgggtag

SEQ ID NO: 180815 - DNA, 2424 bp, synthetic construct
  misc_feature 1..2424: note = Description of Artificial Sequence: Synthetic coding sequence
  source 1..2424: mol_type = other DNA
tgaaacggcggcggcggcagcgccaccgcccggggcggcgagtacaggttgcccggagagggtaacgcaggactgctgggcctcggacccgaggctgccgcaccagggaagcgaattaggaaaccatctttgctctatgaagggtttgagagcccaaccatggccagcgtgcctgccctgcagctgactcctgctaaccctcccccgccagaagtcagcaaccccaagaaaccaggcagggtgactaaccaactgcagtatctgcataaggttgtgatgaaagctctatggaaacaccagttcgcctggccgttccggcagcccgttgacgcagtgaagctgggacttcccgattatcacaaaataataaaacagccaatggacatggggacaatcaaacgaagacttgaaaataattattactgggctgcatctgaatgtatgcaggacttcaatacaatgttcacgaactgttacatttataacaagccgacagatgacatcgtgctgatggcacagactctcgagaagatattcctgcagaaggttgccagcatgccgcaggaggagcaggagcttgtcgtgaccataccgaaaaattcacataagaagggcgctaaactggctgcgcttcagggatctgtcacgtctgcccaccaagtgcccgctgtgtcctctgtgagccacaccgccctgtacacacctcctcccgagatccctacgacggttctgaacatcccacatccctctgtgattagttcccccttactgaaaagtctccactcagccggcccccctttgctcgcagtgacggctgcccctcctgcccaacccttggctaaaaagaaaggggttaaacgcaaggctgatacaacgaccccaacacccacggcaatcctggcccctgggtctcctgccagtccaccaggaagccttgaacctaaggcagcccgtcttccgccaatgagaagggagagcgggcggccaattaagcccccacgcaaagacttgcccgactcccagcaacagcatcagtcatcaaagaagggcaaactgtctgagcagctgaaacattgtaacggaattctgaaggaactgcttagtaaaaagcacgccgcctacgcctggccattctacaagcccgtggacgcatccgctctaggactgcacgactatcatgatattatcaagcaccccatggatctttctacagtaaaaagaaaaatggaaaacagggactatcgagacgcccaagagttcgcagccgatgtcagactgatgttcagcaattgttacaagtacaatccgcccgaccacgacgtcgtggccatggctcgcaaactgcaggacgtgttcgaattcagatacgctaagatgccagacgagcctctcgagccaggccccctgcctgtctcaactgccatgccacccggcctagccaagagttcatcggagagtagctccgaagaatcatcctctgaatctagttcagaagaggaagaggaagaggacgaggaagatgaagaagaagaggagtcagaaagttctgatagtgaagaggaacgggcccatcgattagcagagctgcaggaacagctgagggcggtgcatgagcagctcgcagcattaagccaggggccaatcagcaaacctaaacgaaaaagagagaagaaggaaaagaaaaaaaagcgcaaagccgaaaaacatcgcggtcgcgccggcgctgacgaagacgataaggggcccagggcgcctcgcccaccgcagccgaagaagtctaagaaggcttctggctctggtggtgggtccgccgcattgggcccatctggatttgggccgagcgggggtagcggtactaaacttccaaagaaggccactaagacagcccctcctgctctgcccacagggtacgacagcgaagaggaagaagagtcgaggcctatgtcttatgatgaaaagcggcagctgtctttggatattaacaaactgcctggggaaaagctgggtcgggttgtgcatattattcaggcacgagagccgtctttaagagatagcaacccggaagagattgagattgatttcgaaacattgaagccaagtacgctgagagagctggaacgctatgttctgtcttgtttgagaaagaagcctcgcaagccctatactatcaagaaacctgtcggtaagactaaagaggagttggccctggaaaagaagcgcgaactggaaaagaggctccaggacgttagcggacagcttaactcaaccaagaaaccccccaagaaggccaacgagaaaactgagtcgtcatccgctcagcaggttgctgtgtccagattgtccgcttcctcttcctctagcgattcatcttctagttcgtcctccagctcgtctagtgacacatcggatagtgattccgggtag

SEQ ID NO: 180816 - DNA, 2265 bp, synthetic construct
  misc_feature 1..2265: note = Description of Artificial Sequence: Synthetic coding sequence
  source 1..2265: mol_type = other DNA
atggccagcgtgcccgccctgcagctgacccccgccaacccccccccgcccgaggtcagcaatccgaagaagccaggtcgcgtgaccaatcagcttcagtacctccacaaggtggtcatgaaagcactgtggaagcatcagtttgcttggccattccggcagcctgttgacgctgtgaaactcgggttgccagattatcataaaataataaaacagcctatggatatgggtaccattaagagacgcctggaaaacaattactactgggcggcttcggagtgcatgcaggacttcaacaccatgttcactaactgctatatctacaataaaccaactgacgacatcgtcctgatggctcaaactctagagaagatttttctacagaaggtggcctcgatgcctcaggaagaacaggagctcgtagtgaccatccccaagaacagccataagaagggggccaaactggcggctctccagggaagtgttactagcgctcatcaggtccccgcagtctctagtgtgagtcacacagcattgtataccccccctccagagattcccacgacggtgctcaacatccctcatccttctgtcatctctagcccccttctcaagtcacttcattccgccggtcctcctttactcgccgtaactgcagcacctcccgctcagcctctcgcgaaaaagaaaggtgtgaaacgaaaggctgacaccactaccccaaccccaactgctatcctggcccccgggagccctgccagcccaccggggtccctcgaacctaaggcagcccgccttccgcccatgcgccgcgagagcgggagaccgattaaacctccaaggaaagatctacctgatagccagcaacagcatcaaagcagtaaaaaaggtaagctctctgagcagctcaagcactgcaacggcatcttaaaagagctgctttccaagaagcatgcagcttacgcatggccattttacaaacctgtggatgcgagtgctttgggacttcacgattaccatgacatcattaaacatcccatggacctctctactgttaaacgcaaaatggaaaatagggattacagagatgctcaggaattcgcagccgacgttagactcatgttcagtaattgctacaaatataaccctccagaccatgacgtggtggctatggccagaaagcttcaagacgtcttcgagtttcggtatgcaaaaatgccagatgagccccttgagccgggtcccctgcccgtttctacagcaatgccccccggtcttgcaaagagcagctcagaatcaagcagcgaggaaagttcctccgagtcatcatccgaggaagaggaggaggaggatgaggaagatgaggaggaagaagaaagcgagagtagcgattctgaggaggagagagcccatcgactggcagagctgcaagagcagctgcgggctgtccatgagcagttggccgccttgagccagggcccaatatctaaacctaaaagaaaacgcgaaaagaaggagaagaaaaaaaagaggaaagcagagaaacatagaggccgggctggggccgacgaggacgacaagggcccccgtgcccccaggcctccccaaccgaagaagagtaagaaagcaagcggtagtggcggtggcagtgctgccctgggtccttcaggatttggacccagcggagggtccgggaccaagctgcccaaaaaggccactaaaacagcaccacctgccctccctactggatacgatagtgaggaggaggaggaaagccgacccatgtcttacgacgagaagaggcagttgagcctggatatcaacaagctcccaggagagaagctagggcgtgtcgtgcacattattcaggcacgtgagccaagccttcgagattcaaatcctgaggagatcgaaatcgattttgagacactcaagccgagcactttgagagaactagagcggtacgtcctctcatgcttacggaagaaacctcgtaagccttatactatcaagaaaccagtgggtaagacaaaggaagagctcgcccttgaaaaaaagcgcgagctggagaagcgattacaggacgtgagcggccaacttaactctactaaaaaaccaccgaagaaggcgaatgaaaagaccgaaagctccagtgcccagcaggttgctgtatcacggttgtcagcaagctccagctcttcggacagctcgtcatctagctccagttctagtagctccgatacttctgattccgatagtggctag

SEQ ID NO: 180817 - DNA, 2406 bp, synthetic construct
  misc_feature 1..2406: note = Description of Artificial Sequence: Synthetic coding sequence
  source 1..2406: mol_type = other DNA
atgctgcagaacgtgaccccccacaacaagctgcccggcgagggcaacgcggggcttctgggactaggaccagaagcagcagcaccaggcaaaaggatcaggaagccctcactgctgtatgagggattcgagagtcccacgatggccagcgttccggccctgcagctgacccccgccaacccacctcccccagaagtgtcaaaccctaagaaacctggcagggtgacaaatcagctgcagtacctacacaaggtggtcatgaaggctttatggaaacaccagtttgcctggcctttcagacagccagtggacgccgtcaaactaggcctgccagactaccataagataatcaagcagcctatggacatgggcactattaaacgtcggctggaaaacaactactattgggcagcatccgagtgcatgcaggacttcaacaccatgtttacaaactgttacatatacaataaacctactgacgatattgtccttatggcccagacactagagaagatttttttacagaaggttgcttctatgcctcaggaagagcaggaactcgtcgtgaccattccaaaaaattctcataagaagggagcaaagttagccgctcttcagggatctgtgacttctgcgcatcaggtgccggccgtgtcaagtgtctcccacaccgcactgtatactcctcctccggaaataccgactaccgtgttcaacatcccacatccgtctgtcatttcatccccgctgttaaagtcacttcactccgccgggcctccattgcttgcagtcactgctgccccccctgcacagcctcttgccaagaaaaagggtgtgaaacggaaggcggacacaactacacccaccccaacggctattctggcccccggaagcccagcaagccctccaggatctctcgaacctaaagcggccagactgccccctatgcgcagagagtctggcagacccatcaaacctcctaggaaggacctgcctgattcccagcaacaacaccagtccagtaagaagggaaagctctcagagcaattgaagcattgcaatgggatcctaaaggagcttttgagtaagaagcacgccgcctatgcctggcctttttacaaacccgtagacgcctccgcattgggtctgcatgactaccatgatatcataaagcatccaatggacttgagcacagtgaagaggaaaatggaaaacagggattacagggacgcccaggagttcgctgctgacgttaggctcatgttcagtaattgctacaagtacaacccgcctgatcatgacgtggtagccatggctcgcaaactccaagacgtgtttgaatttcggtacgcaaaaatgccagacgagcccttggagcctggccctctgccagtaagtacagctatgccccccgggttggctaagtctagctccgaaagctcttccgaggagtcttccagcgagtcttctagcgaggaggaggaggaggaggacgaggaggacgaggaagaagaggagtctgaaagttccgattcagaggaggagagggcgcatcgattggcagaactgcaggaacagctgcgcgctgtccatgagcagttggcagctctctcccaaggaccgatctcaaaacccaagaggaagcgggagaaaaaggagaagaaaaagaagagaaaagccgaaaagcatcgggggcgcgcaggcgccgatgaagacgataaggggccgagagccccgaggccgccccaaccaaagaagtctaagaaagcctcaggcagtggcggagggtctgcagccctcggtcctagtggattcggaccatccggaggttcgggcacaaaactgcccaagaaagctacgaaaacagccccgcctgctctgcctacaggttacgatagcgaggaagaagaggagagcaggcctatgtcctacgacgagaaacgccagctttctctggatattaacaaacttcctggcgagaagttgggccgcgtggtgcacattatccaggctagggagccaagcttgcgagatagcaacccggaggagatcgaaattgacttcgaaaccctgaaaccaagcaccctcagagaattggaacgatatgtgttgtcctgtctaagaaaaaaaccgcgcaagccgtatacgattaaaaaacccgtggggaagaccaaggaggagcttgctctggagaagaagcgagagctggaaaaaagacttcaagacgtgtctggccagctgaactccacaaagaaaccccctaagaaagcgaacgagaaaaccgagagctccagcgcacagcaagtcgctgtgtctcggctctcagcttcatctagctcttctgacagctcttcaagtagcagcagctcctcttcttccgacaccagcgattctgattcgggatag

SEQ ID NO: 180818 - DNA, 891 bp, synthetic construct
  misc_feature 1..891: note = Description of Artificial Sequence: Synthetic coding sequence
  source 1..891: mol_type = other DNA
tgacggcccctgggcgtgcagcagcccggcgcccggctgcccggcgagggaaatgccggactcctgggcctgggacctgaagcggctgcccctggcaagaggatcaggaagccaagcctcctgtatgaagggttcgagtcacccactatggcatccgtcccagcattacagctcacacctgccaatccccctcccccggaggtgtcaaatcctaagaaacccggtcgggttactaaccagctacagtacctgcataaggtagtgatgaaagccctttggaaacatcagttcgcttggcccttcagacagcctgtggatgcggttaagcttggactgcctgactaccacaaaatcattaagcagcccatggatatggggaccattaagaggcggctggagaataactattattgggcggcttccgagtgcatgcaggacttcaataccatgtttacgaattgctatatttacaataagccaaccgacgacatcgtactgatggcacagacactggagaagatttttctccagaaagtggccagcatgccccaagaggagcaggaacttgtcgtcactattccgaaaaactcacataagaagggcgccaaactggccgcactccagggaagcgtcacaagcgcacatcaggtccctgccgtttcatctgtaagccatactgctctctataccccgccacctgagatcccaactaccgtactcaatattccacacccaagcgtgatttcctccccactgctcaagagcctccattcagcaggaccccctcttctggccgttacggccgctcctccggcacaacccctggcaaagaagaagggggtgaagagaaaagccgatacgactacaccaacacccacagctatcttatag

SEQ ID NO: 180819 - DNA, 2511 bp, synthetic construct
  misc_feature 1..2511: note = Description of Artificial Sequence: Synthetic coding sequence
  source 1..2511: mol_type = other DNA
atgctgcagaacgtgaccccccacaacaagctgcccggcgagggcaatgccgggctgctgggactgggtcccgaggccgccgcgccagggaagagaataagaaaacctagccttttgtacgaagggttcgagagccctacaatggctagtgtacctgccctacagctcactccagccaacccaccgccccctgaagtttccaatcccaagaaaccaggacgcgtgaccaaccagctgcagtacctccacaaggtggtgatgaaggctttatggaagcatcaattcgcgtggccgttcaggcaacccgtcgacgctgtcaaattaggtctccctgattatcacaagatcatcaaacagcctatggacatggggaccatcaaacggcggctggagaataattattattgggcagcttctgagtgcatgcaggacttcaacaccatgttcacaaactgttatatctacaataagcctaccgatgacatcgtactgatggcccagactctcgagaaaattttcttgcagaaggtggccagcatgccacaggaagagcaggagctggtcgtgaccatccctaagaactcgcacaagaagggtgctaagcttgcagccctgcagggttctgtgacgagtgcccatcaagtcccagccgtttcaagcgtctcccacacagccctgtacaccccccctccagagataccaactacagtttttaacatcccccacccaagtgtgatctcaagtcctttattgaagtcattgcactcagccgggccccccctgttggctgtgactgcggctcccccagcccaacctctcgcaaaaaagaagggggtcaaacggaaagctgacacgacaaccccaactccaaccgccatacttgcgccaggttctcctgcttcacccccgggttcgctggagccgaaggccgccagacttcctcctatgcgaagggaaagcggtcgtcctatcaagcctcctagaaaggacctgcccgattcacagcagcagcaccagtctagcaagaaggggaagctgtctgaacagctgaaacattgcaatggtatcctcaaagagttgcttagcaagaagcatgccgcctacgcctggccattttacaaaccagtcgatgcctccgccctgggtttgcacgactaccatgatatcatcaaacacccaatggacctgtccacagtgaaaaggaaaatggaaaacagggactaccgtgacgcccaggagttcgcagctgatgtacggctgatgttcagtaattgttacaagtacaatccaccagaccacgacgtagtcgcgatggctcgtaaactgcaggatgtgtttgaattcaggtacgcaaaaatgcccgatgaacccctcgaacccgggcctctgcccgtttccaccgctatgcccccagggttagccaaatccagcagcgagtcttcctctgaggagagtagcagcgagagtagttcagaagaggaggaggaggaggacgaggaagacgaggaagaagaggagtccgagtccagtgattccgaggaagaaagggcacatcgcctggctgaactccaggagcagctgcgagcagtccatgagcagctggccgcactgtcacagggacccatttcaaaacctaagagaaaacgggagaagaaggagaagaaaaagaagagaaaagctgagaaacacagagggagagccggagctgacgaggacgataagggtcctcgagcgcccagaccccctcaacccaaaaaaagtaagaaagcctcaggcagtggaggcgggtcagccgcgctaggacctagcggttttggaccatctggtggaagcggtacgaagcttcaggctggagtacagtggcgcgacctggggctccttcagccccccctgcttggattcaagcggttcagttgccttagcttaccttccagccagaattaccggctgccaaaaaaggccaccaagactgccccgccagccctacctacaggctatgacagcgaagaagaggaggaatccaggccgatgtcatatgatgagaagagacagctgtctctggacatcaacaagctgccaggtgaaaagctcgggcgggtggtgcatatcatccaagcccgcgaaccatccctgcgggattcaaaccctgaagagatcgaaatcgacttcgagaccctgaagccgagtacattgcgggagctcgagagatacgtcctgtcttgcctgcgcaaaaagccaagaaagccgtacactatcaagaagccggtggggaaaacaaaggaagagctcgcccttgaaaagaaacgcgaactggagaagagacttcaggatgtctccgggcagctaaatagcacaaagaagccccccaagaaggctaatgagaagacagagtcctcttccgcacagcaggtcgctgtgtctagactgtctgcctcttccagtagtagtgactcttcttcttcaagctcctcttcgagctcttctgacacgtccgatagcgactctgggtag

SEQ ID NO: 180820 - DNA, 987 bp, synthetic construct
  misc_feature 1..987: note = Description of Artificial Sequence: Synthetic coding sequence
  source 1..987: mol_type = other DNA
tgagccaagagcagcagcgagagcagcagcgaggagagcagcagcgagtcctcttcagaagaggaagaggaagaggacgaagacgaagaagaagaggagtctgagagctctgattcagaggaggagagggctcatcggctcgcggaacttcaggaacaactgagagccgtgcatgagcaactggctgccctttcccaggggcccatctcgaagcccaaacggaaaagggagaaaaaagagaaaaaaaagaaaaggaaagcggagaagcacagaggtcgagcgggtgccgatgaagatgacaaaggaccacgggccccacggcctccccagccaaagaaatctaaaaaggcttccggatccggtggaggtagtgctgcactcggaccctcaggatttggaccctctggtggctccggtactaaactgccaaagaaggctaccaaaacggctccacctgccttgcccaccgggtatgactccgaggaggaggaggagtctcgtcccatgtcctacgacgagaaacgccagcttagcctggatattaataagttgccaggcgaaaaactgggaagggtcgtgcatatcatccaggcaagggaaccaagcctgcgcgattcaaacccagaggagatcgagattgacttcgagactctgaaacccagcacgctgcgggaactcgagaggtacgtcctgtcctgcctacgcaaaaagcctcggaagccctacactatcaagaaaccagtaggtaaaactaaagaggaattggccctcgaaaaaaagcgggaactcgagaagaggctccaggatgtgagcggtcagttgaattctactaagaaaccgccaaagaaggcgaatgagaaaactgagtcctcctccgcgcaacaagtagccgtgagtaggctcagtgcctccagttccagctccgatagctcaagctcatcttcttccagctcgagcagcgacacatccgactctgactctggctag

SEQ ID NO: 180821 - DNA, 891 bp, synthetic construct
  misc_feature 1..891: note = Description of Artificial Sequence: Synthetic coding sequence
  source 1..891: mol_type = other DNA
tgacggcccctgggcgtgcagcagcccggcgcccggctgcccggcgaaggaaatgccggtctcctcggcctcgggcctgaagcggctgcccccggcaaaaggattagaaagccaagtttgctctatgagggatttgagagtcccaccatggcgtctgtgcctgcacttcagctgactcctgccaacccccctccgcccgaagtgagcaatccgaagaagcccggacgggtaacaaatcagctccagtatctgcataaggtcgttatgaaggctctgtggaagcatcaatttgcttggccatttcgccagccggtggatgccgtcaagttgggcctcccagactatcacaagatcatcaagcagcccatggacatggggactatcaagagacgactggaaaacaactattattgggccgcctccgagtgtatgcaagactttaacaccatgttcacaaactgctacatttacaacaaacccacggacgatattgttcttatggcgcagaccttggaaaagatcttccttcaaaaggtggctagtatgccacaggaagaacaggagctggtcgtgacaattcccaagaactcccacaaaaaaggggctaagctggccgctctgcaaggatccgtgaccagcgcacatcaggtcccagcggtcagcagcgtgagccacaccgcactatacacaccaccccccgaaattcccactactgtcctgaatatccctcatccctcagtgatctcgtcgcccctgttgaagtccctgcacagcgctggtccacccttgttggcagttactgcagccccccctgcacagccgttagccaagaagaaaggggtgaagcggaaggccgacacaacaactcccaccccaactgctatcctttag

SEQ ID NO: 180822 - DNA, 891 bp, synthetic construct
  misc_feature 1..891: note = Description of Artificial Sequence: Synthetic coding sequence
  source 1..891: mol_type = other DNA
tgacggcccctgggcgtgcagcagcccggcgcccggctgcccggcgagggaaacgcaggcctcctgggccttggacctgaggccgccgctccaggaaagcggattagaaagccctccctgctgtatgaggggtttgagagccccaccatggcttctgtgcctgctctgcaacttacaccggctaatccaccccctcctgaggtttccaaccccaagaaaccgggtagggtgacaaatcagctccaatacctgcataaagtcgtcatgaaggctctttggaagcaccagtttgcctggccctttcggcaacccgtggatgctgtcaagctgggtctccccgactatcacaagatcatcaagcagcctatggacatggggaccatcaaaagaaggctggaaaacaattactattgggccgctagcgagtgtatgcaggatttcaatactatgttcaccaactgttacatctataacaagcctaccgacgacatcgtgctgatggctcaaacactggagaaaatcttcttacagaaagttgcatctatgccacaggaagagcaggaacttgtggttactataccaaaaaattcccataaaaaaggcgccaagctggcagctctgcaggggtctgtgaccagtgcccaccaggtgcctgctgtctcatcagtctctcacacagctctctataccccacccccggagattccaaccactgtgctgaacatacctcaccctagcgtcatctccagcccgctgttgaaaagcctgcacagcgccggcccacctctcctggcagtgactgccgcgccaccagcccagcccctggccaaaaagaagggcgttaaacgaaaggccgacacaactacacccacaccaacagctatcctttag

SEQ ID NO: 180823 - DNA, 1860 bp, synthetic construct
  misc_feature 1..1860: note = Description of Artificial Sequence: Synthetic coding sequence
  source 1..1860: mol_type = other DNA
tgaaacggcggcggcggcagcgccaccgcccggggcggcgagtacaggctgccgggagaagggaacgcgggcctgttgggtttaggtcccgaggcggcggcaccaggtaaacgcatcagaaagccgagcctcctgtacgaagggtttgagagtcctaccatggcttctgtgcctgccctgcagcttacgccagcgaatccgcctcctccggaggtgtctaatcctaaaaagcccggccgggtcaccaaccagctacagtacctgcataaggtcgtcatgaaagccttatggaaacatcaatttgcctggcctttccggcagcccgtggacgcggtgaagcttggactgccagattaccacaaaataatcaaacagccaatggacatgggaaccatcaaaagacgccttgagaacaattattactgggctgccagcgaatgtatgcaagactttaacaccatgtttacaaattgctatatctataataagcctacagacgacatagtgttgatggctcagactctagaaaagatttttctgcaaaaggtcgcttcgatgccccaagaggaacaggaactggtggtcaccattcccaagaattcccacaaaaagggcgctaagctagccgccttgcagggcagcgtgacatccgcgcaccaggtgcccgccgtctcatctgtgtcgcataccgcattatacacccccccgccggagattcctacgaccgttctaaatatccctcatccctcggtcattagttctcctcttctcaaaagcctgcatagcgccggcccccctttattggcagtaaccgccgcacccccggcacagccccttgcgaaaaaaaagggggtaaagcgcaaggcagacactacaactcctacccccactgcaattctggcccccggttctcccgcatctcctcccggctcccttgagccaaaggctgctagattgcctcctatgaggcgtgagtccgggcgcccaattaaacctcctcgcaaagaccttcccgatagccagcagcagcatcagtcttcaaagaagggtaaattaagtgagcagctgaaacactgcaatggtatcctaaaggagctattgtccaagaaacacgctgcttacgcctggcctttctataagccagtcgatgcttcggccctgggcttacatgactatcacgacattatcaagcacccgatggatctgagcactgttaagcgtaagatggaaaatcgagactatcgggacgcgcaagaatttgccgccgacgtgcgccttatgttttccaactgttataaatataaccccccagaccatgatgtggttgcgatggctcgaaagctccaggacgtgttcgaattcaggtatgctaaaatgccggacgagcctctcgaacctggccctctgccagtgtccaccgccatgcctcccggactggccaaatcgagctccgagagctcaagcgaggaaagtagctcagaaagttcctccgaggaggaggaggaggaggacgaggaggacgaggaagaagaagagagcgagtcctctgactcagaggaagagcgggctcaccggctcgccgagctgcaggagcagcttcgcgccgtgcacgagcagctggcggctctcagccaggggccgatctcgaagccgaagagaaagagagaaaaaaaggagaaaaagaagaagcggaaggcagagaagcacagggggagggcaggagctgatgaagacgacaagggcccccgcgctcccagacctccacagccgaagaagtctaagaaggcctctggctctgggggaggatcagcggcactgggcccctcaggctttgggcctagcggaggatcgggaacctag

SEQ ID NO: 180824 - DNA, 987 bp, synthetic construct
  misc_feature 1..987: note = Description of Artificial Sequence: Synthetic coding sequence
  source 1..987: mol_type = other DNA
tgagccaagagcagcagcgagagcagcagcgaggagagcagcagcgaatcgtcttcggaggaagaggaagaggaggatgaggatgaggaggaagaagaatcagaatctagtgacagcgaggaagagcgggcacatcgcctcgctgaactccaggaacagcttcgagcagtgcacgagcagcttgcagccctcagtcagggtcccatatctaagcccaaacgaaaacgcgaaaagaaggaaaagaaaaagaaaagaaaagctgaaaagcaccgagggagagccggcgcggatgaggacgacaagggtccaagagcacccaggccaccacagcctaaaaaatccaaaaaagcctccggctcagggggaggtagcgccgcactcggacccagcgggttcggccccagcggcggctcgggaacgaagctgcctaagaaggccacgaaaacagcccctccggctcttcctaccggctatgattcggaagaagaggaagaaagtcggcccatgagctacgacgaaaagcggcagctttccttggacatcaataaactacccggcgagaaactgggccgagtagtccacatcatccaagccagggaacctagcttgagagattcaaatccggaggagatcgaaattgatttcgagactcttaagccgagcaccctgagagagcttgagcggtatgtcttgagttgtctgcgcaagaaaccgaggaaaccctacacgataaaaaaaccagtcggcaaaactaaagaagagctagccctggagaagaaacgtgagcttgaaaaacggcttcaagacgtttccggtcaactaaacagcaccaaaaaacccccaaaaaaagccaacgagaagactgagagcagttctgcacagcaggtcgcagtgtcaagactgagtgcatcatccagttcatcagattcctcttctagctccagtagttcatcttctagcgacacttctgattccgattctggatag

SEQ ID NO: 180825 - DNA, 2046 bp, synthetic construct
  misc_feature 1..2046: note = Description of Artificial Sequence: Synthetic coding sequence
  source 1..2046: mol_type = other DNA
atggacatgggcaccatcaagcggcggctggagaacaactactactgggccgcttcagagtgcatgcaagacttcaataccatgtttactaactgctatatttataacaaacccacggatgatattgtgctgatggcacagactctcgagaaaatattccttcagaaggtagccagtatgccacaggaggaacaggaattggtcgtcacaatccctaagaactcacacaagaagggagccaagctggcagccctgcagggtagtgtcaccagcgcccaccaggtcccggctgtgtccagtgtgagccacacggccctgtacacaccacctcctgagattcccacgaccgtattcaacattccccatcccagtgtgatttcttcacccttgctgaagtcattgcacagcgccgggccacccctcctcgccgtcactgcagcccccccagcgcagccactggctaaaaagaagggcgtgaagcgcaaggccgacacgacaacacccacccccacagctatcttggcccccggttctcccgcctccccccctggcagtctcgagccaaaagctgcccggttgccccccatgaggcgagaatctggccggcccattaagccgccccgcaaagacctgcccgacagtcagcagcaacatcagtcttccaaaaaagggaagttgtccgagcagctcaagcattgtaatggcatcctgaaggagctcctgtccaagaagcatgcggcttatgcatggccgttctacaagcccgtcgacgccagtgcactgggtttgcacgattatcatgacatcatcaaacatcctatggacttgagtaccgtgaaacggaagatggagaatcgggattatcgggatgcacaggaatttgctgccgacgtacgactgatgtttagcaactgttacaagtacaatcctcctgaccatgacgtcgtcgccatggctcgaaagcttcaagacgtatttgaattccggtacgcgaagatgcctgacgagcctttggagccggggcctctcccggtgtcaacagccatgccccctggattggctaaatcatcctccgagagctcgtcggaggagtcatcctcagaaagcagttctgaagaggaggaggaagaggacgaggaagacgaggaggaagaggagagcgagtcatccgacagcgaagaagaaagggctcatcgcctcgccgaattgcaggagcagcttcgagcagtgcatgagcagctcgctgccttgtcccaaggtcccatttccaagcccaaacgaaaacgtgagaagaaggagaagaagaaaaaacgaaaggcagagaagcaccgaggccgcgccggagccgatgaggacgacaagggcccacgagcccctcggcctccccagccaaaaaagagtaagaaggcttctggaagcggtggcgggtccgctgcacttggaccatccggcttcggtccttccggggggagcggcaccaagctgccaaagaaggccaccaagaccgcaccgcccgcactgcctactggttacgacagcgaagaggaagaggaatccagacccatgtcttacgatgagaagcggcagttgtcgcttgacattaataaattacccggtgaaaaactggggcgggtcgtgcatattatccaggcgcgcgagccctcgctacgggatagcaatcccgaagagattgagattgatttcgaaacactgaagccctccactttgcgtgaactggagcggtatgtgctgagctgcttgagaaagaagcctcgtaaaccttacaccatcaaaaaacccgtagggaaaaccaaagaggagcttgcgctagaaaagaaaagagagctagagaaacgcctgcaggacgtttccggtcaattaaatagcacaaagaagccacccaagaaagcaaacgaaaagaccgagtcctccagcgctcagcaggtcgccgtcagtcgtctctccgctagtagcagtagctcagattccagcagcagctcttcatcatcaagttcaagcgatacctctgattcagactcagggtag

SEQ ID NO: 180826 - DNA, 2265 bp, synthetic construct
  misc_feature 1..2265: note = Description of Artificial Sequence: Synthetic coding sequence
  source 1..2265: mol_type = other DNA
atggccagcgtgcccgccctgcagctgacccccgccaaccccccccctcctgaagtgtccaaccccaaaaaacctgggcgagtgaccaaccagctgcagtacctgcacaaagtggtaatgaaagcattgtggaagcatcaattcgcctggcctttccgacaaccagtcgacgccgtgaagctgggattgcccgactatcacaaaattatcaaacagcccatggacatgggaaccatcaagcgaagacttgaaaacaattattattgggcagcctccgagtgtatgcaggattttaatactatgttcacgaattgctacatctacaataaaccaaccgatgatattgtgctgatggcccagactctggagaagatcttcttgcagaaagtcgcatctatgccccaggaagaacaagaactcgttgtgacaattcctaaaaatagccataagaaaggagctaagctggctgcccttcaaggctctgtcacaagcgcccaccaggtgccggctgtgagctccgtgtcacatacggcattgtatacgccaccccctgaaatccccaccacagtattcaacatccctcaccccagtgtcatcagttcgccactgcttaaatcactgcattctgcggggccaccgctcctcgctgtaaccgccgctccgccagcccagccactagcgaagaagaaaggcgtgaaaaggaaggccgatacgaccacacccactcctaccgcaattctcgctccaggctctcccgcaagccctcctggcagtcttgaacccaaagctgcgcggttaccaccaatgcggagagaatcggggcgccctatcaagcccccaagaaaagaccttccagatagccagcagcagcaccaatcttctaagaaggggaagctgtctgaacaactgaagcactgtaacgggatcctgaaggagttgctgtccaagaagcacgcagcctacgcttggccgttttacaagcctgttgacgcctcagctcttgggttgcacgattaccacgacatcatcaaacacccaatggacctgtcaacagtcaaaagaaagatggagaatagggactatcgggacgctcaggagtttgcagctgatgtacggttgatgttttcaaattgctataaatataatcctcccgaccacgacgttgtcgccatggcacggaaactccaggacgtgtttgagttcaggtacgcgaaaatgccagacgaacctctggagcctggccctcttcctgtgagtacagccatgccgcctggactcgctaagtcatctagcgaatctagctcagaagagtcttcttctgagtcgagttctgaagaggaagaggaggaggacgaggaggacgaagaggaggaagagagcgaaagcagcgattccgaagaagaacgagctcaccgcctcgctgaactgcaggaacagctgcgtgctgtccatgagcagcttgcagctttatcccagggtcccatatcgaaaccaaagcgaaagcgagagaagaaggagaaaaagaaaaaaagaaaagccgaaaaacacaggggcagagcgggggcggacgaggatgataaagggccccgagctccaaggcctccccagcctaaaaagtctaagaaggcgtctggctctggaggaggtagcgcagcactgggacccagcgggtttggaccgtccggtggaagcggcaccaagctgcccaaaaaggctaccaagaccgccccccccgccctcccgacaggatacgattccgaggaggaggaagagtcccgtcccatgagttatgatgaaaaacgccagctgtctctggatataaacaagctgccaggagagaaactaggcagagtggtgcacatcatccaggcgcgagagccaagcctgcgagacagtaatcccgaggagatcgagatcgatttcgagaccctgaagcctagtacacttcgagagctggagcgatatgttcttagctgcttgcggaaaaagccaaggaagccttacacgataaagaagcccgtgggcaagacgaaagaagagctggcgttagagaagaagagagaactggagaagagactccaagacgtgagcgggcagctaaactctactaagaagccgcctaaaaaggctaacgaaaaaactgagtctagctctgctcagcaagtggctgtcagcagactcagcgcatcttcttcatcatctgatagttcaagctcaagcagttctagctcttcctccgatacgtctgatagcgatagcggctag

SEQ ID NO: 180827 - DNA, 2511 bp, synthetic construct
  misc_feature 1..2511: note = Description of Artificial Sequence: Synthetic coding sequence
  source 1..2511: mol_type = other DNA
atgctgcagaacgtgaccccccacaacaagctgcccggcgagggcaacgctggtttactgggactgggacccgaagctgctgcacctggcaagcgcattcggaagcctagtctcctctacgaggggtttgagagccccaccatggcctctgtacctgctcttcagctgacccctgccaaccctccaccacctgaggtttctaaccccaagaagcccggacgagtaacgaaccaacttcaatatctccacaaggtggtaatgaaagctctgtggaaacaccaatttgcgtggccctttcggcaacctgtagacgcagtcaaactcggactgcctgattatcataaaataattaagcagcctatggatatgggcacaatcaagaggaggcttgaaaacaactactactgggctgcgtccgaatgcatgcaggactttaacacaatgttcacaaactgttacatttataacaaacctacggacgacattgttctgatggcccagactcttgaaaagatctttttgcagaaggtagcctctatgcctcaggaagaacaggaactggtcgtgacaataccaaagaatagccataagaaaggcgccaagctggccgctcttcagggctctgtgactagcgcccaccaagttcccgctgttagctcagtgtcgcatactgctttgtacactcctccgcctgagatcccaacaacggtcctgaacatccctcatccgagcgtgatctcttcccccttgctgaaatctctgcacagcgccgggccgcccttactcgcagtgacagctgcaccacctgctcaacccctagccaagaaaaagggggtgaagaggaaggccgacactacaacccctacccctaccgcgatcctagctcccggcagccccgcgtccccgcccggttctctggagcctaaggctgcccggttgccaccaatgcgccgcgagtctggcaggcctatcaagccccctcgcaaggatctgcccgactctcagcaacagcaccaaagctctaaaaagggcaagctgtccgagcagctcaagcactgtaatggcatactgaaggagctactgagcaaaaaacatgccgcgtacgcatggcccttttacaagcccgtagacgcatccgctttgggattgcatgattaccacgacattatcaaacacccaatggatctgtctactgtcaagaggaagatggaaaacagagattaccgggacgcccaagagtttgcagccgacgtgaggttgatgtttagcaactgttacaagtacaacccacccgaccacgatgtggttgcaatggcccgcaagcttcaggacgtatttgaatttagatacgctaagatgcccgacgagcctctcgaaccaggcccgctcccagtttccacagcgatgccaccgggtctggcaaaaagttcttccgaatcctcgtccgaggagtcttcctctgagtcctccagtgaggaagaggaggaggaggatgaagaggatgaggaggaagaagaatctgagtctagtgactcagaggaagaacgggcccatagacttgcggagttacaggagcaattaagagctgtccacgagcagctggctgccctgagccaaggtcccatctccaaaccgaagagaaaacgggagaaaaaggagaaaaagaaaaaacgcaaggcagagaagcaccgtggcagggctggcgctgatgaagatgataaggggccaagggccccaaggccaccccagcccaaaaaatccaagaaggcatcagggtcggggggcggcagtgccgcccttggcccaagtggattcggaccaagcgggggctctggtaccaaactgcaggctggcgtccagtggagggatctggggttgctgcagccaccactcctgggatttaaaagattcagttgcctgagtctgcccagttcacaggattaccgcctcccgaaaaaagctacaaagaccgctcctcccgctttgcccacgggctacgactcggaagaggaggaggagagcaggcctatgtcctatgacgagaagaggcagctcagtctggacataaacaagctcccaggagagaagctgggacgagtagtgcacatcatccaggcgagagagccatccctgcgtgatagcaaccctgaggagatcgaaattgatttcgagaccctgaaaccttctactctgcgggaattagagcgttacgtgttatcatgtctgcgcaagaagccgcgcaaaccatacacgatcaagaagcccgtgggaaagacgaaagaagagctcgctctggaaaagaaacgcgagctggagaagaggttgcaagacgtgtctggtcagttaaattccacaaagaaacctcccaagaaagcgaatgagaagaccgagtctagcagcgcccagcaggtcgcggtcagcaggctctctgcgtctagctcctcgagcgactcttcgtctagctcaagtagctcaagctcttctgacacaagtgatagtgactcaggctag

SEQ ID NO: 180828 - DNA, 2046 bp, synthetic construct
  misc_feature 1..2046: note = Description of Artificial Sequence: Synthetic coding sequence
  source 1..2046: mol_type = other DNA
atggacatgggcaccatcaagcggcggctggagaacaactactactgggcagctagcgaatgtatgcaagactttaataccatgtttacaaactgctacatctataacaaaccgaccgacgacattgttctgatggcacagactcttgagaagatctttctccaaaaagtggcatcaatgcctcaggaggaacaggagctggtagtaacaattcccaaaaattcacacaagaaaggcgccaagctcgcggctttgcaggggtccgtgacgagtgcacatcaagttcctgccgtgtctagtgtatcgcacacagccctttacacaccaccccctgaaatcccaactaccgtacttaacataccccatccctcagttatcagcagcccactactaaaaagcctgcattctgccggccccccgctgctcgcagtgaccgcagccccaccggcgcagccattggcgaagaaaaaaggcgtgaaacgtaaagctgacaccacgacccctacaccaactgccatcttggcacccggcagccccgctagtcccccgggatctctcgagcctaaggctgccaggttaccgcctatgaggcgggagtctggccggccaataaagccaccaaggaaggaccttcctgattctcagcaacagcaccaatctagcaaaaaggggaaactttctgagcaacttaaacactgtaacggaatcttgaaggagctcctcagtaagaaacacgctgcatatgcctggccattctacaagcctgtggatgcctcagctctcgggctccatgattatcatgatattattaaacatcctatggacctgtcaacggtgaaaaggaaaatggagaacagggactatagggatgcgcaagagtttgccgccgacgtgcgccttatgttttcgaactgctacaagtacaatccccccgatcatgacgtggtagcaatggctaggaaattgcaagatgtctttgaatttagatatgcaaagatgcccgatgagcccctcgaaccaggtcccctacccgtttcaacggccatgccaccaggactcgccaaatcttcttcagaatcaagttctgaggagtctagctcagagtcaagtagcgaagaggaagaggaggaggacgaggaagacgaagaagaagaagaatcagagagcagcgactccgaagaagagcgagcccacaggcttgccgagcttcaggagcagctgagggccgtgcatgagcagttggctgccttatcccaaggaccaatctctaaaccaaagaggaagcgggaaaagaaggaaaaaaagaagaagaggaaagccgaaaagcaccgagggagagccggagctgatgaggacgataaaggccctcgggcccccaggcctcctcagcctaagaagtctaaaaaggcaagtggctcaggcggagggtctgctgccctcggcccctctgggttcggaccctctggcggctctgggaccaagctaccaaagaaagccaccaagaccgcccctcccgcactcccaacaggttacgatagtgaggaggaagaggaatctaggcctatgtcctacgatgagaaaagacagctttcactcgatattaacaaacttcccggggagaagctagggcgggtcgtccatattattcaggctagagaaccatccctcagggactctaatccagaagaaatcgaaatcgactttgagaccctgaagccctctacactacgggagcttgaacgctatgtcctgagttgtctgcgtaagaaacctagaaaaccgtatacgatcaaaaagccagttggtaaaaccaaggaggaactggccctggaaaagaaaagggagctcgaaaaaagactccaggatgtttcaggacagctaaactccacaaaaaagccaccaaagaaagcaaacgagaagactgagtcttctagcgcccaacaggtcgctgtaagccgactgagtgcctccagctcgagctccgattctagttctagctcttccagctcttcctcatccgacacatctgattccgattctggttag

SEQ ID NO: 180829 - DNA, 2511 bp, synthetic construct
  misc_feature 1..2511: note = Description of Artificial Sequence: Synthetic coding sequence
  source 1..2511: mol_type = other DNA
atgctgcagaacgtgaccccccacaacaagctgcccggcgagggcaatgctggccttttggggctgggcccagaggctgccgccccaggcaagcggatccgcaagccttcactcctgtatgagggattcgaaagccccaccatggccagcgtgcccgccctgcagttgaccccagcaaatccgcccccacccgaggtgtctaatccaaaaaagcccggcagagtgaccaatcagttgcaatatttgcataaagtcgtaatgaaggcgttatggaagcatcagtttgcctggccctttcgccagcccgtcgacgccgtaaagctggggttaccagattatcataagataattaagcagcccatggacatgggtaccataaagcgcaggttggagaataactactactgggcggcaagtgagtgcatgcaagattttaacactatgttcaccaactgctatatctacaataagccaacggatgatattgtcttgatggcgcagacactggaaaagatctttttgcaaaaggtggcatcaatgccacaagaggaacaggagttagtcgtaactattcccaagaatagccataaaaaaggtgccaaactggcagctctgcagggcagcgtgacaagtgcccatcaagttccagcggtctcttcagtgtcacacacagcactatacaccccccccccagagatacccactactgtactgaacattccccatccatcagtgatcagtagccccctactcaagtccctgcactcagccggcccacccctccttgctgtcaccgccgctccgccagctcagcctttggccaagaagaagggcgtgaaacgaaaggctgacacgacaactcccactcccaccgccatcctggcgcccggcagtcccgcatctccccctgggtccctggaacctaaagccgcacgcctgccacctatgaggagagagagcgggcgccccattaaacccccacgcaaagatctaccagattcccaacaacaacatcaaagcagtaaaaaaggaaaactgtcagagcagctgaagcattgcaatggcatcctgaaggagttactgtccaagaagcatgccgcttacgcttggccattctacaagccagtggacgcctcagctctaggcctgcatgactatcacgacatcatcaaacatcccatggacctatcaacggtaaagagaaaaatggagaatagggattacagggacgctcaggagttcgcagccgacgtcagactcatgttctctaactgctacaagtataatcccccagatcacgacgtcgttgctatggccagaaaactgcaggatgtatttgaattccggtatgcgaagatgccagatgaacctttagagccaggtcccctcccggtgtccacagccatgccgcccggcctcgccaagtcaagctccgaatcctcatcagaagagagttccagcgagtctagttcagaggaggaggaggaggaggatgaggaagatgaggaggaggaggaaagcgaatccagtgattctgaagaagaacgcgcccatcgccttgccgaactgcaagagcagcttagggccgtccatgagcagctggctgctttgtcccaggggcctatctccaagcctaagcgaaagcgcgaaaaaaaagagaaaaagaagaagaggaaggcggagaagcaccggggccgcgcaggagccgacgaggacgataaaggacctagagccccacggccgccacagcctaaaaagtcgaagaaggcttcaggatctggggggggttcagctgctctggggccaagtggtttcggcccaagtggcggttcgggcaccaaattgcaggctggcgtgcagtggcgggatctgggccttttgcagccacctctactgggctttaaaaggttttcatgtctgagtctgccctcctctcaggactatagactgcccaaaaaagccaccaagactgccccgcctgccctccctaccggctatgatagcgaagaagaggaagagagtaggccaatgtcctacgacgagaagcggcagttatctcttgatatcaataagctgccaggggaaaagctgggtcgggtcgtgcacattatccaggcccgtgagccatcactccgtgactccaatccggaggaaatcgaaattgactttgagaccttaaagcccagcacactacgagagctcgaaaggtacgttctgagctgtctgagaaagaagccacggaaaccttacactatcaagaagcccgtagggaaaaccaaagaagaactggcactggagaagaaaagagagctggaaaagcggctgcaggatgttagcggccagctgaatagcactaagaaaccgccaaaaaaagctaacgagaagacagagtcctccagtgcccagcaggtggcggtctctaggttgagtgcttcttcatctagtagcgattcatcttcctcatcctcaagttcatcaagcagtgacacttccgactctgacagcgggtag

SEQ ID NO: 180830 - DNA, 2265 bp, synthetic construct
  misc_feature 1..2265: note = Description of Artificial Sequence: Synthetic coding sequence
  source 1..2265: mol_type = other DNA
atggccagcgtgcccgccctgcagctgacccccgccaaccccccccccccagaggtctccaaccccaagaagcccggtcgagtgacgaatcaactgcagtacctccacaaggtagtcatgaaagctctatggaaacaccagttcgcttggccgttccggcaacctgttgatgcggtgaaactgggtctccctgattaccataagatcatcaaacagcccatggatatgggaacgatcaagcggcgtcttgagaataactattactgggccgctagtgagtgtatgcaagatttcaacacgatgttcacaaactgctacatttacaataagcctactgacgatatcgtattgatggcccagacgcttgaaaagatattcttgcaaaaggttgccagtatgccccaggaagagcaggaactggtggtgaccatcccaaaaaatagccacaagaaaggagctaaactggcggccttgcaaggatccgtgacctcagctcaccaggtaccagctgtgtcttcggttagccacaccgccctctacactccgccacctgaaataccgaccacagtattaaacatcccacacccgtctgtaatttccagcccactgctgaagagcctgcacagcgccggcccccctctgctggctgtaacagccgccccccctgcccaacctctggccaagaagaaaggcgtcaagcgcaaagctgataccactacccccacaccaacagccatcttggccccgggctcgccagccagcccgcctggaagtctcgaacccaaagcggcccggctccctcctatgcggcgggagtccggccgaccgattaaaccacctaggaaggatctgccggacagtcagcaacaacatcagagctcgaaaaagggcaagctgtctgagcagcttaaacattgtaatggcatactaaaggaactcctgtccaaaaaacacgccgcgtacgcatggcccttttataaacccgtggacgcgagtgccctcggtcttcatgattatcatgatatcattaaacatcccatggacctgagtaccgttaagcggaaaatggaaaaccgagactaccgtgatgctcaagaattcgctgccgatgtgagactcatgttctccaattgttataaatataacccaccagaccatgatgtcgtggccatggcaaggaagctgcaggacgtgtttgagtttagatatgcaaaaatgccagacgaaccactggaacctggacctctgccagttagcaccgccatgccaccaggcttagccaagagctcgagtgagtcttcaagtgaggagtcttcctctgaaagttcctcagaagaggaggaagaagaggacgaagaggacgaagaggaagaggagtctgaatctagcgactcagaggaggaaagagcccacagattagcagagctgcaggagcaactgcgggccgtccacgagcaattagctgccctctcccaaggaccgatcagcaagccaaaacggaagagggagaagaaggagaagaagaagaaaaggaaggcggaaaagcaccgggggcgggccggggctgacgaggacgataaggggccgcgtgcccccaggccgccgcagcctaaaaagtccaagaaggcttccggctcgggtgggggctcggctgcactggggccatcaggctttggtcctagcggtgggtcagggactaaactaccaaagaaagctaccaagaccgctcctcctgcactgcccacaggctacgactcagaggaagaagaagagagccggcctatgtcttatgatgagaagaggcagctgagtttggacattaacaagctgcccggggagaaacttggcagagtggtgcacatcatccaggctcgcgagccgtcactgagagacagtaacccagaagaaatcgagatcgacttcgagacattgaaaccaagcaccctgcgcgagctggaacgatacgttctgtcctgtctgagaaagaagccaaggaagccctatacaatcaaaaagccagtagggaaaacaaaggaggagttagcactcgaaaagaagcgcgaattagagaagagactccaggatgtaagtggacaactgaattctaccaagaagcctcctaaaaaggctaacgaaaagacagaatcttcaagcgcacaacaggtggccgtaagcagactgtctgcttcctcttcctcctctgatagttcttcaagtagttcttcctcctcaagcagcgacacctccgattccgattctgggtag

SEQ ID NO: 180831 - DNA, 2046 bp, synthetic construct
  misc_feature 1..2046: note = Description of Artificial Sequence: Synthetic coding sequence
  source 1..2046: mol_type = other DNA
atggacatgggcaccatcaagcggcggctggagaacaactactactgggctgcaagtgaatgcatgcaggactttaacacaatgtttaccaactgctacatttacaacaagcctacagatgatattgtcttgatggctcagactctggagaaaatatttctgcaaaaggtggcaagcatgccccaggaagaacaggaactggtagttaccatacctaagaattctcacaagaagggagcaaaactggcagcccttcagggtagcgtcaccagtgcgcaccaggtgccagctgtttcctccgtgtcccacactgctctctatactcctcccccagaaatccccaccaccgttctgaatatcccacacccctcagtaatcagctccccgttgttaaagtccctacattctgcaggtccccctctcctggccgttaccgcagctccccccgcacagcctctcgctaaaaaaaaaggagtgaagaggaaggcagacacgactactcccactcccacagccatcctcgcccccggcagcccagccagtcctcccggatctctcgaaccaaaagccgccaggttaccccctatgcggagagagagcggaagaccaatcaagcctccaagaaaagatttacccgactcccagcagcagcaccagtctagcaagaagggcaaacttagcgagcagctgaaacactgcaacggaattctgaaagagctgctgagtaaaaagcacgccgcgtacgcctggcccttttataagccggttgacgcctcggctcttggacttcacgactatcacgacataatcaaacacccaatggacctgtccacggttaagcgtaaaatggaaaatcgcgactaccgcgacgcccaggaattcgcagctgacgtgaggcttatgttcagcaactgttacaaatataaccctccggaccatgacgtggtggccatggcgaggaagttgcaggatgtgtttgagtttcgttatgccaagatgcctgacgaaccgttggagcctggcccactgcccgtaagcaccgctatgccacccggcctggcgaaatctagctcagaaagttcatccgaggagagctcttccgaatcctcatccgaagaagaagaagaggaggacgaggaagatgaggaagaggaggagtctgagtcatctgattccgaagaagagagggcacatcgcttggccgaactgcaggagcagttacgagccgtccatgaacagcttgcggccctgtcccaagggccaatctctaagcccaagaggaagcgcgagaagaaagagaagaagaaaaaaagaaaagccgaaaagcaccgcgggagagctggcgctgatgaggatgacaaaggcccacgggcacctcgcccaccccagccaaagaagtctaaaaaggccagtggctccgggggcgggtcggcagccctgggccctagcggcttcgggccatccgggggatctggaaccaagctgcccaaaaaagcgacaaagaccgcccctcctgccctgccaaccggctacgactctgaggaagaagaggagagtagacccatgagctatgacgaaaagcggcagctctctttggatataaacaaactgcctggtgagaagctcgggagagtggtgcatatcatacaggccagggagccttccctgcgggacagtaaccctgaggagattgagattgattttgaaaccctcaaaccatctaccctgagagaattagagcgctatgttctcagctgcctgaggaagaagcccagaaagccgtacaccatcaagaagccagttggtaagacgaaggaggagctggctttggaaaaaaagagggaactggaaaagagactgcaagatgtcagtgggcaactgaattcaacgaagaagcctcctaaaaaggccaacgaaaaaactgagtcttcatccgcacagcaagtagcggtgtcaaggctgtctgcatctagttccagctcggatagctcctcgtccagcagttcctcctcctcttcagatacatcagacagcgattccgggtag

SEQ ID NO: 180832 - DNA, 2511 bp, synthetic construct
  misc_feature 1..2511: note = Description of Artificial Sequence: Synthetic coding sequence
  source 1..2511: mol_type = other DNA
atgctgcagaacgtgaccccccacaacaagctgcccggcgagggcaacgctggtctactgggactcggacccgaagcagctgccccagggaagcgcattcggaagcctagtctgctgtacgagggcttcgaaagccccacaatggcctctgtccctgcccttcaacttacacccgctaaccccccgccacccgaggtctccaacccaaagaagcctggtcgagtgactaaccagctgcaatatttgcataaagtagtgatgaaggccctgtggaaacatcaatttgcttggccattccgccaacccgtggacgcagttaaattgggcttgccagattatcacaagatcataaaacaacctatggacatgggtacgatcaagcgccgtctcgagaacaattactattgggccgcaagtgagtgcatgcaggacttcaatactatgtttaccaactgctacatttacaacaaacctacagatgacatcgtgttgatggctcagaccctggagaagatattcttacagaaggtcgcttcgatgccacaggaggaacaggagctggtagtcaccatacctaaaaacagccacaagaaaggagccaagctcgccgccctccaggggtccgttacctccgcacaccaagtccccgccgtgtcttctgttagccacactgccctgtacacaccaccgccggagatcccaactacagtactgaacattccccacccaagcgtgatatccagccccctgcttaaatccctacactctgctggcccaccattactcgccgtcacagcagccccccccgcccagcctttagccaagaaaaagggagtgaagagaaaggcagacactactacgcctaccccgaccgctatactcgcacccggcagcccagcatctcctccaggatccctcgagccaaaggccgctcggttaccacccatgagacgagaatctggacggccgattaagcctcctagaaaagaccttccagattcacaacagcagcaccagagcagcaagaagggcaagctgtccgagcagttgaaacattgcaacggaatcctaaaagagctgctgtctaagaagcacgcggcgtatgcctggcccttctacaagcccgtggacgccagcgcattaggacttcacgactatcatgacataataaaacacccgatggacctgtccaccgtaaaacggaagatggagaaccgagattacagagacgctcaagaattcgccgccgatgttaggctcatgttcagtaattgctacaaatacaaccccccagaccacgacgttgtggctatggcccgtaagctacaagacgtattcgagttccgctatgctaaaatgcccgacgagccacttgagcctggcccactgcctgtttctacagcaatgccgccagggttggctaagagttcttcagaatcatcttcagaagagtcatcttctgagagctcttcagaagaggaggaagaagaggacgaggaagatgaggaagaagaagagtctgaatcctcagattcggaggaggagcgggcgcacagactcgccgagctgcaggaacagctgagagctgtccacgaacagctcgccgcgctgagccagggcccaataagcaaaccaaagaggaagagagaaaaaaaggaaaagaaaaagaagcgtaaagctgagaagcacagaggccgtgccggagccgacgaagacgacaagggccccagagcgcctcggcctccacagcctaagaagtccaaaaaggcatcgggctctggtggcggaagtgctgcgctggggccttcgggattcggtccatccggcgggagcggaaccaagctccaggccggggtgcaatggagggatctgggactcctgcagcctcccttgttaggttttaagcggttctcttgcttaagcctcccctcttcccaggattataggctgccgaagaaggcaacaaagacggccccacccgctctacccactggatatgactctgaagaggaagaggagtcccggcccatgagttatgatgaaaaaaggcagttaagtctggacatcaacaagctgccgggagagaaattggggcgggttgtgcatatcatccaggctcgtgaaccctctctacgagacagcaaccctgaggagatagagatcgactttgaaaccctcaagccgagcacactgcgcgaactggaaagatacgtcctgagctgccttaggaagaagcctcgaaagccttatacgatcaagaagcccgtgggcaagacaaaggaggaactcgccctcgaaaagaagcgcgagcttgaaaaacggctgcaggacgtgtccgggcaattgaattcgactaagaagcctcccaaaaaagcgaacgaaaagactgaatcttcctcagcccagcaggtggctgtgagcaggctgagcgcctcgtcttcctcaagtgactcgagctctagttcatctagttctagctcctccgacacttccgattctgatagtgggtag

SEQ ID NO: 180833 - DNA, 2511 bp, synthetic construct
  misc_feature 1..2511: note = Description of Artificial Sequence: Synthetic coding sequence
  source 1..2511: mol_type = other DNA
atgctgcagaacgtgaccccccacaacaagctgcccggcgagggcaacgcgggattactgggccttggcccagaagccgccgctcctggtaagcggatacgcaaacctagcctgctctatgaagggtttgaatcgccaactatggcctctgtgcccgcccttcaattaaccccagccaaccccccccctccagaggtgtccaaccctaagaaaccgggccgggtgactaatcaactgcaatacctccataaagtcgtgatgaaggccctttggaaacaccagtttgcttggccctttagacagccagtggacgcagtgaagctgggcctaccagactaccacaagattataaagcagcccatggatatgggtaccattaagcgccggctagaaaacaattattactgggccgccagtgaatgcatgcaggatttcaacaccatgttcacaaactgttatatctacaataaacccacggacgatatagtcttgatggcccaaacgttagaaaagatctttctgcagaaagtggcctcgatgccgcaggaagaacaggaattagtagttacgattccaaagaactcccacaagaagggcgccaaactggcggctctgcaagggtcagtgacaagcgcccaccaggttcctgctgtctcctccgtgtctcatactgcactatatactccccctccagaaatcccaactacagtgtttaatattccccatcccagcgtgatctcatctcccctcctcaaatccctccacagcgccggtccacccctactagctgtgacagcggcgcctcccgcccagcctctggcaaaaaaaaagggggtgaaacgcaaggcagacactactactccgacgcccaccgcgatcctggcgcctggctcccccgcctcacccccggggtctctggagccaaaagcggcaagactaccccccatgagacgggagtccggtcgccctattaagcccccgaggaaggacctacccgatagccagcagcagcaccagtcatcaaagaagggaaagctaagcgagcagctgaagcattgtaatggtattctcaaggagctgctttccaaaaagcacgcagcctacgcatggccattctataaaccagtggacgccagtgcattgggcttacacgactatcacgacatcattaagcaccctatggatctgtctacagtgaagaggaagatggagaatcgagactaccgagacgctcaggaatttgcagcggacgttcggttgatgttctcaaactgctataaatataaccctcccgatcatgacgtagttgccatggccaggaaattgcaggatgtctttgagtttcgctatgcgaagatgcccgatgagcctctggagcccggccccctgcccgtgtccacagcaatgcctcctggcctcgccaagtcatcctccgagagctccagcgaagaaagtagttctgagtccagttccgaggaggaagaggaagaggacgaggaagatgaggaggaagaggaatcagagtcctcagactccgaagaggaaagggctcataggctcgccgaattacaagaacagctgagggctgtccatgagcagttagctgccctgtctcaagggcctatctcgaaaccaaaaagaaagagagagaagaaggagaaaaaaaaaaagcggaaggccgagaagcatagggggcgagccggggccgacgaagatgacaaaggtccccgggcgcccagacctccacagcctaaaaaaagcaaaaaagctagcggatctggaggcggctctgccgccctgggaccttcagggtttggcccctcaggtgggtctgggacaaaactgcaggccggggtgcagtggagggatctcggactcctacagcccccactactcggattcaaaagattttcttgcctctcactacccagctcccagaactatagattacctaagaaagccaccaaaaccgccccacccgcccttcccactgggtatgactcagaggaagaagaggaaagtcgacctatgtcttatgatgagaagcgccagttgtcattagatattaacaaacttccaggggaaaagctgggcagagtcgtgcatatcatccaggccagggagcccagtctgagagactccaatcctgaggagattgagatcgacttcgagacccttaaaccttcaacactgcgagaactcgagagatacgtgctctcatgtctccggaaaaaacccaggaaaccatacacgataaagaaacctgtgggtaaaactaaggaagagctggctttagaaaaaaagcgagagctcgagaaacggctacaggatgtgtctgggcagttgaactccaccaagaagccacccaaaaaagcaaacgaaaagactgaatccagcagcgcccaacaggtggcagtgagtagactaagtgctagtagctcttcttcggactccagttctagctcctcgtcctcctcttccagtgacacaagtgactccgattctggctag

SEQ ID NO: 180834 - DNA, 2265 bp, synthetic construct
  misc_feature 1..2265: note = Description of Artificial Sequence: Synthetic coding sequence
  source 1..2265: mol_type = other DNA
atggccagcgtgcccgccctgcagctgacccccgccaacccccccccacctgaggtttctaatccaaaaaaacccggacgagtcacaaatcaattgcagtacttgcacaaagtggtgatgaaggccctctggaaacatcaattcgcttggcccttccgccagccagtggacgccgtgaagctcggattgcctgattaccacaagatcataaaacagcccatggatatggggaccattaaaaggcggctagaaaacaattactattgggccgcaagtgaatgtatgcaggactttaataccatgttcaccaattgttacatttacaataaaccaaccgacgatatcgtgcttatggcccaaacccttgaaaagatctttcttcagaaggtggctagcatgccacaggaagagcaggagttagttgtgacaattccaaagaactctcacaaaaagggggccaagctcgcagctctgcaggggagtgtcacatcagcccaccaggttccagccgtgtcctctgtatctcataccgcattgtatactcccccccctgagattcccaccactgtgttaaatatcccccatccttcggtcattagcagccctctgcttaaatcactccactccgcaggcccaccactcctggccgtaaccgcggctccacctgcccagcctctggctaaaaagaagggggtcaagagaaaggccgacactacaactcctacacccacagcaatcctggcgccaggcagtcctgcaagccccccagggtcactcgaaccaaaagccgctagactgcctcctatgcgaagggaaagcgggcggcccataaagcccccacgcaaggatctcccagactcgcagcaacaacaccagagttccaaaaaaggaaagctgagtgagcagctgaagcactgcaatggcatccttaaagagcttctgagcaaaaaacatgcagcttatgcctggcctttctataagccagtagacgctagtgctctcgggctgcacgattatcatgacatcataaaacatcctatggatctgagcaccgtgaaacgcaagatggaaaacagagactatcgtgacgctcaggaattcgcggccgatgtccgcttaatgttcagcaattgctataaatataatcccccagatcacgacgtggttgctatggcacggaagctgcaagatgtattcgagtttaggtacgccaaaatgcctgacgagccactagagccgggccccctgcccgtgtcgacagccatgcctcctggccttgccaaatcatccagtgagtcaagcagtgaagaaagctcctccgagtcaagctcagaggaagaggaagaggaggacgaggaggacgaagaagaggaggagagcgagagcagcgactctgaggaagaacgtgcccacagactggcggagcttcaggagcagctgagagctgtccacgagcagctagccgccctatctcagggcccaatctccaaacccaagaggaaacgggaaaaaaaagagaaaaagaagaaacgtaaggcagaaaaacaccgggggagagccggagccgacgaggacgataaagggcccagagccccaagaccgccccagcctaagaagagcaagaaagcctccggatcgggtggtggctcagccgcattaggacccagtggattcggaccttccggtggatccgggaccaagctgccaaagaaagctaccaagaccgcccccccagctctcccaaccggatacgactccgaggaggaagaggaatcccgccctatgagttacgacgagaagcgtcagctgagcttggatatcaataaactgcctggtgaaaagctggggagagtggtgcacatcattcaggctcgtgaaccctcactgcgggattcaaaccctgaagaaatcgagatagattttgagacactgaaaccttccacccttcgggagttggaaaggtacgttctgtcatgtcttcgcaagaaaccgcggaagccgtacaccattaagaaaccggtagggaagaccaaggaagaactggcactggagaagaaaagagagctggaaaaaaggctgcaggatgtctccggacaattgaactccacaaaaaaacctcccaagaaggccaatgagaagacagagtcgagttcagctcagcaagtggctgtgtcccgtctctcagcctcctcatcaagttccgacagtagctcgtcctcgtctagctcgtcgagctctgacacctccgattctgactccggctag

SEQ ID NO: 180835 - DNA, 2406 bp, synthetic construct
  misc_feature 1..2406: note = Description of Artificial Sequence: Synthetic coding sequence
  source 1..2406: mol_type = other DNA
atgctgcagaacgtgaccccccacaacaagctgcccggcgagggcaatgcaggcctcctgggtctgggccccgaagccgcagcccccggcaagagaatccgaaagccgagtctcctgtacgagggcttcgagtcgcccaccatggcctcagtgcctgctctgcagctgacgccagcgaatccaccaccacccgaagttagtaaccccaaaaagcctggccgggttacaaaccagcttcagtatctccataaggtagtcatgaaagccttgtggaagcatcaatttgcttggccctttaggcaacctgtagacgccgtcaagctgggtctaccggattaccataagatcataaagcagcccatggacatgggaaccataaaacggaggctggagaataactactattgggccgcttccgaatgcatgcaggatttcaataccatgttcaccaactgttacatctataacaaaccaaccgacgacatagtcctcatggctcaaactctagagaaaatattccttcagaaggttgcttctatgccacaggaggagcaggagctggtagttaccattccaaagaattcacataagaagggagccaaattggccgcgctgcaaggtagtgtgactagtgcccaccaggttcctgctgtgagctccgtttcccatacagcactctacactccccctccggagattccaacaacagtgcttaacattccccatcctagtgtgatcagcagtcctctgttgaagagcctacactccgctggacctccccttctcgcagttactgcagctccccccgctcagcccctggctaaaaaaaaaggagtgaagcggaaggctgacacaacaacccccacccccaccgcaatactggcgccgggttctcctgcatcgccaccgggtagtctggaacccaaagcagcccgcttgccccctatgcgaagggaatccgggcgaccaatcaagccacctagaaaagatctgcctgactcgcaacagcagcaccagtctagcaagaagggcaagctgtcagaacaattaaagcattgcaacggcatcctgaaggagcttttgtcaaagaagcacgcagcatacgcttggccattctacaagcccgtcgacgccagtgctttaggacttcacgattatcatgacatcattaaacatccaatggacctatccacagtgaaaagaaagatggaaaatcgggattacagggacgcacaagagtttgccgcagacgtgagactcatgttttcaaattgttacaaatataacccaccagaccacgatgtggttgctatggctagaaaactgcaagacgtgttcgaattcagatatgctaaaatgccagatgagcccctggaaccaggtcccctgccagtgtctacggctatgccgcctggacttgcaaagagctcgagtgaatccagcagcgaggagtcttcttcagagtctagtagcgaagaagaggaggaggaggatgaggaggacgaggaggaagaggaatccgaatcatcggatagcgaggaagagcgcgctcaccggctcgccgaactgcaggaacaactacgagctgtgcatgagcaactggcagcactatctcagggacccatttcaaagccaaagcggaagcgagagaagaaggaaaagaaaaaaaagcgaaaggcagaaaaacataggggccgtgcgggagcggatgaagacgataaaggccccagagcaccccggcccccacagccaaaaaaaagtaagaaagcgtctggctccgggggcggatctgctgctctgggaccctctggattcgggccctcgggaggttccggaaccaagttacccaaaaaagccacgaagaccgctccccctgctcttccaacaggctatgattctgaagaagaggaggagagtcgaccaatgagctatgacgagaagcgccagctgtctctagatatcaataagttgcctggagaaaaactcgggagagtcgtccatatcatccaggcgagagagccttctttgagagattctaaccctgaagagatcgaaatcgatttcgagacgctgaagccatctaccctgagggaactcgaacgctacgtgctgtcgtgcttgcgcaagaaaccacggaaaccttatactatcaagaagcctgtcggtaaaactaaggaggagttggcgttggagaagaagcgggaattggagaagaggttgcaggacgtctccggacagctcaacagtactaagaaacctccgaaaaaggcgaacgagaagacagaaagctccagcgcacagcaggtggcagtgagcagactgagtgcctcaagcagcagctctgactccagctcaagctcatcttcctcctcctcttccgacacctctgattctgatagcggttag

SEQ ID NO: 180836 - DNA, 2046 bp, synthetic construct
  misc_feature 1..2046: note = Description of Artificial Sequence: Synthetic coding sequence
  source 1..2046: mol_type = other DNA
atggacatgggcaccatcaagcggcggctggagaacaactactactgggcagcctcagaatgcatgcaggacttcaatactatgtttactaactgttacatctacaacaaacctaccgatgatattgtcttaatggctcagaccctcgaaaaaatctttttacagaaagtagccagcatgccacaagaggaacaagagctcgtggtgactattcctaagaattcccacaagaagggggccaaactggccgccctgcagggatcagtgacaagtgctcatcaggtgccagctgtttcttcggtgagccacactgcactttacaccccgcctcctgagatcccaacaacggtgctgaacattccgcacccatcagtgatttcttcaccgctgttgaagtctctgcactctgcggggcctcctctgctcgccgtcacggcggccccacctgcccagcccctagccaagaagaaaggcgtgaagaggaaggctgacacaactacacctacacctactgccatcctggcgcctggcagtccagcttcgccccccggatctctcgaacctaaggctgcccgcctgcccccaatgcgtcgggaatcagggcgccccatcaagccaccacgcaaggacctcccagatagtcaacagcagcaccaatccagtaagaaagggaagctctccgaacagctgaaacactgtaatggtatactcaaggaactcttatcaaagaaacatgccgcatacgcttggccattctataagcccgtggacgccagcgcactgggactacatgactatcacgacatcattaagcaccctatggacctaagcactgtcaagcgaaaaatggagaacagggactatcgggacgcccaagagtttgccgccgacgtgaggctgatgttttcaaattgctacaagtacaacccgcccgaccatgatgtcgtggccatggcacgaaagctccaagatgttttcgaattcaggtatgccaagatgcccgacgagcctctcgagcccggcccacttcctgtatctactgctatgcctcccggactggccaaaagttctagcgagagctcctcagaggaaagtagctctgagtcttcctcagaagaggaagaagaggaggacgaagaagatgaagaagaagaggagagcgagagttccgactctgaagaggagagagcccaccgactggccgagctgcaggagcagttgcgcgctgtccatgagcagctggctgccctctctcagggacctatatctaagcccaagaggaagagggagaagaaggagaagaagaagaagcggaaggccgaaaagcatcggggccgcgcaggcgctgatgaggatgataagggtccacgcgcacctcgccctccacagccaaagaagagcaagaaagctagtggcagcggtggtgggtcggctgcacttgggccctccggctttgggccctcaggcgggtcaggtacaaaattgcccaagaaggctacaaaaacagccccccctgccctacccacgggctacgacagcgaagaggaagaggaatctcgtccaatgtcctacgatgaaaagaggcagcttagcctagacattaataaactgccgggcgagaagcttggcagagtagttcatatcatccaagccagggagcccagcctgcgggacagtaaccctgaggaaatcgaaatagattttgagactctgaaaccctctacactcagggagctggaacgctatgtgctgtcatgtttacgaaaaaagccccgaaaaccttataccattaagaaaccagtgggcaagaccaaggaggagctggctctggagaagaagagggaactcgagaagcgacttcaagatgtgtcaggacagcttaattcaacaaagaagccgcccaagaaagctaacgaaaagactgagagcagtagcgctcagcaggtggccgtctccagactgtccgcttcgagcagctcgagcgactcctcttctagctctagttcttcgagtagcagcgacacttccgattcggattccgggtag

SEQ ID NO: 180837 - DNA, 4089 bp, synthetic construct
  misc_feature 1..4089: note = Description of Artificial Sequence: Synthetic coding sequence
  source 1..4089: mol_type = other DNA
atgagcgccgagagcggccccggcacccggctgcggaacctgcccgtgatgggtgacgggctagaaacctcccaaatgtctacgactcaggcgcaggctcagccgcaacccgctaacgccgcttccactaatcccccgccacccgaaaccagtaacccgaacaaacccaaacggcaaactaaccagctgcaatatttactccgcgtggtgctgaagacgctttggaaacaccagttcgcctggccgttccaacagccggtggacgcagtgaaactcaatctgccggactattacaaaatcattaagacccctatggacatggggactatcaagaagagactagagaacaactactattggaacgcccaagagtgtatccaggatttcaacacaatgtttactaactgctatatctacaacaagccaggtgatgacatcgtactgatggctgaggcgctggagaaactttttcttcagaaaattaacgaactcccaacggaggaaactgaaatcatgatcgttcaggccaaggggcgcggacgtggccggaaggagaccggtaccgcgaagccaggagtatccacagtccctaacacgacccaggcatccacccccccacagacccagaccccgcagcccaatccaccaccggtgcaggccacgcctcatccttttcccgctgtcacccccgacttaatcgtccaaacacctgtaatgaccgttgtgcctccccagcccctgcagaccccaccacccgtgccccctcagcctcagcctcccccagcaccggccccccagcctgtccagagccacccgccaatcatcgcggcgaccccccagccagtgaaaacaaagaagggggttaaacgcaaggccgacaccaccacacccacaactatcgatcctattcacgagcccccatcccttccacccgagcctaagacgaccaagctgggacaacggcgcgaatcatcaagacctgttaagccgccgaaaaaggacgtgccggatagtcagcagcaccccgcccccgagaagtcatctaaagtctcagaacagctgaagtgttgttccgggatcttaaaggagatgttcgcaaagaagcacgcggcttacgcctggcccttctacaagcccgtggatgtggaagcactcgggctgcacgactactgcgacattatcaagcatcctatggacatgagcacgatcaagagcaagcttgaagctcgggagtatagggacgcgcaggaatttggcgcagatgttcgactgatgttcagtaattgttataaatacaatcctccagaccacgaggtcgtggctatggcacgtaaacttcaagatgtctttgagatgagattcgcaaagatgcctgatgaacctgaggagccagtcgtcgccgtcagctctcccgccgtgccaccccccacaaaagtcgtcgctccaccttccagcagtgactccagctccgactctagttcagactctgactctagcaccgacgattccgaggaggaaagggcccagaggctggccgagctccaggagcagctgaaggccgttcacgagcagctggcagccctttcccagcctcagcagaacaagcccaagaaaaaagagaaagataagaaggagaagaaaaaagagaaacacaaaagaaaagaagaagtcgaggaaaacaagaagtctaaggcaaaggaaccaccaccaaagaaaactaaaaagaacaactcatcaaactccaacgtctccaaaaaggagcccgctccaatgaagtctaaacccccccccacttacgagagcgaggaagaggataagtgcaaacccatgagctacgaggaaaaaaggcagctgtctcttgatatcaataagcttcccggcgagaaattgggccgagtggtacacatcatccagtctcgtgaacccagcctcaaaaatagcaatccggacgagatcgaaattgactttgagaccctgaagcctagcactctgcgcgagctagagcgctacgtcacctcttgcctgcggaagaagagaaagcctcaggccgagaaggtggacgtgatcgctggctcttcaaaaatgaagggcttctcatcgtccgagtccgagagctctagcgagtcatcaagctctgatagcgaggactccgaaacggaaatggcaccgaaaagcaagaagaaggggcatccggggagggagcagaaaaaacaccatcaccaccaccatcagcagatgcagcaggcacctgcgccagtgccccaacaacctcccccccccccccagcagcccccgcctcctcctccccctcagcagcagcagcagccaccccctcctccccctcctcctagcatgcctcagcaggctgcgcctgcaatgaagtcttctccaccgcccttcattgccacccaggtgcctgttctggagcctcagttacccggctcagttttcgaccccattggccacttcacccagcccatactccatttgccgcagcctgaattgccacctcacttgccacagcctcctgagcactcgacacctccacacttgaatcagcacgctgttgtatctccccctgccttacataacgctttgccccaacagccgagtcgcccaagcaatagagccgctgcgctgcctccaaaaccggcaaggcctcccgcggtatccccagccctgacccagactcccctgctgcctcagccgcccatggctcaaccgcctcaggtcctgctggaagacgaggaaccccccgcgccacctctaacgtccatgcagatgcagctgtaccttcagcagctgcagaaagtgcaaccaccaaccccactcctgccctcagtgaaggttcagtcccagcccccacctccacttccacccccgccacatccatccgtgcagcagcagctgcagcagcaacctcccccccccccaccaccacagccccagcctccccctcagcaacagcatcagcctccgcccagaccggtgcacctacaacccatgcagttttccacgcatatacagcaaccccctcccccccagggacaacagcccccacacccacctcctggccagcagcccccgcctcctcagcccgctaaaccacagcaggttattcagcaccaccattcccctagacatcacaagtccgacccttactctacagggcacctacgggaagcaccgagccccttgatgatccactcaccccaaatgtcccagtttcagagtctaacccaccagtctccccctcagcaaaatgtgcagccaaaaaagcaggagttgcgtgcagcctccgtagtgcagccgcaacccctggtggtcgtgaaggaggagaaaatccacagccccattatcagaagcgagcccttttctccaagcctcaggccagagccccccaagcaccctgaatctattaaggccccagttcacctcccgcagcgtcccgaaatgaaaccagtggacgtgggacggccagtgatccgcccacctgagcaaaatgctcccccacccggtgctccagacaaggataagcaaaaacaggagccaaagacgccagtggctccaaagaaggatctaaagatcaagaatatgggatcctgggcctctttggttcaaaagcacccgactactccgtccagtacagcaaaaagctcatctgactctttcgagcagtttcgtcgtgctgcacgagaaaaagaggagagagagaaggcgctgaaggcacaagccgagcacgctgaaaaagagaaagagcggttgagacaagaaaggatgaggtctcgggaggacgaggacgcccttgagcaagcaaggcgagcccatgaggaggcccgaaggcgtcaagagcagcaacaacagcagagacaggagcagcaacagcaacagcagcaacaggccgctgccgtggcagctgctgcaacaccccaggctcagtcctcacagccacagtcgatgctggatcagcagcgagagttggctagaaagcgggaacaggagcgtcggcggcgggaggccatggctgcgacgatcgatatgaatttccaatcggaccttctgagtatttttgaggaaaaccttttctag

SEQ ID NO: 180838 - DNA, 2385 bp, synthetic construct
  misc_feature 1..2385: note = Description of Artificial Sequence: Synthetic coding sequence
  source 1..2385: mol_type = other DNA
atgagcgccgagagcggccccggcacccggctgcggaacctgcccgtaatgggtgatggactcgaaacctctcaaatgagtacaacacaagctcaagcccagccacagccagcaaatgctgccagcactaacccaccaccccccgagacaagcaaccctaataagccaaaacggcagactaatcagcttcagtatttacttagagtggtcttgaagacactgtggaagcatcaatttgcctggccattccaacagcctgtcgacgcagtcaaattgaatctgccagattactacaagattatcaagactcctatggatatgggcactatcaagaagagactagagaacaattactattggaatgcccaggaatgtattcaggattttaataccatgtttaccaattgctacatatacaacaagccgggggacgacatagtgctaatggccgaagcgcttgaaaaactatttcttcagaagatcaatgaacttccgacagaagagacagagatcatgatcgtacaggccaaaggcagagggcgcgggcgcaaagagactggaacagctaagccaggcgtctcaacagtccctaatacaacccaggcatcaacacccccgcaaacccagacgcctcagcctaatccacctccagtgcaggctacaccacacccgtttcccgccgttaccccggatctgattgttcaaacacccgtcatgactgtcgtccctccccagcccctccaaaccccgcctcctgtgccaccccaacctcagcctccgcctgctccggctcctcagccggtacagagtcacccgcccattatcgctgcgactccacagcccgttaaaacaaaaaagggagtcaagcgaaaggccgacactacaacccccacaaccattgatcctatacacgagcccccttcgcttcctcctgaaccaaaaacaactaaactcgggcagagacgggagtccagccggcctgttaagcctcccaagaaggatgtgcctgacagtcagcagcaccctgcacctgagaagagctccaaggtctctgagcagctcaagtgctgcagcggaattctcaaagaaatgttcgccaaaaaacacgccgcctatgcatggcccttttacaaaccagtggatgtagaagccctggggttacatgattattgtgacattatcaaacatcccatggacatgagcacaataaaatctaaactggaggccagggaatacagagatgcgcaggaatttggcgccgatgtcaggttaatgttcagcaattgctacaaatacaaccctcctgatcacgaagtagttgctatggcacgtaaacttcaggatgtgttcgaaatgagatttgcaaaaatgccggacgaaccggaagagccagtggtggctgtttcctcccccgctgtcccgccgcctacgaaggtcgttgcccctccctcctccagtgactctagttcagattcatctagcgattctgacagctctactgacgactcagaagaagaaagggcacagaggctcgccgagctacaagaacagctcaaagctgttcatgaacagctagcagctctgagccagccccaacagaataagcctaaaaagaaggaaaaagacaagaaagagaaaaagaaagagaagcataagagaaaggaggaggttgaagaaaacaaaaagtccaaggccaaagagcccccccccaagaagaccaagaaaaacaatagctccaacagcaacgtgagcaagaaggagccagcacctatgaagagtaagccacccccaacatatgagtctgaagaagaagacaaatgtaagcctatgtcctacgaggaaaagcggcagctgagcctcgatattaacaaattacccggagaaaagttgggacgagtggtgcatatcatccagagccgagaaccgtcactgaaaaattctaatcctgatgaaatcgagatcgacttcgagaccctgaagcccagtacactgagagagctcgagaggtatgtcaccagctgtttacgcaaaaagcgtaagccccaagccgagaaagtggacgttatcgcaggatcctctaagatgaaaggcttcagcagctcggaatcagaaagcagctcagagtcaagctcctctgactctgaggactctgaaacagctttctgtacttcaggtgattttgtttcacctgggcccagcccctatcacagccatgttcagtgtggtaggttccgggaaatgctgcggtggtttctggtggacgtggaacaaacagccgctggccagccccacaggcagagcgcagcgggtccagctatcacttgggcccccgccatcgcgtatccctcacctgaatgcgcccgctgctgcgtgggatgtagttag

SEQ ID NO: 180839 - DNA, 2169 bp, synthetic construct
  misc_feature 1..2169: note = Description of Artificial Sequence: Synthetic coding sequence
  source 1..2169: mol_type = other DNA
atgagcgccgagagcggccccggcacccggctgcggaacctgcccgtgatgggcgacggtcttgagaccagtcagatgagtacaactcaagcacaagcccagccacagcccgccaacgccgcctctacaaatccccctccccctgagaccagcaaccctaacaagcccaaaagacagacaaatcagctgcaataccttcttagggtggtgctgaaaacgctgtggaagcaccagtttgcttggcctttccagcagcccgtagatgccgtgaaactgaacttacctgactattacaagatcattaaaacacccatggatatgggaacaattaagaaaaggctggagaacaactattactggaacgcacaggagtgcatacaggattttaacacgatgttcaccaactgctacatatacaacaagccaggagacgatattgtcctcatggctgaagccctggagaagttgttcttgcaaaagattaatgagctgccgaccgaggaaaccgagattatgatcgtgcaggcaaagggtagaggtagggggaggaaagagaccgggacagccaaacccggagtcagcaccgtccctaatacaactcaggcttctacacctcctcaaactcagacaccccagcccaatcctccaccagtgcaggctacaccccacccgtttcctgctgtaactcccgacctgatcgtgcagacgccagtaatgaccgtcgttcccccacagccactacagacgcctcctccggtgcccccacaaccacagcctcccccggccccagcacctcagcctgtgcagtctcacccacccatcattgccgccaccccacagcctgtcaagaccaagaagggagtcaagcggaaggccgacacgacaactccaacaaccatcgatcctattcacgaacccccctcactgcctcccgaacctaaaactaccaagctgggacagagaagagaatccagccgccctgtgaagccacccaaaaaggatgttcctgactcccagcagcatccagcaccggaaaagagttctaaggtaagcgaacaactgaaatgttgcagcggcatcctgaaagagatgtttgctaaaaagcatgcagcctatgcctggcctttttataaacctgtggacgtggaagcccttggattgcatgactactgcgatattatcaagcacccaatggatatgagcacgatcaagtcaaaacttgaagcgagagagtatagagacgcacaggagtttggggctgacgtgcgtctgatgttctccaactgctacaagtacaacccccccgaccacgaggtcgttgcaatggccagaaaacttcaggacgttttcgagatgcgcttcgctaaaatgccagacgaacccgaggagccagtggtagcagtgtcatcccccgctgttccacctcccaccaaagtggtcgcaccccctagcagtagcgatagctctagtgattcaagcagtgactcagactcgtctacggacgatagtgaggaagaaagagcacagaggcttgctgaactgcaggagcagctgaaggccgtacatgaacaattggccgcccttagtcagccccagcagaacaaaccaaagaaaaaagaaaaggacaagaaagaaaagaaaaaggagaagcacaagagaaaagaagaagtggaggagaacaaaaagtctaaagcaaaggagcctccgccaaagaagaccaagaagaacaatagttccaactcaaacgtctccaagaaggaacccgctccaatgaagagcaaaccacctccaacttacgagagcgaagaagaggataagtgtaaacctatgagctatgaggagaaacgtcagttgtccctggacatcaacaaactgccaggagaaaagcttggacgggtggtccacataattcagagtcgcgagccatccctcaagaactccaaccctgacgaaattgagattgatttcgaaacactcaaaccctcgaccctgagggagctggaaagatatgttaccagctgcctgaggaaaaagaggaagccccaagccgagaaagtcgacgttatcgcgggttccagtaaaatgaaaggcttttcttcgtccgagagtgagtcctcctccgaaagctcaagctcagactccgaggacagtgaaaccgggcccgcgtag

SEQ ID NO: 180840 - DNA, 2625 bp, synthetic construct
  misc_feature 1..2625: note = Description of Artificial Sequence: Synthetic coding sequence
  source 1..2625: mol_type = other DNA
atggacctgaacaccatcaagaagcggctggagaacaagtactacgcaaaggcaagtgagtgtatagaagattttaacactatgttctccaattgttacctgtataacaaacctggggacgacatcgtccttatggcgcaagcactcgagaaactcttcatgcagaaactgagccaaatgccacaggaagagcaggtggtgggagtaaaggagcgcattaaaaaagggacacagcagaacatcgccgtctccagtgccaaggagaagtccagcccatcagccacagagaaggtgttcaaacagcaagaaattccttcggtgtttccgaagacgagtatttcaccactgaacgtcgtccagggtgcatctgtgaattcatcatctcaaacggctgctcaggtaaccaagggcgtgaagagaaaggcagacacaaccacccctgccactagtgctgtgaaagccagctccgaattctcccccaccttcacggagaagagcgtggcgttaccaccgataaaagaaaatatgccaaaaaatgtcttgcctgatagccagcaacagtacaacgtggtgaagactgtcaaggtcacagaacaacttagacactgctccgaaattctaaaggaaatgttagccaagaaacattttagctacgcctggcccttctacaaccctgtggacgtaaatgccctaggccttcacaactactatgacgtcgtcaaaaatccaatggacctcggcacaataaaagagaagatggacaatcaggagtacaaggacgcgtacaagtttgcagccgatgttagacttatgtttatgaactgctataagtataatccccccgatcacgaggtggtcacaatggccaggatgctgcaggacgtctttgaaactcatttttctaagatcccaatcgagccagtggaatccatgcctctgtgttacatcaagaccgacattacagaaacaactggtcgtgagaacaccaacgaggcctcttccgaagggaactctagtgatgattccgaagatgagcgcgtcaagagactcgccaagctccaggaacagctgaaggccgttcatcagcaactacaggtgctcagtcaagttccgtttcggaaactgaataagaaaaaggagaagtccaagaaagagaaaaaaaaggagaaggtcaacaacagcaacgagaatccccgaaaaatgtgcgaacaaatgcgcttgaaagaaaagagcaagcggaaccaacctaaaaagcggaaacagcagtttatcggactcaaaagtgaggacgaggacaatgccaagccgatgaattacgatgagaagcgccagttgagccttaatataaacaaacttcctggggacaaactgggcagggttgtccacatcatacagtctcgagaaccatccctgagcaattcaaaccccgacgaaattgaaatcgattttgaaacactcaaggccagcacgcttcgggagctggaaaaatatgtgagcgcttgtctgcgtaagcgccccctgaagcctcccgcaaagaagatcatgatgagtaaggaagaactccatagccagaaaaaacaggaactcgagaagaggctcctggatgtgaacaatcagctgaattctaggaagaggcaaactaaatccgataaaacccagccatctaaggcagttgagaacgtctctcgactgtccgagtcttctagcagctccagctcttcaagcgagagcgagtcgtccagctcagatcttagttctagcgatagttcagactcagaatcggagatgtttcctaaattcacggaggttaagcctaatgacagtccctccaaagaaaatgttaagaaaatgaagaacgagtgcattccacctgagggccgaactggagtgacccagatcggttactgcgtgcaggacaccaccagcgccaacacgaccttggtgcaccagacaacgccaagtcatgtgatgccaccaaaccaccaccagctggcctttaactaccaggaactcgagcacctgcagaccgtcaagaatatttcccctctccaaatcctgccaccatctggcgattcagaacagttgtcaaatgggattacagtgatgcacccctccggggactctgatacaacgatgctggagagcgaatgtcaagctccagtgcagaaggacatcaagattaaaaatgcagactcatggaagtccttaggcaagccggtgaaaccctctggggtgatgaaatcttcagacgagctgtttaaccagttcaggaaggctgctattgagaaggaggtgaaagccagaacccaggaactgattagaaaacacctggagcaaaataccaaggaattgaaggcttctcaggaaaaccagcgggaccttggtaacggcctcaccgtggaaagtttttctaacaaaattcaaaacaaatgcagcggggaggaacagaaagagcaccagcaatcttcagaggcccaggataaatccaaactgtggctgcttaaggaccgcgatcttgctcgacagaaggagcaggagaggcggcggagggaggccatggtgggcaccatcgatatgacattgcagtccgatataatgaccatgttcgaaaacaattttgattag

SEQ ID NO: 180841 - DNA, 45 bp, synthetic construct
  misc_feature 1..45: note = Description of Artificial Sequence: Synthetic coding sequence
  source 1..45: mol_type = other DNA
atgagcctgcccagccggcagaccgccatcatcgtgaacccctag

SEQ ID NO: 180842 - DNA, 2844 bp, synthetic construct
  misc_feature 1..2844: note = Description of Artificial Sequence: Synthetic coding sequence
  source 1..2844: mol_type = other DNA
atgagcctgcccagccggcagaccgccatcatcgtgaacccccccccccccgagtacattaatacaaaaaagaatggacggcttaccaaccaacttcaatacttacagaaagtggtcctaaaagatctatggaagcactccttttcttggccatttcaacgccctgtggacgccgtcaagctccagcttccagactactacaccattattaaaaaccccatggacttaaatactatcaaaaaaaggctcgagaacaagtattacgcaaaagcttctgagtgtattgaggactttaatactatgttcagcaattgctatctctataacaaacctggagacgacatcgtgttaatggctcaggccttggagaagctgttcatgcagaagctgagccagatgccacaggaggagcaggtggtcggagtaaaagaacggataaagaaaggcacccagcagaatatcgccgtgagctccgccaaagagaagagctccccctctgctacggaaaaggtatttaaacagcaggagataccttccgtgttccctaaaacatcaattagccctcttaacgtcgtgcagggtgcttcagtcaatagctcctcccagactgctgcacaggtgaccaaaggcgtgaaaagaaaagccgacaccacaactccagcaacctctgcagtaaaggcttcctcggagtttagccccacatttacagaaaagagcgtggctttaccgcccattaaagagaacatgccgaagaatgtgctgccggacagccaacagcaatacaatgtggttaaaaccgttaaggtgacggaacagcttaggcattgtagcgagatcttaaaagaaatgctggccaaaaaacacttttcctatgcctggccattctataatcctgtggatgtgaacgcactgggcctgcacaactactatgacgtggtcaagaatcctatggacctgggaactatcaaagagaagatggataaccaggagtacaaagatgcatacaaatttgcagccgatgtcagactgatgtttatgaactgctacaagtacaatcctcccgaccacgaagtggtcactatggcccggatgctacaggatgtgtttgagacccactttagcaagattccgattgagcccgtggagtccatgcccctgtgctacataaagaccgacatcacagagactaccggcagggagaacacgaatgaggcttcttcggagggcaacagcagcgatgattccgaggacgagcgggtaaaacggctagcaaaactccaggaacaactcaaggccgtgcatcagcagctgcaggtgctctcacaggtcccattccggaagctaaacaagaagaaagaaaagagcaaaaaggagaagaagaaggagaaagtgaacaattccaatgagaaccctcgaaaaatgtgtgagcaaatgcgtctgaaggaaaaatcgaagcgtaaccagcctaagaagagaaagcagcagtttatcggcctcaagagtgaggacgaggacaatgcaaagcctatgaactatgacgaaaagcgccagctttcccttaatataaacaaacttccgggagacaaactcgggagggtggttcatatcatccaatccagggagccgtccctgtcgaattcaaacccggacgagattgagatcgatttcgaaaccctaaaggcttctaccttgcgtgaactggagaagtatgttagcgcttgtctgcggaaaagacccttgaaaccccccgcgaagaaaatcatgatgtccaaagaggaactgcattcgcagaagaagcaggaactggagaaaaggctgctcgatgtgaataatcaactgaattctcggaaacggcagaccaagagtgataagacacagccctccaaagcggtggagaatgtttctaggctttccgagtcatcttcttcctccagttcgagttccgaatccgagagcagcagttccgacctgtcttcttcggacagcagcgatagtgagagcgagatgtttcctaaattcacagaggtaaaacccaacgatagcccaagcaaggagaacgtgaagaagatgaagaacgagtgtattcctcccgagggcaggactggggtgacccagatcggttactgtgtgcaggatacaactagcgcgaacaccacactcgtacatcagactactccctctcatgtgatgccccccaaccaccaccaattagcctttaattatcaggagctggaacatctgcagaccgttaaaaacatcagccccctacagatcctacctccttccggagactcagagcagttaagcaacgggattacagtcatgcaccctagcggcgattctgataccacaatgctagaaagtgagtgtcaggcccctgttcagaaggacatcaaaattaagaacgctgactcctggaaaagcttgggcaaacctgtcaaaccatccggagtcatgaagagtagcgacgagctgtttaatcaattccggaaggcagccattgagaaggaggtgaaagcgagaacccaggaactgattaggaagcatctggagcagaatacaaaagagcttaaagcatcacaagagaatcaacgcgatctgggaaatggactgacagtcgaaagttttagcaataagatccaaaataaatgcagcggagaggagcagaaggaacaccagcagtcttccgaagcccaggacaagagtaaattgtggctcctaaaagaccgggacttggctaggcaaaaggagcaggaaagacgacgacgggaggcaatggttgggaccatcgatatgacgcttcagtctgatatcatgactatgttcgagaacaattttgattag

SEQ ID NO: 180843 - DNA, 2706 bp, synthetic construct
  misc_feature 1..2706: note = Description of Artificial Sequence: Synthetic coding sequence
  source 1..2706: mol_type = other DNA
atgagcctgcccagccggcagaccgccatcatcgtgaacccccccccacccgagtacattaatacaaagaaaaacggcagactgaccaaccagctccagtatttgcaaaaagttgttctgaaagacttgtggaaacatagcttttcctggcccttccagaggcccgtggatgctgtcaagctacaactcccacctggagatgatatcgtgctcatggctcaagcgttggagaagttatttatgcaaaagctctctcagatgcctcaagaagaacaggtcgtgggagtgaaagagagaatcaagaagggtacccagcaaaacattgccgtgtcctccgctaaagaaaaaagcagtccctccgccaccgaaaaggtttttaaacaacaggagatcccgtcggtgtttccgaagactagcattagtcctctgaatgtggtgcaaggtgctagcgtaaatagtagcagccagactgcagcccaggtgaccaagggcgtgaagaggaaggctgatactactactcccgccacctccgcggtgaaggcttcctccgaattttctcccacatttacggagaagtccgtggccctacctcccataaaggagaatatgccaaagaacgtgctccccgatagtcagcagcaatacaatgtcgtaaagacagtcaaagtgacggagcagttgcgtcattgttccgagatcctaaaagaaatgctagcaaagaaacacttcagctatgcgtggcccttctataatccagtcgacgttaatgctctgggactgcataactactacgacgtggtaaagaacccaatggacctgggaactataaaggagaagatggacaatcaggaatataaggatgcctataaatttgcagccgatgtacgacttatgtttatgaactgctataaatataatcctccagatcacgaagttgtgactatggcgagaatgctacaggacgtgttcgaaacgcactttagtaagataccaatcgaaccagtggagtccatgcccttgtgctatattaaaaccgacatcacggaaacaaccggtcgcgaaaatacaaatgaggccagctctgaggggaactcaagcgatgattcggaggacgagagggtcaagaggctggcaaagcttcaggaacagcttaaggctgtgcaccagcagctgcaggtgttgagccaggtccccttccggaagctgaataagaaaaaggagaaaagcaagaaggaaaaaaagaaagagaaagtgaacaacagtaatgagaatccaaggaaaatgtgcgaacagatgcggctgaaggaaaagagcaagagaaaccaaccaaagaagcggaaacagcaattcatcggcttaaagtcagaagacgaggataatgccaagccaatgaattatgacgagaagcgccagctgagtctgaacataaacaagctcccaggcgacaagctggggcgggtcgtgcacatcatacagtctagggagccgagcctctcgaattcaaaccccgacgagatcgaaatagactttgagaccctcaaagcttccaccctaagggagttggagaaatacgtgagtgcgtgtcttcgaaagagaccactcaagccacctgctaaaaagatcatgatgagtaaagaggaattgcactcccagaagaaacaggagcttgaaaagcggctgctggatgtgaacaaccagctcaactcccggaagcgacagactaagtctgacaagacacagccttccaaagccgttgagaatgtaagcagactgtcagagtcatccagttccagcagctcatcttccgaaagcgagtcctctagcagtgacctgagtagtagtgattctagcgatagcgagtccgaaatgtttcctaagttcaccgaggtcaagcccaacgactctcctagcaaagaaaacgttaagaagatgaaaaatgaatgtattcctcccgagggccggacaggggtcacccagattgggtactgtgtgcaggatacaacgtctgccaatacaactctggtacatcagactaccccaagtcacgtgatgccccctaatcaccatcagctcgccttcaactaccaggaactggaacacctgcagaccgttaagaatatctcccctctgcaaatcctcccaccctcaggcgatagtgagcaattatctaacggcatcaccgtgatgcaccccagcggggactccgacacaaccatgttagaatccgagtgccaagccccggtgcagaaggatatcaaaattaaaaacgcggattcttggaagagtttaggcaaacccgtgaagccatccggtgtcatgaagagtagcgacgaactatttaaccagtttcgtaaggccgctatcgagaaggaggtgaaggctagaacccaggagctgattagaaagcatctcgagcaaaacacgaaagaacttaaggcctcacaggagaaccagcgtgaccttggtaatggactcaccgtagaatccttctctaataaaattcagaataaatgctcaggcgaagagcaaaaagaacaccagcagtcgagcgaagcgcaagacaagtcgaagctttggttgctgaaggatagagacctggcgaggcaaaaagaacaagaacgacgacggcgagaggctatggttggaaccattgatatgacgctgcagagcgatatcatgaccatgttcgagaataatttcgactag

SEQ ID NO: 180844 - DNA, 2844 bp, synthetic construct
  misc_feature 1..2844: note = Description of Artificial Sequence: Synthetic coding sequence
  source 1..2844: mol_type = other DNA
atgagcctgcccagccggcagaccgccatcatcgtgaaccccccccctccggagtatatcaataccaagaaaaatgggcgtctcacaaatcagcttcagtacttgcagaaagttgtcttaaaagacttatggaagcactccttttcttggccatttcaacggccagtggatgcagttaagctacagctgcccgactattataccattattaaaaaccctatggacctaaatacaatcaagaaacgcctcgaaaacaagtattatgccaaggcctctgagtgtattgaagacttcaacacaatgttctccaattgttatctgtataataaacccggcgacgatatcgttctcatggcccaggcacttgagaaattgttcatgcaaaaactctctcagatgccccaagaagaacaagtggtgggagtgaaggagcggataaagaaaggcactcagcaaaatattgccgtcagctcagccaaagagaaaagtagcccctccgcaaccgaaaaagtgttcaagcagcaggagatccccagtgtctttcctaaaacctccatttctcctctgaacgtagtccagggcgcaagcgtgaattctagttcacagacagccgcccaagtaaccaaaggcgtgaagagaaaggcggacacgacaactcccgctactagtgcagtcaaggcctcatcagaattctccccaactttcactgaaaagtccgttgcgctgccccccataaaagaaaatatgccgaaaaacgttttaccggattcgcagcaacagtacaacgttgttaagaccgttaaagttacagagcagctcagacactgcagcgaaatcctgaaagaaatgctggctaagaagcatttttcatacgcctggccgttttacaatcctgtcgacgtaaatgctctcgggctccacaattactatgatgtggtaaaaaatcccatggacttgggcacaatcaaggagaagatggacaaccaggaatataaagatgcctataaattcgctgccgatgttagactgatgttcatgaattgctacaagtacaatcctccagatcatgaagttgttactatggccaggatgctgcaggacgttttcgagacccatttttcgaagatccctatcgagcccgtggaaagcatgcctctctgctacattaagaccgatatcactgaaacgacggggagagagaacaccaacgaagcctctagcgaaggaaacagctcggacgactcggaagacgaacgagtaaagcgtttggctaaactccaggagcagctcaaggctgtgcaccagcagttacaggtcctgtcgcaggtgcccttccgcaaattaaataaaaaaaaagagaagagcaagaaggagaaaaagaaagagaaagtcaataacagcaatgaaaaccccagaaagatgtgcgagcagatgcgtttgaaggaaaagtcgaagcggaaccagcccaagaagcgtaagcaacagttcatcggtctaaaatctgaggatgaagataacgcaaaacctatgaattacgacgaaaagaggcagctctccctaaacattaacaagctgcccggtgataaactgggcagggtggtccatattattcagtcccgcgaaccgtccctgtcgaattcaaaccccgacgaaatcgagatcgattttgagactctaaaagcaagcacattgagggaacttgagaaatacgtgagcgcatgtctccggaaaagacccctcaagccacccgcaaagaaaattatgatgtcgaaagaggagttacactcgcagaagaagcaggaactggagaagcgtctcctggacgtgaacaatcaactgaactctaggaagcggcaaaccaagtccgacaaaacacagcctagtaaggcggtggaaaacgtgtcaagactgtctgaaagctcgagcagctctagctcctctagtgagtcagagtcaagctcgtccgatctgagctccagcgatagcagcgactctgaatcagagatgttcccaaagttcacagaagtgaaacccaatgactccccatcgaaggaaaatgtgaaaaaaatgaaaaatgagtgcattcccccagagggccggactggggttacccagatcggctattgcgttcaagatactacatccgcaaacacaacactggtgcatcagacaactcctagccacgttatgccacccaaccatcaccagcttgcattcaattaccaggagctggagcatctccagacggtgaagaatatctcaccactacagatcctgcctcccagtggagactcggaacaattgtccaacggaatcaccgtgatgcacccgagtggagattccgatacaactatgctggagtcagagtgtcaggccccagttcagaaagatataaagataaagaatgcggactcgtggaaatcactcggcaaacctgtgaagcctagcggggtgatgaagagtagtgacgagttgttcaatcagtttagaaaggcagcaatcgagaaggaggtcaaggccaggacccaagaactgattaggaaacacctggagcaaaacactaaggagctcaaagcctcccaggagaaccagcgggacctgggaaatgggctgacagtcgagtcattctccaacaaaatccaaaataaatgctctggcgaggagcagaaggaacaccaacaaagctccgaagctcaagataaaagtaaactgtggttgctgaaagaccgggacttagccagacagaaggagcaagaacggcggagacgggaagccatggtggggacaatagacatgaccctacaaagcgatatcatgaccatgttcgaaaacaatttcgactag

SEQ ID NO: 180845 - DNA, 2844 bp, synthetic construct
  misc_feature 1..2844: note = Description of Artificial Sequence: Synthetic coding sequence
  source 1..2844: mol_type = other DNA
atgagcctgcccagccggcagaccgccatcatcgtgaaccccccccccccggagtacattaacacgaagaagaacgggagattgacaaatcaactgcagtacctgcagaaggtcgttttaaaggatctttggaagcactcatttagctggccgttccagcgtcccgtggacgcggtgaagctgcaactccccgattattacacgataatcaagaatccaatggaccttaataccattaagaagaggctcgagaataagtactatgccaaagccagtgaatgcattgaggacttcaacactatgtttagtaattgctatttgtataataagccaggagatgacattgtactgatggcacaggcactcgagaaactgttcatgcaaaagttgtctcaaatgcctcaagaggaacaagttgtcggtgtgaaagagcggattaagaaggggacgcagcagaacatagcagtgtcttctgccaaggagaagtcctctccgagcgccaccgaaaaggttttcaagcagcaggagataccgtcagtgtttcccaaaaccagcatcagccccctcaatgtcgtacagggcgcatccgtgaacagtagcagtcagaccgccgcccaagtgactaagggagtcaagcgaaaggccgacacaaccacacccgccacctcagccgtgaaagcctctagcgagtttagtcctaccttcaccgaaaaaagtgtcgctctgcctccgataaaggaaaatatgcctaaaaatgtccttccggatagtcagcagcaatacaacgtggtgaagaccgtaaaggtgacagagcagctacggcactgttctgaaatccttaaggagatgctggccaagaagcacttttcctatgcctggcctttctataacccagtcgacgtcaatgccctagggctacacaactattacgacgtggtgaagaaccccatggacctggggacaattaaagaaaaaatggataatcaagaatacaaggacgcctacaagtttgccgcagacgtgcgcctgatgttcatgaattgttacaaatacaaccctcccgatcacgaggtcgttacaatggcacgaatgttgcaagatgtcttcgaaactcatttctccaagattccaatcgagccggtagagagtatgccactgtgctacattaagactgatattacggagacaacaggacgggagaataccaacgaggcatcctcagaaggcaattcaagtgatgactccgaggatgagagggttaagcgtcttgcaaagttgcaggagcaattgaaggcagtgcatcagcaactgcaggtgctgtctcaggttccctttcggaagcttaacaagaaaaaggaaaaatcaaagaaggaaaagaaaaaggaaaaagtgaacaactcaaacgagaatcccaggaagatgtgtgagcagatgcggctgaaggagaagtccaaaagaaatcagcctaaaaaaaggaagcagcaattcatcggactgaagagcgaggacgaggacaacgcgaagccaatgaactacgatgagaaacggcagctctcactaaacattaacaaactacctggagataaactagggagagtcgttcacatcatccagtctagagagccttctcttagcaactctaatcctgatgagatcgagatcgacttcgagaccttaaaggcttctacccttagagagttagagaaatacgtatccgcctgcctccgcaagcgccctctaaagccacccgccaagaagattatgatgtctaaagaagagctgcattcacagaagaaacaggaattggagaagaggctgctggacgtgaataaccaactgaacagcagaaaaagacagaccaagtccgataaaactcagccctccaaggctgttgaaaacgtctccaggctgtcagaaagcagtagtagttcgtcttctagttcagaatcagagtctagttcctctgacctgagctcatcggactcctccgactccgaaagcgagatgttccccaaatttaccgaagttaaaccgaatgacagtccctccaaagagaacgtcaaaaagatgaagaacgagtgtattcctcctgagggacgcacaggtgtcacacagatcgggtattgtgttcaggacaccacgagtgcgaacacaacattagtgcatcagactacaccatcccacgttatgccccctaatcaccaccagctggcttttaattatcaggaattggagcaccttcagactgtaaagaacatcagtccgctgcagattctccctccgagtggagattccgagcaactttcgaatggaattacagtgatgcatccctccggtgattcagatacaaccatgttagaatccgaatgtcaggctcccgtgcagaaggacatcaagataaagaatgccgatagctggaagagtctggggaaacctgtgaaaccatcgggcgttatgaaatcaagtgacgagctgttcaaccagttccgaaaagccgccattgaaaaggaagtaaaggcgaggacgcaggaactcatccgtaaacatctggagcaaaacactaaggaattgaaggcctctcaagaaaaccagcgagatttgggtaatgggctgacggtcgagtcattcagtaataaaattcagaataagtgtagtggggaggaacaaaaagagcatcagcagagctccgaggcacaggacaagtcgaaactgtggctccttaaggacagggaccttgcccgccagaaagaacaagaaagacgcagaagagaggctatggtgggcaccatagacatgacgcttcaatcagacattatgaccatgtttgagaataattttgactag

SEQ ID NO: 180846 - DNA, 531 bp, synthetic construct
  misc_feature 1..531: note = Description of Artificial Sequence: Synthetic coding sequence
  source 1..531: mol_type = other DNA
atgagcctgcccagccggcagaccgccatcatcgtgaacccccccccaccagagtacatcaacaccaagaagaatggtaggttaacgaatcaattgcagtacctccagaaagtggttctgaaggacttgtggaagcatagcttctcatggccattccagagaccagtcgatgcagtgaaactacagcttccggattactacaccatcattaaaaacccaatggatctgaacacaatcaaaaaaagattggaaaataaatactacgcaaaagcctcagaatgcatcgaagactttaacaccatgttttcaaattgctacctgtacaacaagcccggagatgacatcgtgcttatggctcaggctctggaaaagctgttcatgcagaagctctcccaaatgccacaggaagagcaggtggtgggcgtgaaagagcgaataaagaagggaactcagcagaatattgctgtcagttctgcaaaggaaaaatcctcaccgagtgccactgagaaggtcttcaaacagcaggaatag

SEQ ID NO: 180847 - DNA, 1389 bp, synthetic construct
  misc_feature 1..1389: note = Description of Artificial Sequence: Synthetic coding sequence
  source 1..1389: mol_type = other DNA
atgagcctgcccagccggcagaccgccatcatcgtgaacccccccccacctgagtacataaacaccaagaaaaacggccggttgactaaccaactgcagtatctccagaaagtcgtcctgaaagacctgtggaagcactcgttttcctggcctttccaaaggcccgtggacgcggtcaaattgcagttaccagactattacactataattaaaaatccaatggacctcaacacaatcaagaagcgactggaaaacaaatactacgcaaaggccagtgaatgtatcgaggacttcaatacaatgttttcgaactgttacctctataacaaacctggagatgatatagtccttatggcccaagctctggaaaagctctttatgcagaagctctctcaaatgccacaggaggaacaggttgttggggtgaaggagcgtattaagaagggcactcagcaaaacatcgctgttagctccgccaaagagaagtccagccctagcgcgacagagaaggtgtttaagcagcaggagatcccatcggtgtttcctaagacctctatctctcctttgaacgtggtgcagggagcatcagtaaacagcagtagccagactgccgctcaggtgacaaaaggcgtgaaacggaaggcggacacaacgactcctgcgaccagtgccgtgaaggcttcgtctgagttctccccaacctttaccgagaaatcagtggccctgccacctatcaaagaaaacatgccaaaaaacgtcttgccagacagccagcaacagtataacgtggtgaaaaccgtgaaagtgacggagcaactccggcattgctcagaaatactgaaagaaatgctcgctaagaagcacttttcctacgcatggccattttacaatccagtggatgtcaacgcattaggactacataactattatgatgtggtcaagaaccccatggatcttggtacgattaaggaaaagatggacaatcaggaatataaagacgcatataagtttgccgctgatgtcaggctaatgtttatgaactgctacaagtacaacccccccgatcatgaagtcgtaaccatggccagaatgctgcaggatgtgtttgagacgcacttcagcaaaattcctatagaacctgtggagtccatgcccctgtgctatatcaagaccgatattaccgaaaccactggcagggagaataccaatgaggccagcagcgaagggaatagcagcgacgacagcgaggacgagcgcgttaaacgactggcgaagctccaggagcagctcaaagcggtgcaccagcaactccaggtcttaagtcaggtgccattccggaagttgaacaagaagaaggagaagtccaagaaggaaaagaagaaggagtag

SEQ ID NO: 180848 - DNA, 468 bp, synthetic construct
  misc_feature 1..468: note = Description of Artificial Sequence: Synthetic coding sequence
  source 1..468: mol_type = other DNA
atgagcctgcccagccggcagaccgccatcatcgtgaaccccccccctccagaatatattaacaccaaaaaaaacggccgtcttaccaatcagcttcagtacctgcagaaggtcgtcctgaaggacctgtggaagcatagcttttcctggcctttccaaaggcctgtggacgccgtgaaacttcagcttccagattattatacgataattaagaaccccatggatctgaacactataaaaaagcgacttgaaaacaagtactacgccaaggcgtctgaatgcattgaggacttcaatacaatgttttctaactgctacctctacaacaaaccaggagacgatattgtcctgatggcccaagcactggagaaattgtttatgcaaaaactgagccaaatgccccaggaggaacaagtcgtgggcgttaaggaaaggattaaaaaaggtacccagcagaatatcgcgtag

SEQ ID NO: 180849 - DNA, 603 bp, synthetic construct
  misc_feature 1..603: note = Description of Artificial Sequence: Synthetic coding sequence
  source 1..603: mol_type = other DNA
atgagcctgcccagccggcagaccgccatcatcgtgaaccccccccctcctgagtatattaataccaagaagaacggaagattaaccaatcagctccagtatctgcagaaagtggttctgaaggatctgtggaagcattcattctcttggccctttcagcggcccgtagatgccgtgaaattgcagctgccagactactacaccattattaaaaatccaatggatctgaatacgattaaaaagagactggagaacaaatattatgccaaagcttctgaatgtattgaggactttaatactatgtttagcaattgctacttgtataataagcctggggatgacattgtattaatggcccaggccctggagaaattattcatgcagaagctttctcagatgccacaggaggaacaggtggtgggagttaaagagagaattaagaagggaacacaacaaaacattgctgtctcctctgcaaaggaaaagtctagtccatccgccactgagaaggtcttcaaacagcaggagattcccagcgtcttcccaaaaacaagtatctcccctttgaacgtggtacagggagccagtgtgaacagctcctag

SEQ ID NO: 180850 - DNA, 468 bp, synthetic construct
  misc_feature 1..468: note = Description of Artificial Sequence: Synthetic coding sequence
  source 1..468: mol_type = other DNA
atgagcctgcccagccggcagaccgccatcatcgtgaacccccccccccccgaatatattaacactaaaaagaatggccggctgacaaatcagctccaatacctgcaaaaggttgtcctaaaagatctttggaaacactcatttagctggcccttccagagaccagttgatgctgtaaagctgcaactgccggactattacactattatcaaaaaccccatggacctgaacaccattaaaaagagactggagaacaagtactatgctaaagcctctgaatgcatcgaggactttaacactatgttttctaactgttatttgtacaataagccgggcgacgatatcgttctgatggcgcaggcactggagaaacttttcatgcaaaaactgagccagatgccgcaagaggagcaggtcgtgggggtgaaggagaggattaagaaaggtactcagcaaaacattgcgtag

SEQ ID NO: 180851 - DNA, 159 bp, synthetic construct
  misc_feature 1..159: note = Description of Artificial Sequence: Synthetic coding sequence
  source 1..159: mol_type = other DNA
atgagcctgcccagccggcagaccgccatcatcgtgaacccccccccgcccgaatatatcaacactaaaaagaacggccggttgaccaatcagttgcagtatctacagaaagtcgtgctgaaggatctttggaagcactcatttagttggccgttttag

SEQ ID NO: 180852 - DNA, 291 bp, synthetic construct
  misc_feature 1..291: note = Description of Artificial Sequence: Synthetic coding sequence
  source 1..291: mol_type = other DNA
atgagcctgcccagccggcagaccgccatcatcgtgaacccccccccgccggagtacatcaacacgaagaagaacggccgactcaccaatcagctgcagtacctccagaaagttgtgctgaaggacctttggaagcattccttcagttggcccttccagaggccagtggacgcagtgaaacttcaactcccggattattataccatcatcaaaaacccaatggatctgaacaccatcaagaaaagacttgaaaataagtactacgcaaaagccagcgaatgtattgagtag

SEQ ID NO: 180853 - DNA, 99 bp, synthetic construct
  misc_feature 1..99: note = Description of Artificial Sequence: Synthetic coding sequence
  source 1..99: mol_type = other DNA
atgagcctgcccagccggcagaccgccatcatcgtgaaccccccccccccagaatacataaatacgaaaaaaaacgggagacttaccaatcaactctag

SEQ ID NO: 180854 - DNA, 1398 bp, synthetic construct
  misc_feature 1..1398: note = Description of Artificial Sequence: Synthetic coding sequence
  source 1..1398: mol_type = other DNA
atgagcctgcccagccggcagaccgccatcatcgtgaacccccccccaccagaatacataaacaccaaaaagaatggaagattgaccaatcagctgcagtacctgcaaaaagtggtgctgaaggacctgtggaaacactccttctcttggccctttcagcgacccgttgacgccgtcaagctgcagcttcctgactactataccattatcaagaaccctatggatctgaataccatcaaaaaacgactggaaaataaatactacgctaaggcgtccgagtgtattgaggacttcaatactatgtttagcaattgctacctctacaataaaccgggggacgatatcgtcttgatggcacaggccctcgaaaaactctttatgcagaagctgtctcagatgcctcaggaagagcaggtggtgggggtaaaggaaagaatcaagaagggcacccagcaaaatatcgctgttagcagcgccaaagaaaagtccagtccatccgctacggagaaggtctttaaacaacaagagatccctagcgtttttcccaagacatctattagccccctgaatgtcgtccagggcgcatccgtcaatagctcctcgcaaaccgccgcacaggtaactaaaggcgtaaaaagaaaagccgacactaccacccctgcaaccagtgctgttaaagcatctagcgagttctcccctacctttacagagaaatccgtggctctgcctcccatcaaggagaacatgccgaaaaacgtgttgcctgattcgcagcagcagtataatgtggtgaagacagtgaaagtcaccgagcagctgaggcactgcagtgagattttgaaggagatgctggccaagaagcattttagctatgcttggcctttctacaaccccgtcgatgtcaatgcgctaggccttcacaactattatgacgtggtcaaaaatcccatggatctgggtactattaaggaaaaaatggataatcaggagtataaggatgcctacaagttcgccgctgatgtgcggctgatgtttatgaattgttataaatataatcctcccgaccacgaagtagtaaccatggcccgtatgctgcaggatgttttcgagactcacttttctaaaatacccatcgagccagtggagtcaatgccactgtgttacataaagactgacattaccgagaccacggggagggagaatacgaatgaagctagctcggaaggaaatagcagcgacgactcagaagacgaaagggtgaaaaggctggcgaagctccaagagcagctgaaggcagtccaccagcagctccaggtattgagtcaggtcccttttcgaaagctcaataaaaagaaggaaaaaagcaaaaaagagaaaaaaaaagaaaaaaagaagtag

SEQ ID NO: 180855 - DNA, 303 bp, synthetic construct
  misc_feature 1..303: note = Description of Artificial Sequence: Synthetic coding sequence
  source 1..303: mol_type = other DNA
atgagcctgcccagccggcagaccgccatcatcgtgaacccccccccacccgaatacattaacacgaaaaaaaatggacgccttaccaatcagcttcagtaccttcaaaaagtagtcctcaaggatctgtggaagcatagtttctcatggccatttcagaggccagtggatgcagtcaagcttcagttacccgattattacactattatcaagaaccccatggacttgaacaccataaagaaaagattggagaacaaatactatgcaaaggcctctgagtgtatcgaagatttcaacacatag

SEQ ID NO: 180856 - DNA, 5550 bp, synthetic construct
  misc_feature 1..5550: note = Description of Artificial Sequence: Synthetic coding sequence
  source 1..5550: mol_type = other DNA
atggccgtgagccggctggaccggctgttcatcctgctggacaccggaactacgcccgttacacggaaggctgctgcccagcagctcggagaggtggtaaagcttcatccgcacgagctgaataacctgctttcaaaagtacttatctacctacggtcagccaattgggacacccgcattgctgcgggccaagcggtcgaagccattgtcaagaacgtacctgagtggaaccctgttcctcgcacacgacaggaacccacttcagagtcttccatggaagactccccaaccacagaaaggctcaacttcgatcggttcgacatatgccgcctactgcagcacggggcgtccctgcttggaagcgccggcgctgaattcgaagtacaggatgagaagagcggtgaggtggatcccaaagagcgaatcgcccgacagagaaaactcctacagaagaaacttggcctcaatatgggtgaagctattggaatgtccaccgaggaactgttcaatgatgaggatctggactacacaccaacaagcgcatctttcgtgaacaaacaaccgaccttgcaagctgcggagcttatcgatagcgagttcagagcgggcatgagtaaccggcagaagaataaggcgaagcgaatggccaagctgttcgctaaacagaggtcaagagatgccgtggagaccaacgagaagagcaacgattctaccgatggcgagcccgaggagaagcggagaaagatcgccaatgtggtgataaaccaaagcgccaacgatagtaaggtgttaattgataacatccccgatagctcttctctgattgaggagaccaacgaatggcctctagagagcttctgtgaggaactttgcaatgacctgttcaacccctcgtgggaagtccggcacggtgcgggaactggcctgcgagaaattcttaaggcccatggcaaaagcgggggtaagatgggggactctacactggaggaaatgatccagcaacatcaggaatggctggaggatctggtgattcgcctgctctgcgtattcgccctggatcgattcggtgactttgtctctgatgaagtcgtggccccagtccgggagacctgcgcacagacactgggcgtggtgctaaaacatatgaatgagacgggcgttcacaagaccgtggacgtgttactgaagctgttgacccaggaacagtgggaggttaggcacggaggccttctcggtatcaaatatgctctggctgttcggcaggacgtgattaacaccctcctgcccaaggtgcttactaggataatcgagggacttcaagatctggatgacgacgtgcgagccgttgcagcagcctcactggttcccgttgtggaatctttggtgtacttgcaaacccagaaggtgccttttatcattaacactttgtgggacgccttactggagctggatgacctaacggctagtaccaattccattatgacattgcttagcagtcttctcacctaccctcaggtgcagcagtgtagtatacagcagtctctgaccgtacttgttcctcgggtgtggccgtttctgcatcacactattagctccgtgcgacgcgccgctctggagacactgtttacactgctgtccacgcaggatcaaaattcgagcagctggttgatcccaatcctgcctgacatgttgcgtcacatattccagttttgtgtgctcgagagtagtcaagaaatcctggatcttattcataaggtttggatggaactgctctcaaaggctagcgtccagtatgtcgtggccgcggcatgtccgtggatgggagcttggctctgtctgatgatgcagccttcccacttgcctattgatctgaacatgcttctggaggtaaaagctcgagcaaaggagaaaacaggtggaaaagtgaggcaaggacaatcccagaataaggaagtgctgcaggagtacatcgccggagccgacactattatggaggatccagcaacaagggactttgtggtgatgcgagcccgaatgatggcagcgaaactactcggcgccttgtgttgttgcatctgcgacccgggcgtcaacgtagtgacccaggagatcaaaccggccgaatctctggggcagttactgctatttcatctgaattctaaaagcgcactccagcggatatccgtagcccttgtcatttgtgagtgggccgccttgcagaaagaatgtaaagccgtaacccttgcggtgcagccgcggctccttgacatcctctccgaacacttgtattacgatgaaattgcagtcccattcaccagaatgcaaaatgaatgcaagcagctgatatcaagcctggccgatgtgcacatagaagtcggcaacagagtcaacaacaatgtgctcaccatcgatcaggccagcgatctggtgacaactgtgtttaacgaggccacctcatcattcgacctcaatccccaggttctgcaacagctggactcgaaacggcaacaggtgcaaatgacggtgacagagactaatcaggagtggcaagttcttcaacttagagtgcacaccttcgcagcctgcgcagtggtcagtctgcaacaactccctgaaaaactcaaccctatcattaaaccactgatggagacgattaagaaagaggaaaatacgctggtgcagaactatgcagcgcagtgtattgctaagcttttacaacagtgtaccactaggacaccatgtccgaatagtaagattatcaaaaatttgtgcagctcactttgcgtggacccgtatcttactccctgcgtaacatgccccgtgccgactcagtctgggcaggaaaattccaaaggatcaaccagcgagaaagacgggatgcaccatactgttaccaagcaccgtggcattattaccctgtaccggcaccagaaggccgcctttgcaattaccagccggcgaggtccaacccccaaggctgtgaaggcgcagatcgcggacctcccagccggctcttccggaaacatcctagttgaacttgatgaggcgcagaagccttatctggtccagcggcgtggagctgaattcgcacttacaacaattgtcaagcatttcggcggcgagatggcagtaaagctcccccatctctgggacgctatggtggggcctctgcgcaacacgatcgacatcaacaattttgatgggaagagcctcctagacaagggggatagtcctgctcaggaactggtaaattcgctgcaggtcttcgagaccgctgccgcgagcatggatagcgaactgcacccacttctggtgcagcatctgcctcatctttacatgtgcctccaatacccatcgaccgcagtacggcacatggctgcacgttgcgtgggcgtgatgagcaaaattgctaccatggagactatgaacatttttcttgagaaggtgctgccttggctgggggcgatcgatgacagtgttaaacaggagggggccatagaggccttagcttgtgtcatggagcaactagatgtcggcattgtcccatatattgtacttcttgtcgtaccagtgctgggcaggatgtctgaccagacggacagtgtgcggtttatggcaacccagtgctttgccactctcattcgattgatgcctctggaagcaggcatccccgatcctcctaacatgagtgctgagttaatacaattgaaagcaaaggagagacattttctggaacagttgcttgacggcaaaaagttggaaaactataaaattccagtaccaattaacgctgagctgagaaaatatcagcaggacggtgttaattggctcgctttcctgaataagtataagctccacggcattctgtgcgacgacatgggcctgggaaagacgttgcaaagcatttgtattctggccggagaccactgccatcgagcacaagaatatgcacgctctaaacttgctgagtgtatgcccttgccctccctggtagtttgtcctccaaccctgaccggccactgggtggacgaagtgggcaagttctgcagcagggaatacttgaaccctctgcattacacgggccccccgactgaacgcataaggcttcaacatcaggttaaacggcacaacttgattgtagctagctatgacgtcgtaagaaatgacatagacttttttcggaacatcaagtttaattactgcatccttgacgaaggtcacgtcatcaagaacgggaagaccaaactgtccaaggccgttaaacaactcaccgcaaactaccgcatcatcctgagcggaacgcccattcaaaacaatgtcctagagctttggagtttgtttgactttctaatgcccggttttttgggcacagagaggcagttcgctgctcgatacggaaagcctattctggcaagccgggatgccagatctagttcaagagagcaagaggccggcgtgctggctatggatgccttgcacaggcaggtgctgccatttcttctgagacgaatgaaggaggacgtgctgcaggacctgcccccaaagatcatccaggactactattgtacactgagcccattacaggttcagctctacgaagacttcgcaaaatcgcgggctaagtgtgatgtggacgagacggtgtcgtccgccacgctgtccgaggagacagagaaacccaagctgaaagctaccggccacgtcttccaggccttacagtacctgaggaagttatgtaaccatcccgctctcgttctgacaccacagcatcccgagtttaagactaccgccgaaaaactggctgtacagaacagtagcttgcacgacatccagcacgccccaaagctatccgcacttaaacagcttctactggactgtgggcttgggaacggtagtacgtcagagtctggcactgaatccgtggtggcacaacatcggatactaatattttgccagctcaagtctatgcttgatatcgtggaacatgatctgctcaaaccccatcttccctctgtaacatacctgcgacttgatggatccattcctccaggtcagaggcacagcatcgtgtccagatttaacaacgatccgtccatcgatgtgctgcttctgaccactcacgtcgggggtctggggctgaacttaaccggggctgataccgtggtgtttgtagaacacgattggaatccaatgagagatctgcaggctatggatcgggctcacagaataggccaaaaacgcgtcgtgaatgtgtataggctgattacccgtggtaccttagaggaaaaaatcatgggtttgcagaagtttaagatgaacattgctaatacagtaatctcccaggaaaattcgtctcttcagagcatgggtactgaccagctattagacctgtttacactggataaagacggtaaggcagaaaaagccgacacatcaacatcgggaaaagcctcaatgaaatctattctggaaaacctgtccgacttgtgggatcaagagcagtacgactctgagtactctctggaaaatttcatgcacagcctgaagtag

SEQ ID NO: 180857 - DNA, 2100 bp, synthetic construct
  misc_feature 1..2100: note = Description of Artificial Sequence: Synthetic coding sequence
  source 1..2100: mol_type = other DNA
aagctgtggttcaagaacaccgaggactaccggcggaccgccctgaccaggctaacttctggagtgatggagcagctggatgttggaatagtcccgtatatcgtcctccttgtggttccagtcttggggcggatgtccgaccagacggattccgtcaggttcatggccacccagtgcttcgctacactgatacggctcatgcccctggaagcaggtattccggatcctcccaatatgagcgccgagcttatacagctgaaggccaaagagaggcatttcctggagcagctgctggacggcaaaaaactcgagaattacaagattcccgtaccaataaatgctgaattaagaaagtatcagcaggacggcgtgaactggcttgcatttctaaataaatacaaacttcacgggatcctctgtgatgacatgggacttggcaagacgcttcagtcaatctgtatattagccggcgatcactgccatagggcccaggaatacgctagatccaagttagccgagtgcatgcccctgcccagccttgttgtgtgtccccccaccctgactgggcactgggtcgatgaagtaggaaagttctgcagtagggagtacctcaatccgttacattatacaggaccacccaccgagcggatccgactgcagcaccaagtgaagcgccataatttaatcgtagcaagctacgacgtggtaaggaacgatattgatttcttccgaaatatcaaatttaattattgcatccttgatgaaggtcacgtgatcaagaacggaaagaccaagctgagcaaggccgtgaagcaactgacagcaaactatcgcataattctgagcggaaccccaattcagaacaacgtgctagaactatggtccttgttcgacttcctgatgcccggatttttgggaacagaacgtcagttcgcagccaggtatggcaagcccattcttgccagccgcgacgctcgctcgagttctagagaacaagaagccggtgtcctggccatggacgcacttcatcggcaggtgcttccttttctcctgcgacgcatgaaggaagacgttttgcaggacctgccaccaaagataattcaggactattattgcactctgtctcccttacaagtccagctgtacgaggactttgcaaaaagtcgcgctaaatgtgacgtggacgagaccgtttcctccgctaccctgtccgaggagaccgagaaaccaaaacttaaggccaccgggcatgtcttccaagctctacagtacttaagaaaactgtgcaaccaccctgcattggtgcttaccccacagcacccggagtttaaaacaaccgcagagaagctcgcagtccagaatagctccctccacgatatccaacatgcgcccaaactctcagctttgaaacaactccttctagactgcgggcttgggaatgggtctacatccgagagcggaactgagtctgttgtggcgcagcatcgaatcctcattttttgtcagctgaaaagtatgctcgacatcgtggagcacgacctcttgaagccacatctgccctctgtcacctacctcagactggacggttccatcccccctggtcagcggcactcgattgtgtcaaggtttaataacgatccctccatcgatgttttgctgctgaccactcacgtgggtggtctgggactaaatctcaccggtgccgacactgtcgttttcgttgagcatgactggaatcccatgagagacttacaggctatggatagagcacatcggatcgggcagaagcgcgttgtcaatgtttaccgcttgatcaccagagggaccttggaggagaagattatgggcctgcagaaatttaaaatgaatatcgccaatacggtgatatcccaggaaaatagctctctgcagtcaatggggactgaccaattgctggatctttttaccctggacaaggatggaaaggcggagaaggcagacacctccacatccgggaaggcctcaatgaagtccatcctagagaacctgtcagatttatgggaccaggagcagtatgatagcgagtactctctggagaatttcatgcacagcctgaagtag

SEQ ID NO: 180858 - DNA, 2034 bp, synthetic construct
  misc_feature 1..2034: note = Description of Artificial Sequence: Synthetic coding sequence
  source 1..2034: mol_type = other DNA
atggagcagctggacgtgggcatcgtgccctacatcgtgctgctggtggttcctgtattaggaaggatgagcgaccagactgacagtgtgaggttcatggcgacacagtgttttgcaactcttattagactcatgcccttggaggcaggcattccagatccacctaatatgagcgccgagctgattcagttgaaagccaaagagcgccactttctcgagcagctgctcgacggcaagaagctggaaaactataaaattcctgtgccaattaacgccgaactccgtaagtaccagcaggatggcgtgaattggctggcgtttttaaataaatacaagctgcatggtattttatgtgacgacatgggcctcggcaagacacttcaaagtatttgtattcttgcaggtgaccactgccaccgggcacaggagtatgcaaggtccaaattggcagaatgcatgccgcttccctctctggtggtgtgccctcccaccctcaccggccattgggtggatgaggtggggaagttttgtagcagagagtatctcaaccctctgcactatactggaccccccactgagcgtattaggcttcagcatcaggtaaagcgccataacctaattgtagccagttatgatgttgtccgtaacgatatagactttttccggaatatcaagtttaactattgcattctggatgaggggcatgtgatcaagaatggcaaaaccaagctgtccaaagcagtgaaacagctaacagcaaattaccgcattatactatcgggcacgcctattcagaacaatgtgcttgagttatggtctctgttcgattttctaatgccgggcttcctgggaacagagaggcaattcgcagcacgatatgggaaacccatccttgcttcaagggacgcccgctcatcaagtagagaacaagaagccggagtcttggctatggacgctctccataggcaggtcctgccattcctactgaggcggatgaaggaagatgtcttacaggatctgccacctaaaattatccaggattattattgcaccctgtcccctttacaggtccagctttacgaggattttgccaagagtagggccaaatgcgatgtggatgaaacagtttccagtgcgactctgagcgaggagaccgagaaacccaaactgaaggccacagggcatgtcttccaggccctacagtacctgcggaagttgtgtaaccaccccgcgttagtactgacaccgcagcaccccgaattcaaaactacagccgagaagctcgctgtccaaaattcatctctgcacgatatccagcatgcccctaagctctcggccctaaaacagctattactggattgcgggctggggaatgggtctacctccgaaagcgggacagaaagtgtcgtggcccagcacagaatactgatcttctgccagttgaaaagtatgctagatatcgttgagcacgatttactaaagccacatctccccagcgtgacttatctacggctggatgggtcaatcccacctggacagaggcattctatagtgtctagatttaataacgacccatcaattgacgtactgttgctaaccacgcacgttggcggtctcggcctgaacctgacaggcgccgacaccgtggtatttgtggaacacgactggaatccaatgagggatctccaggccatggaccgcgcccacagaattgggcagaagagggtcgtgaatgtgtatcgcctaatcacacggggaacactggaggaaaagatcatggggctgcagaagttcaagatgaacatagctaacaccgtaatctctcaggaaaattctagcctgcagtcaatgggaacagaccagctgctagacctgttcaccttggataaagacggcaaagccgagaaggccgatactagcacgtccgggaaggcttccatgaagtccatcttagaaaacctgagtgacctctgggatcaagagcagtatgacagtgagtatagcctggaaaatttcatgcacagtctgaaatag

SEQ ID NO: 180859 - DNA, 1233 bp, synthetic construct
  misc_feature 1..1233: note = Description of Artificial Sequence: Synthetic coding sequence
  source 1..1233: mol_type = other DNA
atgggcgccaacgccagcaactacccccacagctgcagcccccgggtgggtggcaactcccaggctcagcagaccttcatcggaactagctcatactctcagcagggctatggttgtgagagcaagctttactcactggaccatggacatgagaagcctcaagacaagaaaaagcgcacatctggcttggccaccttaaaaaagaagtttatcaaaagacgcaaatcgaaccgctcggccgaccatgctaagcaaatgcgggagctgctttccgggtgggatgtacgagatgtgaatgcccttgtagaagagtatgagggaacatctgctctgaaagaactgagtcttcaggcctccctagcccggcccgaggctcggacattgcagaaagatatggcagatctctacgaatataagtactgcacggatgttgaccttattttccaggagacctgtttccccgtccatcgggccatcttagcagcccgatgtccctttttcaaaaccctgctgtcctccagtccagaatacggtgctgaaattatcatggacatcaacaccgcaggcatcgacatgccaatgttctctgcactgctacactacctctatacaggggagtttggaatggaggattcccgattccagaatgtggatatacttgtgcagctgagcgaggagttcggaacccccaactctttggatgtggatatgcgaggtctcttcgactacatgtgctactacgatgtcgtactgtctttctcctctgatagcgagctggtggaagcctttgggggaaaccagaactgtctggacgaggagctgaaggcccacaaggcagtgatctccgcccggagtccattctttagaaatctcttgcagagaagaatccggaccggtgaggaaattaccgaccgcactctccgtacacctaccagaattattctcgatgaatcaatcattcccaaaaaatacgctacggtcatattacactgtatgtacacagacgtggttgatctgtctgttctgcactgttccccttccgtcgggagtctatctgaagtgcaggcccttgtggctgggaagcccaacatgactagagccgaggaagctatggagctttaccatatagccctattcctggagttcaacatgctagctcaggaggaaaccaccgttatccgccctgcatgtgccgccgagctttctaactcttgccttttacctcagtcctag

SEQ ID NO: 180860 - DNA, 3399 bp, synthetic construct
  misc_feature 1..3399: note = Description of Artificial Sequence: Synthetic coding sequence
  source 1..3399: mol_type = other DNA
atgggcgccaacgccagcaactacccccacagctgcagcccccgggtcggtggcaactctcaggcacagcagaccttcattggaactagcagttactctcaacaaggctatggatgtgagtccaaactttatagcctagaccacggacacgaaaagccgcaagataagaagaagagaactagcggccttgccacacttaaaaagaaatttattaagagacgtaagagcaacaggagcgccgaccacgccaagcaaatgagagagcttctgtctggctgggacgtgcgagacgtgaatgcactggttgaggagtacgaagggacaagtgcacttaaggaactgagccttcaggccagccttgcccgcccagaagcaagaactctgcagaaggacatggccgatctgtacgaatacaagtactgtaccgatgtggacttgatcttccaagaaacttgtttcccggtacatagagccatactggcagcgcgttgcccgttctttaagactctgctctctagctccccagagtacggagcagagataatcatggacattaatacagcaggcattgacatgcccatgttttctgctctccttcactacctgtacactggtgagttcggaatggaggatagccgtttccaaaatgtggatatccttgtccagctatccgaagaattcgggaccccaaactctcttgacgtcgatatgaggggactcttcgactatatgtgttactacgatgtggtgctgtccttttccagcgacagcgagctggtggaggccttcggcgggaaccagaactgccttgacgaggagctgaaagcacacaaggcagtcatcagtgcacgatctccgtttttcagaaatctcctgcagaggaggattcgtaccggcgaagaaatcactgacaggacgctgcgcacaccaaccagaattatcctggatgaaagtatcatacccaaaaagtacgctacagtgattctccattgtatgtacaccgatgtggtggacttgtccgtgctccattgttctccttctgtgggctcgctgtccgaggttcaagctctcgtggctggaaagccgaacatgactagggcagaagaggccatggaattataccacattgccctattcctggaatttaatatgttagcacagggctgtgaggacatcatcgccgaatcaatttccctggacaccctgatcgcgattctcaagtggtcatcgcatccatacgggtctaagtgggtccatcggcaggccctgcattttttatgcgaggagttcagccaggtcatgactagcgatgtattctacgaactgtcaaaagaccacttattgacagctatccagtcagactaccttcaggccagcgagcaggatatcctcaagtacctcatcaaatggggtgaacaccagttgatgaagagaatcgccgatcgggagccaaacctgcttagtggcaccgcacacagtgtgaataagaggggcgtgaagaggcgggatctggacatggaggagctccgtgagatcctgagctctcttctcccgtttgtgcgcatcgagcatatcctgccaatcaattcagaggtgctctcagatgctatgaagcggggtttaatctccaccccccccagtgacatgctaccaactaccgagggcggtaaaagcaatgcctggctccgtcaaaaaaatgcaggcatctacgttcgtccacgcctgttcagcccatacgtggaggaagccaagagtgtcctggacgagatgatggtcgagcagaccgacctcgtacgcctgaggatggttcggatgagcaacgtgcctgacacactttacatggtcaataacgctgtgccccagtgctgccacatgatcagccaccagcaaatctcaagcaatcagtcctcaccgccctcggtcgttgccaatgaaatcccagtcccgaggctgctgatcatgaaagacatggtccgtcgattgcaagagctgagacacacggaacaagttcagagagcatacgccctgaattgcggagagggggcaaccgtttcctacgaaatccaaattcgcgttttacgggaattcgggttagcggatgccgcggccgaattgctccagaaccctcataaattctttcctgacgaacgctttggtgatgagtcccccctcttgactatgagacaaccaggccggtgcagagtaaactcaacccccccggcagagacaatgttcacggaccttgattccttcgtggcttttcatcctcctctgcctcctccgcctccaccctatcaccctccagccacacccattcacaatcaattgaaagcaggatggaaacaacggcccccgtctcagcatcccagtcgcagtttctcctacccatgcaatcactctctgtttcattcccgtaccgctcctaaggcaggccccccacctgtgtatcttcccagcgtgaaggcagccccccccgactgcacgtcgacagccggcctcggtcgccaaactgtggctgccgccgccgcaacgactacaagcaccgcaacagcggccgccgctgccgcctccgagaaacaagttaggacccagcccgtcctgaacgacttaatgcccgacattgctgtgggagtgtccacactgagtctgaaggaccggcgactcccagagctggccgttgatactgaattatcccagagcgttagcgaagccggacctggcccacctcagcacctgtcctgcattccccaacgccacacgcacacatcccggaaaaaacatacactggagcagaaaactgatacaagggagaaccctcaagagtatccagatttttacgatttctccaacgccgcttgcaggcccagtacaccagccctgtctcggagaaccccatctccatcacagggcggctatttcgggccagacctctacagtcataacaaagcctccccaagcggcctaaagtctgcatatctgccaggccagacatctcccaaaaagcaggaggaggcaaggcgagagtacccactgagtccggatgggcacctgcatcggcaaaaaaacgaaccgattcatctcgatgtagtggaacagcctccccagcggagtgactttcccttggcagcgcctgaaaacgcaagtaccggaccagcccacgtacgggggcgcacagccgtggagactgatttaaccttcggcctgacacccaatagaccttctcttagcgcctgttcatctgaggccccagaggaaagatcaggacggcgtctcgcagactccgagtcactgggacacggcgcccagaggaatacagacctggagcgagaagactccatcagccggggacggaggtcccctagcaagccggacttcttgtacaagaaatctgccctgtag

SEQ ID NO: 180861 - DNA, 2121 bp, synthetic construct
  misc_feature 1..2121: note = Description of Artificial Sequence: Synthetic coding sequence
  source 1..2121: mol_type = other DNA
atgtacaccgacgtggtggacctgagcgtgctgcactgcagcccctcagtaggcagcttgtctgaagtccaggccctggtcgcgggcaaaccgaacatgacccgcgctgaggaagcaatggagctgtaccacatagccctgttcctggagtttaatatgctcgcccaggagcctaacctgctgagtggcaccgcccactctgtgaataaaaggggcgtgaagcggagagacctggacatggaggagctgcgcgagatcctgtcatccctgctcccgtttgtccggattgagcacattctacccatcaattctgaggtgctcagcgacgccatgaagagaggcttaattagtacgccaccttccgatatgcttcccactactgagggtggtaaatcaaatgcctggctgcgacagaagaacgccggcatctacgttagacctagactttttagtccgtacgtcgaagaggcaaaatcagttcttgacgaaatgatggtggagcagacagatctagtgcgactccgcatggtgcgaatgagcaacgtacctgataccctgtacatggtgaacaatgccgttcctcagtgttgtcatatgataagccaccagcagatctcctccaaccagagctcccccccaagcgtggtagctaatgagataccagtgcctagactgctcattatgaaggatatggtgcggagactacaggaattgaggcacacagagcaagtgcagcgcgcctacgctctgaactgtggcgagggagccactgtgtcgtacgaaattcagatccgggttttgcgagagtttgggctggccgacgccgccgctgaattgctgcaaaacccacacaagttctttcctgacgagcgctttggtgacgaatctccactgctgaccatgcgccaaccgggtagatgcagggtcaatagcaccccccctgctgagacaatgttcaccgacctggacagctttgtcgccttccaccctccacttcccccccctccaccgccctaccacccgccagccactccgatccacaaccagctcaaggcaggttggaagcaaaggccccctagtcagcacccttcccggtcttttagctacccctgtaaccattccctgtttcattcacgcaccgccccaaaagccggccctcctccagtgtacctgcctagcgtcaaagcggcgccacccgactgcacaagtacagctgggcttggaaggcagaccgtggccgccgcagccgctactacaacttccacagctaccgccgccgctgccgcagctagcgaaaagcaggtgaggacccagcccgtcttgaacgatcttatgcccgacattgccgtcggagtcagcacactaagtttgaaagatagacgcctccccgagctagccgtagacactgagttatcacagagtgtcagcgaggcaggtccaggtccccctcaacacctgtcgtgcatcccacaaagacacacgcacacctctcgcaagaaacacacccttgaacaaaagactgacactagagagaatccccaagagtacccggacttctatgacttttcaaatgcggcatgccgccccagtacccccgccctgtcccgcaggacaccttctccatctcagggtgggtatttcggcccagatctgtattctcataataaggcctccccttctggtctcaagagtgcctacctgccaggacagaccagccccaagaagcaggaggaggctcgcagggagtatccactgtcgcctgatggccacctacacagacagaaaaacgaaccaattcacctcgatgtcgtcgagcagccaccccaacggtctgatttcccactggcagccccagaaaatgcttcaaccggccccgcacatgtcagaggaaggaccgctgtggaaacagacctgacatttggcttgacccctaaccggccttcgctgagcgcgtgcagctcagaagcacctgaggagaggagcggtcgccgtctggctgactctgagagcctgggacacggggcccagcggaatacagacctcgagagggaagactcaatcagccggggaagaaggtctccttcaaaaccggatttcttgtacaaaaaatcagcactctag

SEQ ID NO: 180862 - DNA, 2346 bp, synthetic construct
  misc_feature 1..2346: note = Description of Artificial Sequence: Synthetic coding sequence
  source 1..2346: mol_type = other DNA
atggccggcggcgccggcgccggcgccgacggcggcgccggcggcgggggcggtggcggcgacggatctggtccatcgggttcctcgagcggcgggcggtctctccggggttgtgaagacattatcgctgagtctatatctctggataccctcatcgctatactcaaatggtctagccatccatatggtagtaaatgggttcatcgacaggctctgcactttctctgcgaggaattctctcaagtcatgactagcgatgtcttctatgagctctctaaagatcacctgctaaccgctattcagtcagactatctgcaggcttctgaacaggacattctgaagtacctgattaagtggggcgagcatcaactgatgaagcgaattgctgatagagagcctaatctgctctcaggtaccgcccatagtgtcaataaacggggagtcaaacggagggacctggacatggaggaactgagagaaattttgagctcactgctgcctttcgtccgaattgaacatatcctaccaatcaacagtgaagtgctcagtgacgctatgaaaagaggtctgatctcgactccccccagcgatatgttgcccacgaccgagggcggaaagagcaatgcttggctgagacagaaaaacgccggcatctacgttcggccacgactttttagcccttatgtggaggaggcgaaatcagtcttggacgaaatgatggtggagcagacggatctggtccgactgaggatggttaggatgtctaatgtgcctgacactctgtacatggtgaacaatgctgtcccgcagtgttgccacatgattagccaccaacagattagttcgaaccagtcctcccccccctccgtcgttgccaatgaaatcccagtcccacggctgctcattatgaaagacatggtccggcggctgcaggagctgagacacaccgagcaggtacagagagcctacgcactaaactgcggagaaggggccaccgtgtcatacgagattcagataagggtacttcgtgagtttggattagccgacgccgcagcagaattactccagaatccacacaagttttttccggatgagcgtttcggcgatgagtcccctctgctcaccatgagacagcccggacgctgcagagtcaattccactccgccggctgagactatgtttacggacttggacagttttgtggcgtttcatccaccactgcccccccctccgccaccctatcacccacctgcaacaccaatccacaaccaactgaaggcagggtggaagcagagaccaccgagccagcatcctagcagatctttctcttacccgtgtaatcatagtctgttccatagtcgaaccgcccccaaggccgggccgccacctgtgtacttgccctccgtaaaggccgcacccccggactgtacctctaccgcaggcttgggtcgccagaccgtggccgctgcagccgccacaaccactagtaccgccacagcagcagctgctgccgcgtccgaaaagcaggtgaggacccaacccgttctaaatgatctgatgccagatattgccgtaggcgtgagcaccctgtcccttaaagacagaagactgccagagcttgccgtggataccgaattgtcccagtcagtcagcgaggctgggcccggtcctccccaacatctgtcatgcatcccccagcgacatacccacacgtccagaaaaaagcatacactggagcagaagaccgacacccgcgagaatccccaggagtaccccgacttttacgatttcagtaatgcagcgtgccgcccatctacccctgccctcagcagacgcacaccctcgccctctcaaggagggtactttggccccgacctttacagtcataataaagcaagccccagcggtttaaaaagcgcctatctgccaggccagacctccccaaagaagcaggaagaggctcgccgagagtacccgctgtcgccagatggccacctgcacagacagaagaacgaacctattcatttagacgtagtggagcagccgcctcagaggtcagatttccctcttgcggccccagagaatgcttccactggcccggcacacgtgcgtggccggacagccgtcgagaccgacctcacttttgggctgacacctaataggccctctctttctgcctgttcttctgaagccccggaggagagaagtggcagacgactggccgattcagagtccctcgggcacggagcacagaggaacacagacctagaaagagaagattctatcagcaggggaagaaggagtccttccaaaccagatttcctttataaaaagagcgcactatag

SEQ ID NO: 180863 - DNA, 168 bp, synthetic construct
  misc_feature 1..168: note = Description of Artificial Sequence: Synthetic coding sequence
  source 1..168: mol_type = other DNA
atgggcgccaacgccagcaactacccccacagctgcagcccccgggtcggaggtaactcacaggcacagcagacctttattgggacttcatcttactcgcagcagggctatggctgtgaatcaaagctctactcgctcgatcacgggcatgaaaaacctcaggattag

SEQ ID NO: 180864 - DNA, 1635 bp, synthetic construct
  misc_feature 1..1635: note = Description of Artificial Sequence: Synthetic coding sequence
  source 1..1635: mol_type = other DNA
atgcgggagagccagcccgaggccgagatccccctgcaggacaccactgccgaggcattcaccatgcttctcaagtacatctatactgggcgagcaactcttactgacgaaaaggaagaagtacttctagatttcctgagtctggcccacaagtatggatttccggaactcgaagactcgacaagtgaatacctgtgcaccatactcaatatacagaatgtgtgtatgacgttcgacgtggcaagtctatactcccttcctaaactgacttgtatgtgctgcatgttcatggacaggaatgcacaagaagtgctttcctctgagggatttttaagtctttctaagacagctttgttaaatattgtgctcagggactcattcgcagctcccgagaaagacattttccttgcccttctcaattggtgtaagcacaatagcaaggagaatcacgctgaaatcatgcaggcagtgagactgccgcttatgtcacttacagaactcctgaacgtggtgcgccctagtggattgctgagccccgatgccattcttgatgccattaaggtgcgttcagagagcagggatatggaccttaactaccgagggatgctcatccctgaagaaaatatcgccactatgaagtacggcgcccaagtcgtcaagggagagcttaaatctgcgctgctcgacggcgacacacagaattacgacttagatcatgggttctctcgacacccaatagacgacgattgccggtcaggcattgagataaagctggggcagcccagcattattaatcacatcagaatcttgctttgggatcgggacagtcggtcatatagttattttattgaggtaagcatggatgaactcgactgggtgcgagtgatcgaccattctcagtatttgtgtcggtcttggcagaagctgtacttcccagcgagggtgtgccgatatattaggattgtgggcacacacaacactgttaacaagattttccacatcgtggcgttcgaatgcatgtttactaataagacatttactttagagaaagggctgattgtgccaatggagaacgtggccacaattgccgattgtgcttcagtcattgagggagtgtcacggtctcgtaacgcactgttgaacggggacactaaaaactatgattgggatagcgggtatacttgtcaccagctgggctccggggctattgtcgttcaactggctcagccgtacatgatcgggtcgattaggttactgctctgggactgcgatgatcggtcatacagctattacgttgaggtatctacaaaccagcagcagtggacaatggtggctgaccgcacaaaagtctcctgtaaaagttggcagagtgttacgttcgaacgtcagccagcctcattcattaggattgttgggactcataataccgccaatgaagtgttccactgcgttcatttcgagtgccccgagcaacagtcaagccagaaggaagagaattccgaggaatcaggaacaggagatacttcactcgctggccagcaactggactcacacgcactgcgggctccaagtggctcatccctgccttcctcaccagggtctaattcacgcagtcccaatagacaacatcaatag

SEQ ID NO: 180865 - DNA, 1839 bp, synthetic construct
  misc_feature 1..1839: note = Description of Artificial Sequence: Synthetic coding sequence
  source 1..1839: mol_type = other DNA
atgagcaacagccaccccctgcggcccttcaccgccgtgggcgagattgaccacgtgcacatccttagtgagcatatcggggctctcctcatcggtgaggagtacggggacgtcacctttgtggtggagaagaagagatttccagctcacagggttatactggcagcccgctgtcagtattttagggcactgttatacggcggaatgcgggagagtcagccagaggccgagattcccttgcaggacacgaccgcggaggcctttacgatgcttttgaaatacatctacaccggccgggctacactgacagacgagaaagaggaagtgcttttggatttcctcagcctagctcataagtatgggttccccgaactcgaggactcaaccagtgagtacctttgcaccattttgaatatccagaacgtgtgcatgactttcgacgttgctagcttgtattcactgcccaagttgacatgtatgtgttgtatgttcatggatagaaacgctcaggaggtcctttcatcggaggggttcctcagtctcagtaagactgcactgctgaacatagtgctgcgggattcattcgccgctcctgagaaggacatctttcttgctcttctgaactggtgtaaacacaatagtaaggaaaatcatgcggagattatgcaagccgtgcggctacccctgatgtctttgactgagcttcttaacgtcgtccggccaagtggactcctgtcacccgatgctatcctcgacgctattaaggtgagaagcgagtccagagacatggacttgaattataggggaatgttgattcccgaggaaaatatcgccacaatgaagtacggagcccaggtggttaagggcgaactgaagtcagccctgctggatggtgacactcaaaactacgacctggaccacggcttctctcgtcatcccattgatgatgattgccgctccggaatcgaaattaaactcggccagccatctattattaatcatattcgcattctcctgtgggatagggactctaggagttacagctattttatagaagtttcaatggacgagctggattgggtgcgggtgatcgaccacagtcaatacctttgccgatcttggcaaaaactgtacttccccgccagggtctgtaggtacattcggatcgttggaacccacaacaccgtaaacaaaatctttcacatcgtagcttttgagtgtatgtttactaacaaaacattcacactcgagaaaggtctgattgtccccatggaaaacgtggcaacgattgcagattgtgcaagtgtcattgaaggcgtcagccggtcccgtaacgcgctcctaaacggcgacacaaaaaattacgattgggatagtggctatacctgccatcaactggggtctggcgcaatcgtcgtccagctggctcagccttatatgatcggatcgattagacttctgctctgggactgcgatgatcggagctattcctactacgtcgaggtctccaccaaccagcaacagtggacaatggtggccgatcgaacaaaggtgtcttgcaagagctggcaaagcgtgacgtttgaaaggcaacccgccagtttcattcggattgttgggactcacaacactgccaacgaggtctttcattgcgtccacttcgagtgtcccgagcagcagagtagtcagaaggaggagaactctgaggaatctggcacaggtgatactagcctggccggccagcagctggatagccatgcactgcgcgctcctagcggatcatcactgcctagctccccaggcagtaattcacgctcacccaatcgccagcaccagtag

SEQ ID NO: 180866 - DNA, 1635 bp, synthetic construct
  misc_feature 1..1635: note = Description of Artificial Sequence: Synthetic coding sequence
  source 1..1635: mol_type = other DNA
atgcgggagagccagcccgaggccgagatccccctgcaggacaccacagccgaagcgtttaccatgttgctgaaatatatttacacaggtcgggcgaccttgaccgacgaaaaggaggaagtgctgttggacttcctgtctcttgcccacaaatacggctttcctgaactagaagacagcacctcagaatacctatgtaccattctgaacattcagaacgtctgcatgacgtttgacgtggcaagcctgtactccctgccaaaactgacctgtatgtgctgtatgttcatggatagaaacgcgcaagaggtcttatcctctgagggattcctttccctgagtaaaactgcactgctcaacattgtgctgagggatagctttgctgccccggagaaagacatcttcctggccctgcttaactggtgtaagcataacagtaaagagaaccatgccgagattatgcaggcggtcagactcccccttatgtctctgactgagctgctcaatgtcgtgagaccttccgggctgctctcgccagatgctattctcgacgctatcaaagtcagatcagaaagccgcgatatggacctgaactacaggggaatgttaatacccgaggaaaacatcgctactatgaaatacggagcccaagtggtgaaaggtgagctgaaatccgctctgttggacggcgacactcaaaattatgacttggaccacggcttttcaaggcatccgatcgacgacgactgcagatcagggattgagatcaagctaggtcagcccagtataattaatcacatccggattctactgtgggatcgtgatagcagatcctacagctacttcatcgaagtgtccatggacgagcttgattgggttcgggtgatcgatcatagtcagtatctgtgccgctcttggcagaaactctacttccccgcacgggtgtgccggtatatccgtatcgtcggcacccacaacaccgtgaacaagatttttcacatcgtcgcctttgagtgcatgttcacaaacaaaacctttaccctggaaaaggggctgattgtccctatggagaatgttgcaactatcgcagattgcgcctctgtgatcgaaggcgtgagcagaagccgtaatgcccttctgaacggcgacaccaaaaactatgactgggattccggatacacctgccaccaacttggttctggcgcaatcgttgttcaactggcgcagccatacatgattggttctataagactgctcttgtgggactgcgatgacagaagctactcttactacgtggaggtgtcaactaaccagcagcagtggaccatggtggctgaccgtacgaaggtttcctgtaagtcctggcagtcagtgacctttgagcgacaaccagcctcatttattagaatcgtcgggacccataatactgccaacgaagtgtttcactgcgtgcatttcgaatgcccagagcaacagtcatctcagaaggaagaaaactccgaagagtccggaactggagatacttctctggcgggccagcagctcgacagccacgcactgcgggcccccagcgggtctagccttccttctagtcccggaagcaattctcgctctccaaaccggcagcaccagtag

SEQ ID NO: 180867 - DNA, 1839 bp, synthetic construct
  misc_feature 1..1839: note = Description of Artificial Sequence: Synthetic coding sequence
  source 1..1839: mol_type = other DNA
atgagcaacagccaccccctgcggcccttcaccgccgtgggcgagatcgaccatgtgcatatcctgtccgagcatattggcgctttattaatcggcgaagaatacggggacgtcacctttgtcgtcgagaaaaagcgttttccagcacaccgcgtcatactggctgcccgatgccagtacttccgcgctctcctgtatggtgggatgcgtgaatctcagcccgaggccgaaattcctcttcaggatacgactgcagaagcgtttacgatgttgttgaagtacatctatacaggtagagctaccctgacagacgagaaggaggaggtgcttctggatttcctgagccttgcccataagtatggctttcccgagttggaagactccacatcggaatacctctgcacgatcctcaacatacagaatgtgtgcatgacattcgacgttgcctccctgtactcattgccaaaacttacgtgcatgtgttgcatgttcatggacagaaacgcgcaagaagtgctcagttcagagggattcctatctctaagtaagacagctctgttgaacattgtcctgcgcgacagctttgccgcccctgagaaggatatcttcctcgctctgttgaattggtgtaagcataatagcaaagagaaccacgccgaaattatgcaggctgtgcggctcccactcatgtccctgaccgaattactgaatgtggttcgcccatccggcctgctgtcccctgatgctatactagatgccatcaaggtgcgctctgaaagcagagatatggacctcaactataggggaatgctcatcccggaggaaaacatcgcaaccatgaaatatggcgcgcaggtcgttaaaggtgaactgaaatccgccctgctggacggcgacacccagaactacgacctagatcatggcttctcccggcaccccatcgacgatgactgcaggagcggaattgagatcaaactcggccagccctcgatcataaaccatatacgaattttgttatgggatcgggactcaagaagctattcctatttcatagaggtgagcatggatgagctggactgggtgagggtgattgatcactctcagtacctctgccgtagctggcagaagctatactttcccgctagggtgtgcaggtatatccgtatcgttgggacgcacaatacagttaataaaatcttccatatcgtggcctttgagtgcatgtttacaaataagacattcaccctggagaaggggctgatagttccgatggagaatgtcgccactatagctgactgcgctagtgttatcgaaggagtgtctcggtctaggaatgccttgctgaacggggataccaagaattatgattgggatagcgggtatacatgtcaccagttgggatctggagcgatcgtcgtacagttggcgcaaccgtatatgatcggctcaatccggttgctcctgtgggattgcgacgaccgcagctactcctactacgttgaggtgtccactaaccagcagcagtggactatggtggcggatcgcaccaaggtgagttgtaaaagttggcagtctgtgacttttgaacgccagccagcatcattcatcaggattgtcgggacacacaacaccgccaatgaggttttccattgtgtgcacttcgaatgcccagagcaacagtcttcacaaaaagaagaaaatagcgaagagtccggaactggtgacacatcccttgctggccagcaattggacagccacgctctacgagcaccctccgggagttcattaccttcctctccagggagcaattcccgttcccctaaccgacagcatcagtag

SEQ ID NO: 180868 - DNA, 279 bp, synthetic construct
  misc_feature 1..279: note = Description of Artificial Sequence: Synthetic coding sequence
  source 1..279: mol_type = other DNA
atgagcaacagccaccccctgcggcccttcaccgccgtgggcgagattgaccacgtccacattctcagtgaacatattggtgcgctcctgattggtgaggagtacggagatgtcacatttgtggttgagaaaaagagatttccagctcatcgggtcattctggctgccagatgccagtattttagagcactgctctatggaggaatgagagagtcccagcccgaagcagaaatccctcttcaggacacgactgccgaggctttcaccatgttattgtag

SEQ ID NO: 180869 - DNA, 1749 bp, synthetic construct
  misc_feature 1..1749: note = Description of Artificial Sequence: Synthetic coding sequence
  source 1..1749: mol_type = other DNA
atgtgccgggccctgctgtacggcggcatgcgggagagccagcccgaggccgagatccccctgcaggacaccactgccgaagccttcactatgctccttaaatacatttacaccgggcgcgccacgctgaccgatgagaaggaggaagttctcctggattttctcagtctcgcgcacaagtacggattccctgagctggaggatagcacttccgaatacctgtgcacgattttaaacatacagaatgtatgtatgacattcgatgtggcctcgctgtattccttgccgaaacttacctgcatgtgttgtatgttcatggacagaaatgcacaggaggttctctcaagcgaagggttcttgagtctgagcaaaacagccctcctaaacattgtcctgcgcgacagtttcgccgcaccagagaaagacatattcctggcgttgctgaactggtgcaagcacaattccaaggagaaccacgcagaaatcatgcaggcagtgcgtctgccgctgatgtctttgacagagctgctgaacgtggtgcggccctccgggttgctgtcaccagacgcgatacttgatgctattaaagtgcggagtgagtccagagacatggatttgaactacaggggtatgctgatccctgaggagaacatcgctaccatgaaatatggggcccaggtcgtgaaaggggaacttaaaagcgccttgctcgacggtgacacacagaattacgacctggaccacggcttctcaagacacccaatcgacgatgattgtcgaagtggtattgaaatcaaattaggtcagcccagcatcatcaaccacattagaatcctcctgtgggatagagattcccggagctatagttatttcatagaagtaagtatggatgagcttgactgggttcgggttattgatcacagtcagtacttatgcaggtcttggcaaaagctgtattttcctgcacgtgtgtgcagcggcgatggcgtttctctgtggtgcccactgtggagtcggactcctgagttgaagcagtccagcttgctgggattaccaaaatgcaggtatataaggatcgtcggaacacataatactgtgaacaagattttccatatcgtggccttcgagtgcatgttcaccaacaagacgttcactctagaaaaggggctaattgttcctatggagaatgtggccacgatagccgactgcgcatcagtcatcgagggcgtgtctcgctcaagaaacgccttattgaacggggacacgaaaaactacgactgggactcagggtacacctgccatcaactcggctcgggcgcaattgtagtccaactggcccaaccctatatgattggaagtattaggctcctgctgtgggactgcgacgataggtcatattcttactatgttgaagtctcaaccaatcagcaacagtggacaatggtcgcagatcgtactaaagtgtcatgtaagtcatggcaaagtgtcacgtttgaacgccaacccgccagtttcataagaattgttggcactcataatactgcgaacgaagtattccactgcgtccactttgaatgccctgagcagcagtcatcccagaaagaggagaatagcgaggaatctggtacaggtgataccagtctcgctggacagcagcttgatagtcacgcattgcgagctcctagtggatcatctctgccaagttcccctggttctaatagcaggagccctaacagacaacatcagtag

SEQ ID NO: 180870 - DNA, 2211 bp, synthetic construct
  misc_feature 1..2211: note = Description of Artificial Sequence: Synthetic coding sequence
  source 1..2211: mol_type = other DNA
atgagcctgagcgagaacagcgtgttcgcctacgagagcagcgtgcacagtaccaacgtactattaagcctgaatgatcagcggaagaaagacgtgttgtgcgacgtcactatcttcgttgagggccagagattccgtgcacataggagcgtgctagccgcttgctcaagttacttccactcgaggattgtgggacaagccgacggtgagctcaacataactctgcccgaggaggtaaccgtgaaaggatttgagcctctgatccagttcgcctacacggcaaaactgatcctgagtaaagaaaacgtggacgaggtgtgtaagtgcgtcgaatttctgtctgtccataacattgaagagtcatgcttccagttccttaaatttaagtttcttgacagcacagctgatcaacaggagtgtccaaggaaaaaatgtttttcctcccactgtcagaaaacagacttgaaactatccctcttggatcagcgcgaccttgagaccgacgaggttgaagaattcttagaaaataaaaatgtccagactccacagtgtaaattgcggcggtaccagggtaatgctaaggctagcccccccttacaggactccgcgtctcagacttacgaatcaatgtgccttgagaaagatgccgctctcgccctccccagcctgtgtcccaaatatagaaaattccagaaagcgttcggaaccgatagggtccgcacaggcgagtcctccgtcaaggatattcacgccagtgtccagcctaatgagagatctgaaaacgaatgtctgggcggcgttccagagtgccgcgacctgcaggtaatgctgaaatgcgatgagtcaaagctggccatggagccagaggagactaagaaggacccagcttctcaatgtcctaccgagaaaagcgaggttactcctttcccccacaacagcagtatcgacccacacggactctacagccttagcctactacacacctacgaccaatacggcgacttgaactttgcagggatgcaaaatacaaccgtgctgactgagaaaccactgagcggcactgacgtccaggaaaaaactttcggtgaaagccaagatttgcctctcaagtctgatctgggtacaagagaagattcctcagtggcgagcagcgaccgctcatccgtcgaacgggaagttgctgagcacttggctaaaggtttctggtcagacatttgctctactgataccccatgtcagatgcaactaagccctgctgtagccaaggatgggtcagagcagatcagccagaagaggagcgagtgtccatggctagggattagaattagcgaatcacctgaacccggccaaagaacatttacaaccttaagctctgtgaactgcccgttcatctccacactaagtacagaggggtgttcgtcaaatctggaaattggcaatgacgactacgtcagcgaaccacagcaggagccatgtccatatgcctgcgtgatttctttgggagatgacagcgaaaccgataccgaaggggattcggaatcctgcagtgcacgcgaacaggagtgtgaggtaaaacttccgtttaatgcgcagcgcatcataagcctgtcccgcaacgactttcagtcactgctgaagatgcacaagctgacgcctgaacagcttgattgcatacacgacattagacggcggagtaaaaacagaatcgctgcacagcggtgtcggaaacggaagttagactgtattcaaaatctcgagtcggaaatcgaaaagttgcagagcgagaaagagtctctgctcaaagagcgagaccacattctgtccactctgggcgagaccaaacaaaacttgaccggactatgccaaaaggtgtgcaaagaggcagcgctctcccaggaacaaatccagatcctggctaagtatagtgctgccgactgccccttaagttttctgatctctgagaaggacaagagtacgccagacggggaactggctctcccgtcaatttttagtctgtcagacagaccaccggccgtgctgcctccatgtgctaggggaaattctgagcccggctacgctcgggggcaagagagtcagcagatgagcaccgcaacttcagaacaggctggacctgctgagcaatgtcggcaatccgggggaatctccgatttttgtcagcaaatgactgacaaatgtaccacagacgaatag

SEQ ID NO: 180871 - DNA, 2211 bp, synthetic construct
  misc_feature 1..2211: note = Description of Artificial Sequence: Synthetic coding sequence
  source 1..2211: mol_type = other DNA
atgagcctgagcgagaacagcgtgttcgcctacgagagcagcgtgcattctaccaacgtacttctttccttgaacgaccagagaaagaaggatgtgttgtgcgacgtgactattttcgtggaaggccagagattccgcgcccacagaagtgtgctggccgcttgctctagctattttcattctagaatagtgggtcaggcagatggagagctcaacatcacgctgccggaagaagtcactgtgaaggggtttgagccattgattcagttcgcctataccgctaagttgatactgagcaaggagaacgttgatgaagtctgtaagtgtgtggaattcttatcagttcacaatatagaggaaagctgttttcagtttctgaagttcaagttcctagacagcacagcagaccaacaagaatgtcccaggaaaaagtgcttcagctctcactgtcagaagaccgacctcaaactttcactgttagatcaacgcgatctcgagactgacgaagtggaggagttcttggagaacaagaatgttcagacaccgcaatgtaagcttcggcggtaccaagggaacgctaaggcttcccctcctctgcaggatagcgccagccaaacatacgagtcaatgtgtctcgagaaagacgccgccctggcccttccctcactatgcccaaagtatcggaaatttcaaaaggcgtttggcaccgatcgagtccgtactggagagtcatccgtgaaagatatccacgccagcgtgcaacccaatgaacgcagtgagaacgagtgtctgggcggggtacctgagtgcagggatctgcaggtgatgctcaagtgcgacgagagcaagctggccatggagccggaggaaaccaagaaagatcccgcttctcagtgccccacagagaagagcgaggtcactcccttcccgcataactccagtatcgatccgcacgggttatatagcttgagcctgcttcatacatacgaccaatatggcgatttgaattttgccgggatgcagaacacaacagtacttacggagaagcccctgtctggcacagatgtccaagaaaaaacctttggagaaagccaggacctgcccctgaagtccgaccttgggaccagggaggactcctctgttgcatccagcgatcgttcatccgtagagagagaggtggccgaacatctcgctaagggtttctggtccgatatctgttcaacggataccccgtgccaaatgcagctatctcctgccgtggctaaggacgggtccgaacagatttcccagaaacgctctgagtgcccatggctaggaattcggatttctgagtcgcccgagcccggtcagcggacgttcactactctgtcatccgtgaattgtcctttcataagcacactgagcacagagggctgctcaagtaatctcgagattggtaacgacgattatgtatccgagccccagcaggagccctgcccctacgcgtgtgtgatcagtctaggcgatgactctgagaccgacaccgaaggcgattctgagtcgtgctctgcccgggagcaggagtgtgaggttaaactgccttttaacgctcagcgaatcattagccttagccgtaacgattttcaaagtctgctgaagatgcataaattgaccccagaacagctggactgtatacacgatatccgaaggcgatcaaagaataggattgcagcgcagcggtgccgcaagaggaaactggactgcattcagaaccttgagtcagagatagagaagctgcagagcgaaaaggaatcactactcaaagagcgggatcatatcctatctaccttgggcgaaaccaagcaaaacctgacggggctgtgtcagaaggtctgtaaggaagccgctctgagccaagagcagatccagatcttagcaaaatactcggcagccgactgccccctatccttcctcatctctgagaaggataagtccactcccgacggcgaacttgcattaccctccatcttctcgttgtctgatagacccccagccgttctgccgccctgtgccagggggaattcagaacccggttacgcacgggggcaggagagtcaacagatgtcaacagctacaagtgagcaggcaggaccagctgaacagtgtcgccaaagtggggggatcagtgacttttgccagcagatgaccgataaatgcacaaccgatgaatag

SEQ ID NO: 180872 - DNA, 513 bp, synthetic construct
  misc_feature 1..513: note = Description of Artificial Sequence: Synthetic coding sequence
  source 1..513: mol_type = other DNA
atgagcctgagcgagaacagcgtgttcgcctacgagagcagcgtgcacagtaccaatgtgctccttagtttgaacgatcagcgcaagaaggacgtgctctgcgacgtcacaattttcgttgaaggccagaggttcagggcccaccgctcagtgttggccgcttgttcttcttacttccacagtcgaattgttggccaagccgatggtgaactgaatatcactttaccagaggaggttaccgtcaagggctttgaaccactaatccagtttgcttacactgctaaactcattcttagtaaggagaacgttgacgaagtttgtaaatgtgtcgaatttctgagtgtccacaacattgaggaatcatgcttccagttcctgaagttcaagttcctcgactcaaccgcagatcaacaggaatgcccccggaaaaaatgcttctctagtcattgtcaaaaaactgatctgaagctgtctctgctggaccagagagatctggagacagatgaggtgtag

SEQ ID NO: 180873 - DNA, 663 bp, synthetic construct
  misc_feature 1..663: note = Description of Artificial Sequence: Synthetic coding sequence
  source 1..663: mol_type = other DNA
atgagcctgagcgagaacagcgtgttcgcctacgagagcagcgtgcactctactaacgtgctgctttctcttaacgaccaacggaagaaggatgtcttatgcgatgtcacaatttttgttgagggacagcgcttccgggcccacagaagcgtgttagccgcttgctccagttacttccatagcagaattgttgggcaggcggacggggagctgaatattactcttccagaagaggtaaccgtgaagggatttgagcccctgatacagttcgcttacacggccaaactgatcttgtctaaggagaacgtggatgaagtgtgcaaatgtgtggagttcctgtctgttcataacatcgaggaaagttgtttccaattcttgaagtttaaattcctagactcaacagcggatcaacaggaatgtccaagaaaaaagtgttttagttcccactgtcagaaaacagacttgaaattgtcactcctggatcaaagagacttggaaactgacgaagtggaggagtttttagaaaacaaaaacgtgcagacaccccagtgcaagctccgtcgctatcaggggaatgccaaggcttccccccccctgcaggactctgcgtcacagacctacgaatctatgtgtctggagaaggacgctgctctggcactctag

SEQ ID NO: 180874 - DNA, 678 bp, synthetic construct
  misc_feature 1..678: note = Description of Artificial Sequence: Synthetic coding sequence
  source 1..678: mol_type = other DNA
atgagcctgagcgagaacagcgtgttcgcctacgagagcagcgtgcatagtaccaatgtgctgctcagcctgaatgatcagaggaagaaagatgtcctttgtgacgttacaatcttcgtggaagggcagagatttcgcgcacatcgatccgtgttggctgcctgcagctcttattttcactccagaatagtcggccaggctgacggggaactgaacattacactgcctgaggaggtgaccgttaagggatttgaaccattgatccaatttgcatacaccgcaaaactgatcctgagtaaagaaaacgtggatgaggtttgtaagtgtgtggagtttctgagtgttcataatatcgaggagtcatgctttcagtttctgaaattcaagttccttgacagcacagcagatcagcaggagtgcccgcgcaagaaatgcttctcttcacactgtcagaagacagatctgaaacttagcctgctggaccaaagagacctggagacggatgaggtggaggagtttctcgagaacaagaacgtgcagacaccccaatgcaagcttcgacgatatcaaggaaacgcaaaggccagtcctccgttacaggatagcgcttcccagacttacgaatccatgtgtctggagaaagacgccgctctggcgctgccgagcctctgcccctag

SEQ ID NO: 180875 - DNA, 78 bp, synthetic construct
  misc_feature 1..78: note = Description of Artificial Sequence: Synthetic coding sequence
  source 1..78: mol_type = other DNA
atgagcctgagcgagaacagcgtgttcgcctacgagagcagcgtgcatagcacaaacgtgctcctgagtctcaattag

SEQ ID NO: 180876 - DNA, 78 bp, synthetic construct
  misc_feature 1..78: note = Description of Artificial Sequence: Synthetic coding sequence
  source 1..78: mol_type = other DNA
atgagcctgagcgagaacagcgtgttcgcctacgagagcagcgtgcactcaaccaatgttctactgtccctgaactag

SEQ ID NO: 180877 - DNA, 78 bp, synthetic construct
  misc_feature 1..78: note = Description of Artificial Sequence: Synthetic coding sequence
  source 1..78: mol_type = other DNA
atgagcctgagcgagaacagcgtgttcgcctacgagagcagcgtgcacagtaccaatgtccttctgtccctgaattag

SEQ ID NO: 180878 - DNA, 78 bp, synthetic construct
  misc_feature 1..78: note = Description of Artificial Sequence: Synthetic coding sequence
  source 1..78: mol_type = other DNA
atgagcctgagcgagaacagcgtgttcgcctacgagagcagcgtgcatagcactaacgtactgttatccctgaattag

SEQ ID NO: 180879 - DNA, 78 bp, synthetic construct
  misc_feature 1..78: note = Description of Artificial Sequence: Synthetic coding sequence
  source 1..78: mol_type = other DNA
atgagcctgagcgagaacagcgtgttcgcctacgagagcagcgtgcactcaacgaacgtactcctctctttgaattag

SEQ ID NO: 180880 - DNA, 2526 bp, synthetic construct
  misc_feature 1..2526: note = Description of Artificial Sequence: Synthetic coding sequence
  source 1..2526: mol_type = other DNA
atgagcgtggacgagaagcccgacagccccatgtacgtgtacgagtccactgtgcactgcacaaatatactactgggtctgaacgatcagagaaagaaagacattctgtgcgatgtgactttgattgtagaacgtaaggagtttcgagctcatagggctgttctggccgcttgctcggagtacttttggcaggccctggttggccagaccaaaaacgacctggtggtcagcttgcccgaggaggtgaccgctcgcggcttcgggcccctgttgcagttcgcttataccgcaaagcttctgctaagtcgggaaaatatcagggaggtcatcagatgtgccgagtttctccgaatgcataacttagaggacagctgtttttcattcctgcagactcagctcttgaatagcgaggatgggctgttcgtgtgtcggaaagatgctgcctgtcagagaccccacgaagactgcgaaaacagtgccggagaggaagaagatgaggaggaggagacaatggattcggaaacagccaaaatggcctgcccacgggaccaaatgcttccagagccgattagctttgaggccgcggccatcccagtggccgagaaggaagaagcgttattaccagaaccagacgtgcccaccgacacaaaagagagttctgaaaaagacgccttaacccagtacccaaggtataaaaagtatcagttggcttgcacaaaaaatgtgtacaacgccagttcccatagcacgtccggttttgcttctacgttcagggaagataacagctcaaactccttgaagccaggcctagcacgcgggcagattaaatccgaacccccctccgaggagaatgaggaggagagcatcacactgtgtctgtccggtgacgaaccagatgctaaggacagggcgggtgacgtcgagatggatagaaaacagccctctcccgcccccacccccactgcccctgcaggcgccgcctgtctggaaagatccagatctgtcgccagtccctcttgtctccggagcctgttttcaatcactaagagcgttgagctttctggattgcctagcacatcccagcagcacttcgctcggagcccggcttgcccctttgacaaggggataacacaaggggatcttaagacagattatacacctttcacgggtaattacggccagccacatgtaggacagaaagaggtctctaactttaccatgggtagccctctgagaggcccaggactcgaggcactctgcaagcaggaaggagaactggatcggaggagtgtgattttcagttcatcagcctgtgatcaggtatctacctccgtgcatagttacagtggcgtctcctctctcgacaaagaccttagcgagcccgtccccaaaggactctgggtcggggcgggccagtccctaccttcaagccaggcatacagccatggcggactcatggcggaccacttgcctggtagaatgagacctaatacatcttgtcccgttccaatcaaggtttgtccaagatctcctcccctagaaactagaacacggacaagctcttcctgtagctcttattcgtacgctgaggatggcagcggcggttcaccatgtagtctgccactttgtgagttctcttcctcaccctgcagccagggagctcgattcctggcaaccgaacaccaggagcctggcctcatgggggatggaatgtacaatcaggtgaggcctcagatcaagtgtgagcagtcatatggcacaaatagttcagatgagagtggttcattcagcgaggccgattcagaaagctgtcctgtgcaggaccgcggccaggaagtgaaactcccgttccccgtggaccagattacagacctccctagaaacgatttccagatgatgattaaaatgcacaaactgacatccgagcaattggagttcattcatgatgttaggaggagatctaaaaataggattgctgctcaaagatgtcggaaacgaaagctggactgcatccaaaatctcgaatgcgagatcaggaagctcgtctgcgaaaaagagaaactactcagtgagagaaatcagctgaaagcctgcatgggggaactgctggacaactttagctgtctcagccaagaggtctgtagggatatacagtcccctgaacagattcaagcactgcaccgctactgtccggttttacgacccatggatctgcccaccgcttcgagtatcaaccccgctcccttaggcgccgagcagaatatcgccgcctcccaatgtgccgtgggagaaaatgtgccctgctgtctcgagccaggagctgcccctcctggccccccctgggcacccagtaacacgtcagaaaactgcacctctggaaggcgcttagagggtaccgaccccggaaccttctccgagcggggcccgccccttgagcctaggtctcagacagtaaccgtagatttctgtcaggaaatgacagataaatgtacaaccgatgagcagccgagaaaagactacacctag

SEQ ID NO: 180881 - DNA, 2526 bp, synthetic construct
  misc_feature 1..2526: note = Description of Artificial Sequence: Synthetic coding sequence
  source 1..2526: mol_type = other DNA
atgagcgtggacgagaagcccgacagccccatgtacgtgtacgagtcgacagtccattgcaccaatattctactgggtctgaatgatcagcggaagaaagatatcttatgtgatgtcactcttatcgtcgagcggaaggagttccgggctcatagggctgtactcgcagcatgttccgaatacttttggcaagcactcgtcggccaaaccaagaacgaccttgtcgtgtccctccctgaggaggtgactgccagaggatttgggcctttgctccagtttgcgtatacagcgaaactgctgttgtcaagggaaaacataagggaagtgatccgctgcgccgagttcctgcggatgcataatctcgaggacagctgtttttcttttctacagacccaactgctcaactccgaagacggactgtttgtgtgcaggaaagacgccgcctgccagagaccacatgaggattgtgaaaacagcgctggtgaggaagaggacgaggaggaggagactatggattctgagactgcaaagatggcttgcccacgggatcagatgctgcctgagcctatttcattcgaggccgctgccatccccgtcgcggaaaaagaagaggcgttgctgccagaaccagacgtgcctaccgacactaaagagagcagcgaaaaggatgccctgacacaatacccaagatataagaaatatcagctcgcttgtacgaagaacgtctataatgcctcaagccacagtacttctggcttcgcctctacattccgagaggataattcgtctaactctcttaaaccagggctggctcgggggcaaatcaagtcagaaccacccagtgaggagaacgaggaggaatcaataacactttgcctgtccggggatgaacccgacgccaaggacagggccggagatgtggaaatggaccgaaagcagccatcccccgcacctacgcctaccgccccagccggggctgcctgcctggaacggagcagatccgttgccagtccttcttgtttacgaagcctgttttccattaccaaatcggtcgagttatccgggctgccatctacaagtcagcagcactttgcgcggtcccccgcttgtccttttgataaaggtataacccagggcgatcttaagactgattatacccctttcaccgggaattatgggcagccccatgtaggacagaaagaggtgtccaatttcaccatgggcagcccattacgtgggccagggctcgaggctctttgcaaacaggagggcgagttggatcggaggagcgttattttttcgtcttctgcgtgtgaccaagtcagtacctccgtgcacagctattctggggtgagttccctcgacaaagacctgagtgaaccggtcccaaaaggtctatgggtgggtgcaggacagagtttacccagtagccaggcttacagccacggcggactgatggctgaccatctccccggtagaatgcggcccaatacttcatgcccagtcccaatcaaggtatgtcctcgatcacctccgcttgaaactcggacccgcactagttcctcctgctccagctattcatatgccgaagatggaagcggcggcagcccatgctccttgcctctatgcgagttcagcagctctccctgcagccagggcgccagatttctcgccaccgagcaccaggagccaggcctgatgggggatggaatgtataatcaggtacggccacaaatcaaatgcgagcaatcatacggcaccaactcatcggacgagtcaggttctttctctgaggccgattccgaaagttgtccagtgcaggaccgggggcaagaggtgaaactaccctttccagtcgatcaaatcaccgacctgccaagaaacgatttccagatgatgatcaagatgcacaagctcacctccgaacagctggagtttattcatgatgtgaggaggcgaagcaaaaacaggattgcagctcagcgctgtcggaagcggaagctagactgtatccagaatctggagtgcgaaattcgaaaactagtttgcgagaaggaaaaactgctgtctgagaggaaccagcttaaggcatgtatgggcgagctgctcgataatttctcatgcctgtcccaggaagtctgcagggacattcagtctccagagcagattcaggctttacacaggtactgtcctgtactgcgccctatggatctgccaaccgcttcctctatcaatcccgcaccgctcggagccgaacagaacattgctgccagtcagtgcgctgtaggtgaaaacgtgccttgttgcctggagcccggcgctgctccgcccggccccccttgggcgccaagtaacaccagtgagaactgcaccagcgggcggaggctggaagggacagacccagggactttttcggagcgcgggcctcctctcgagcccaggagccagacggtcactgtagacttttgccaggagatgacagacaagtgtacaacagatgagcaaccccggaaggactatacctag

SEQ ID NO: 180882 - DNA, 246 bp, synthetic construct
  misc_feature 1..246: note = Description of Artificial Sequence: Synthetic coding sequence
  source 1..246: mol_type = other DNA
atgagcgtggacgagaagcccgacagccccatgtacgtgtacgagtccactgtgcactgtacgaacattctactcgggctgaatgaccaacgaaaaaaggacatcctctgtgatgttaccctgatcgtcgagagaaaggaatttcgggctcaccgggcagttcttgcagcgtgtagtgagtatttctggcaagccctggtgggtcagacgaagaatgacctcgttgttagccttcctgaagagtag

SEQ ID NO: 180883 - DNA, 246 bp, synthetic construct
  misc_feature 1..246: note = Description of Artificial Sequence: Synthetic coding sequence
  source 1..246: mol_type = other DNA
atgagcgtggacgagaagcccgacagccccatgtacgtgtacgagagtacagttcactgtactaatatccttctggggttaaacgatcagagaaaaaaggatattctttgcgacgttacgttgattgtggagagaaaagagttccgggcgcaccgcgccgtcctggcggcgtgctccgaatatttttggcaggcactcgtgggccagactaagaatgacttggtggtgtcactaccggaagaatag

SEQ ID NO: 180884 - DNA, 2526 bp, synthetic construct
  misc_feature 1..2526: note = Description of Artificial Sequence: Synthetic coding sequence
  source 1..2526: mol_type = other DNA
atgagcgtggacgagaagcccgacagccccatgtacgtgtacgagtctaccgtgcactgcactaatatcctcctggggctcaatgaccagaggaagaaggacatcctgtgcgatgtcacacttatcgtcgagcgtaaggagttccgggcccatcgcgcagtcttggcggcctgttcagagtacttctggcaggctcttgtgggacaaacaaagaacgatttggttgtttccctaccggaggaggtgactgctaggggatttgggccactcttacagttcgcatacacagctaagctccttttgagcagagaaaacattcgagaagtgattcggtgtgctgagttcctgaggatgcataacctagaggattcttgcttttctttcctgcaaacacaactgctaaatagtgaggatgggttgttcgtgtgcaggaaagatgccgcttgtcagcgccctcacgaggattgcgagaactctgccggagaggaggaggatgaagaggaggaaactatggatagcgaaaccgccaagatggcttgtcctagggaccaaatgctgccagaaccaatctctttcgaagcagccgccataccagtggccgagaaagaggaagctctgctgcctgagcctgatgtgccgacagatacaaaggagagctctgaaaaggatgccctcacgcagtatccgcgatataaaaaataccagctggcctgcacaaaaaatgtgtacaacgcctcttcacattctacctcggggtttgcttccacgttccgtgaggacaactctagcaattccctgaaacccggcctcgcccgcggtcagattaaaagcgagcctccgtctgaggaaaatgaggaggagagcatcactctatgtctgtctggagatgaaccagatgccaaggaccgggcaggggacgtcgagatggataggaaacaaccatctccggcaccgacaccaactgcccccgccggggcagcctgtctggagcgctctcggagtgtggctagccctagctgcctgagaagcctgtttagcatcacaaagtcagtggaactgagcgggctgccgagtacctcccagcagcacttcgctcgcagcccagcgtgcccctttgacaaggggattacgcaaggtgatctcaaaaccgattatactcctttcacggggaattacggacagccgcacgtgggtcaaaaggaggtgtcaaattttacaatgggctcccctctgcggggaccgggcctggaagccctctgcaaacaggagggggagcttgacaggaggagtgtcatcttctcatcctctgcatgcgaccaagtctctacttcagtgcacagttactccggggtgagctcccttgataaagacctgtcggaacctgtgcctaagggcttgtgggtgggggcaggacagtcgctcccaagcagccaggcatacagccacggcggattgatggccgatcatctgcctggtcggatgagacccaacacgagctgtccagttcctattaaggtgtgtcctagaagtccaccactggaaacgagaaccaggaccagtagttcctgctcttcttatagctatgcggaagacggcagtggcgggtctccatgctcactgcctctctgtgaattctccagttctccatgtagccagggagcacggtttctcgcgaccgaacaccaagagcctggtctgatgggcgatggcatgtacaatcaggttagaccccagatcaagtgtgaacagagttatggtaccaatagcagcgatgaatccgggtctttctcagaagctgattcagagagctgtccagttcaagataggggccaggaggtgaaactgccatttcctgtcgatcagattacggatttgccccgaaatgattttcagatgatgatcaagatgcataagctgacaagcgagcaactagagttcattcatgacgtgaggcggaggtctaaaaatcggatcgccgcccagcggtgccgaaagcgaaaacttgactgcattcagaacttggaatgcgaaattagaaaattggtttgcgaaaaggagaagctactgagcgagcggaatcagttgaaagcctgcatgggagagctgcttgacaacttcagttgcttatcccaggaggtgtgtagagacatccagtcccccgaacagatccaggccctgcaccggtattgcccagtcctgcggccaatggatctgcctactgccagctctatcaacccagctccccttggagcggagcagaatatcgccgcttctcagtgcgcagtgggcgagaatgttccctgctgtctcgagccgggagcagcaccacccgggcctccatgggccccatctaacacgtccgaaaattgtacctccggaagaagactggagggtacagatcccggcacattcagcgaaaggggccccccgctggaacctagatcccagaccgttaccgtcgatttttgtcaggagatgacagacaagtgtaccacagacgaacagcctcggaaagactatacctag

SEQ ID NO: 180885 - DNA, 477 bp, synthetic construct
  misc_feature 1..477: note = Description of Artificial Sequence: Synthetic coding sequence
  source 1..477: mol_type = other DNA
atgagccacggcaagggcaccgacatgctgcccgagatcgccgccgccgtggggttcctgtcatccttgttaaggactagaggctgcgtttccgagcagcggttgaaagtctttagcggcgcactgcaggaagcacttactgagcactataaacatcattggttccccgagaagccgagcaaaggctccggctatcgctgtatacgaatcaaccataaaatggatcccatcatctctagagtggcctcccagataggtctcagccagccccagctccatcagcttttgccctcggaacttacactgtgggtagatccttacgaggtgagttacagaattggcgaggatggcagcatttgcgtactctacgaggaagcgcctttggcggccagctgcggattgctgacttgcaagaatcaagttttactggggcgtagtagccctagcaagaattatgtgatggccgtgagttcctag

SEQ ID NO: 180886 - DNA, 3258 bp, synthetic construct
  misc_feature 1..3258: note = Description of Artificial Sequence: Synthetic coding sequence
  source 1..3258: mol_type = other DNA
atggacacccccgagaacgtgctgcagatgctggaggcccacatgcaaagttataagggcaatgatcccctgggagagtgggagcgctacatccagtgggtcgaagaaaactttccagagaacaaggagtacctcatcaccttgttagaacaccttatgaaagaattcctggacaagaagaaataccacaacgatccacgatttatttcttattgtctgaaattcgctgagtataatagtgacctccatcagttcttcgaatttctatataatcacgggatcggtactctcagctcgcccctctacatcgcctgggccgggcaccttgaggcacaaggggaactgcagcacgccagtgcagtgctacagagaggaattcaaaatcaggccgagcctagagagtttttgcagcagcagtacaggttgtttcagacaaggctcaccgagacccacctgccagcgcaggccagaacatcagagcctctgcacaatgtgcaggttcttaatcagatgatcacttctaagagtaaccctggcaacaacatggcctgcataagtaaaaatcagggttccgaactgtctggggtcatcagcagtgcgtgtgataaggagagcaatatggaacgaagagtgataacaatctctaaatcagagtacagcgttcactcatccctcgcttccaaggtggacgtggagcaggttgtaatgtactgcaaggaaaaactcatcagaggcgaatcggagttttcttttgaggagctgcgtgctcaaaaatataatcagaggcgtaaacacgaacagtgggtcaatgaggataggcactacatgaaacggaaagaggctaatgctttcgaagaacaattgctgaagcaaaagatggacgaacttcacaagaaattacatcaggtggttgagaccagccacgaggatttgcctgcaagtcaggaacgatctgaagttaaccctgcccgcatgggaccgtccgtgggatcgcaacaggagcttagggccccctgtttgccagtcacctaccaacagactccggttaacatggagaaaaatccgcgtgaagccccacccgtcgtgcccccactcgcaaatgccatttcagctgccttagtatctcccgcgacgtcccagagcatagcaccacctgttcccctgaaagcgcagactgtgacagatagtatgttcgctgttgcctcaaaggacgccggatgcgttaacaagtctacacacgagttcaagcctcagtcaggtgccgagattaaggagggctgcgaaacacataaggtggctaacaccagcagcttccacacaacgcctaataccagtctgggaatggtccaggctacaccctctaaagttcaaccatctcctacagtccacacaaaggaggccctgggtttcattatgaatatgttccaggcccccaccctgcctgatatcagtgacgataaggatgaatggcagtcactcgatcaaaatgaggatgccttcgaggcccagttccagaagaacgtgcgcagtagcggtgcgtggggcgttaataaaatcatctccagtctgtcgtcagcgtttcacgtgtttgaagacggcaacaaggaaaattatggtctgccacagcccaagaacaagcccacaggcgctcgcactttcggtgagcggtctgtctctagactgccctccaagccaaaagaggaggtgccgcatgcggaagagttcctggatgactccaccgtgtggggcataaggtgtaacaagacccttgcccctagccccaaatcgccaggagactttacttcagccgctcagttggcttctacaccatttcataagctgccggttgaatccgtccatattctggaggacaaagagaatgtcgtggccaaacaatgcactcaagccactcttgactcatgtgaagaaaacatggttgtgcccagccgcgacggtaagttttcccccatccaggagaaaagccctaaacaggccctgagctcacacatgtatagtgccagcctgctgcgactgagtcagcctgccgccggtggagtcctgacctgtgaggcggagctcggggttgaagcgtgcagactaaccgataccgatgcagctatagctgaggatcctcccgatgccattgcgggcctgcaagcggaatggatgcaaatgagcagtttgggcactgtggatgcccccaattttatagtggggaacccatgggacgataagctgatttttaagctcctctctggattgagcaaacccgtgtccagctaccctaacacattcgagtggcaatgcaaactgcccgcaataaaaccgaagactgagtttcagttggggagtaagcttgtctacgtgcatcacctcttgggggagggcgcctttgctcaagtatacgaggcaacccagggggatctgaacgatgctaaaaacaagcaaaaattcgtactgaaagtccaaaagccagccaatccgtgggagttttatatcggaacccaattaatggaaagactaaaaccaagtatgcaacatatgttcatgaagttctatagtgcccatctattccaaaacggcagcgtgctggtcggcgagctttacagttacgggacattactcaatgcaatcaacctgtataaaaacacacctgaaaaggtcatgccccaggggcttgtgatctcattcgctatgcgaatgctgtatatgatcgaacaggtacacgattgtgaaatcattcatggggacatcaagccagataatttcatcctggggaatgggttcctggagcaggacgacgaagatgacctgtcagccggcctggcgctcatcgatctgggacagtctattgatatgaagctgttccctaaagggaccatatttacagccaagtgtgagacttccgggtttcagtgcgtagagatgttgagcaacaaaccatggaactatcagatcgactacttcggcgtggccgccactgtgtattgcatgctgttcggtacatatatgaaggtgaagaacgaggggggtgaatgcaagcccgagggattgtttcgacggctaccacacctggacatgtggaatgaatttttccatgtcatgctgaatatccccgactgccatcatctgccatctctggacctccttcgtcagaagctcaaaaaggtgtttcagcagcactacactaataagattagagccctcagaaaccgattgatcgtgctgctcctcgaatgcaagcgaagccgtaaatag

SEQ ID NO: 180887 - DNA, 3087 bp, synthetic construct
  misc_feature 1..3087: note = Description of Artificial Sequence: Synthetic coding sequence
  source 1..3087: mol_type = other DNA
atggacacccccgagaacgtgctgcagatgctggaggcccacatgcagtcatacaagggaaatgacccgctgggagaatgggagagatatattcaatgggtggaggagaacttccctgagaataaggagtatctgatcacactgctagaacacttgatgaaagagttccttgataagaaaaaataccacaacgatcctagattcatcagctactgtctcaagttcgcagagtataacagtgatctgcaccaattttttgagttcctatataatcacggcattggcacacttagtagccctttgtatattgcatgggccggccacctcgaagcccagggcgagctgcaacacgccagtgctgtgctccagcgtgggattcaaaatcaggctgagccaagagagtttcttcaacagcaatacagattgtttcagacaagactcacagagacccacctccctgctcaagcacgaacaagtgaacctctgcacaacgtgcaggtgttaaaccagatgatcacctccaaatcaaatccaggcaacaacatggcctgcatcagcaaaaatcaggggtcggagctgtccggagtgataagctcagcatgtgacaaggagagtaacatggaaaggagagtgatcaccataagcaaaagcgagtattctgtgcattcctcccttgcaagtaaggtggacgtggaacaggtcgttatgtactgtaaggaaaaactgatcaggggtgagtctgaattttcatttgaagagctaagagcgcagaagtacaaccagcgtcgtaagcatgagcagtgggtaaatgaggaccggcattatatgaaacgcaaggaggctaacgccttcgaagaacaactgctgaaacaaaagatggatgagctccacaagaagctgcaccaagtggtggaaacttcgcatgaagacttacccgcttctcaggaacgcagcgaagtcaatcccgctagaatgggaccatccgtgggcagccagcaggagctgcgggctccatgccttcctgtgacgtatcagcagacgcccgtgaatatggaaaaaaatcccagagaggccccccctgtcgtaccaccacttgccaatgcaattagcgctgcgctggtgagcccagccacaagccaaagtatagcaccaccagtcccactcaaggcccaaacagtaacagacagtatgttcgcggtggcctcgaaagatgcgggctgcgtgaataagagcacccacgaattcaaaccacagtccggcgccgagattaaggagggctgcgaaacccacaaggttgccaatacatctagcttccatactacacccaacaccagtttagggatggtccaggcaactccatccaaggtccaaccttctccaacagtgcatacaaaggaagcactagggttcattatgaacatgttccaagcgcccaccctgccagatatcagcgatgacaaggatgaatggcagtcgctggatcagaatgaggacgcctttgaagcccagttccaaaaaaacgtgaggtcctccggcgcttggggagttaacaaaatcatctctagtctctcctcagcatttcacgtctttgaggacgggaacaaggaaaactacgggctcccccagcccaaaaataaacctactggggcccggacattcggagagagaagtgtgagccgcctcccatcaaaaccgaaagaagaggtccctcacgccgaggaatttctggacgactccacagtatggggtattcggtgtaacaaaactctcgctccctcacccaaatctcccggggatttcacatcagcggcccagcttgcatccacgccgttccacaagcttcccgtcgagagcgtacacattctggaggataaagagaatgttgtggccaaacagtgcactcaggcaaccctggatagctgtgaagagaacatggttgtgcccagtagggacggcaaattttcaccaattcaagaaaagtcccccaaacaggctctctcgagccatatgtactccgcgagcctgcttcggctgtcacaacccgccgcaggcggagtgctgacgtgtgaggctgagttaggggttgaggcctgccgacttacagatacagatgctgctatagccgaggaccccccggacgcaatcgccggtttgcaggcggagtggatgcagatgtccagtctgggcaccgtggacgcccccaattttattgtgggcaatccgtgggatgacaagctgatcttcaagctcctgtccggcctttcaaagcccgtgagttcttaccctaacaccttcgaatggcagtgtaagctgccagccatcaaacccaaaactgagttccagctaggcagcaaactcgtgtacgttcatcatctcctgggggaaggagccttcgcccaagtgtacgaagcaacacagggagacctcaacgatgctaaaaacaagcagaagtttgtccttaaggttcaaaagccagccaatccttgggagttctatatcggcacgcagttaatggaaaggttaaagcctagcatgcagcacatgtttatgaagttttattccgcccatctgtttcagaacggcagtgttctggtcggagaactttatagttatggcaccctgctggacgatgaggatgacctttcagctggtcttgcgttgatcgatttggggcagagcatagacatgaaattatttcccaaggggaccatctttaccgccaagtgcgagacatctggcttccaatgtgtggaaatgttatccaacaagccctggaactaccaaatcgactattttggggtggcagcgaccgtgtactgtatgcttttcggtacctatatgaaggttaaaaacgagggcggagagtgtaagcccgaggggcttttccgccggttaccacatcttgacatgtggaatgagttttttcacgtaatgctcaatattccagactgccaccatttgccgagcctggacctcttgcggcagaagttaaaaaaggttttccagcagcactacaccaacaagatccgggctcttcgaaatcggttgatcgtgctgttgctggagtgcaagaggagccgaaaatag

SEQ ID NO: 180888 - DNA, 3198 bp, synthetic construct
  misc_feature 1..3198: note = Description of Artificial Sequence: Synthetic coding sequence
  source 1..3198: mol_type = other DNA
atggacacccccgagaacgtgctgcagtacatccagtgggtggaggagaactttcctgagaacaaagaatacctgattacactgttggagcacctgatgaaagagttcctggacaaaaagaaataccataatgacccacggtttatatcctactgtctgaaatttgcagagtacaactcagacctgcaccaatttttcgagttcctgtacaaccacggaattggcacactgtcatcaccactgtacatcgcatgggccggccatctggaagctcagggtgagctgcagcacgccagtgcagtgttacagcgcggaatccagaatcaggccgagcctcgtgagttcctgcaacagcagtatcgcctgtttcaaacacggcttaccgagactcacctgcccgctcaggcgagaacgtctgagcccctgcacaatgtccaggtgctcaatcagatgatcacttcgaagtctaaccccgggaataacatggcttgtatttcaaaaaaccagggtagtgaactctccggggttatctcttccgcctgtgataaagagagcaacatggagaggcgcgtcatcaccatctccaagagcgaatatagcgttcatagtagtttagctagtaaggtggacgttgaacaggtggtgatgtattgcaaggagaaactgatccgaggcgagtctgaattttcgttcgaggagctgcgggcccaaaaatacaaccagcgccgaaagcatgaacagtgggtgaacgaggataggcactacatgaagcggaaagaggccaatgcatttgaagaacagctactgaagcagaagatggatgagcttcataaaaagctgcatcaggtcgtggaaaccagtcatgaggaccttcccgcgtctcaagagcgctccgaggtcaatccagcgaggatgggcccgagcgtgggctcccagcaagagttaagagccccttgtctgcccgtaacgtatcagcagacccccgtcaatatggagaaaaaccctcgggaggcacctcctgtggttcccccactggccaatgctatctccgccgccttggtgtcacctgccacgagccagtccatagctcctcctgtgcctctgaaagcacaaactgtgactgattccatgttcgctgtggcctcaaaggatgcaggctgcgtgaataagtccactcacgagttcaagccacagagcggcgccgagatcaaggaaggatgtgaaactcacaaagttgctaacacctccagctttcacacaactcctaacacatcactcggcatggttcaggccacgccaagcaaagttcagccttcccccacagttcataccaaggaagctcttggctttatcatgaatatgtttcaggcccccacactcccagatattagtgacgacaaagatgagtggcaaagcttggatcagaatgaggatgcttttgaggcccagtttcagaagaacgttagaagctctggcgcatggggagtgaacaagataatcagctccctatcttcagcctttcatgtgttcgaggatgggaataaggaaaactatggtctaccacagcctaaaaataaacccactggggcccggacatttggtgaacggtcagtcagccgactaccaagtaagcctaaagaagaggtgccccacgccgaggagtttcttgacgattcaactgtatggggcattcgctgtaataaaactcttgccccctccccaaagagcccgggcgacttcacctccgccgcgcagttggcaagcactccattccataagcttccagttgagtcagtgcatatactagaggacaaggagaatgtggtcgcaaagcagtgcacccaggcgacccttgattcctgcgaggaaaacatggtggtgcccagtagggatggtaagttttctccaatccaggagaagagtcctaagcaggccctctcatcccacatgtatagcgctagcctgcttaggttgagccagcctgcagccggcggtgtcttgacttgcgaggcggaactgggcgtcgaggcttgtcggttgacagacacagatgccgctatagcagaggaccccccagatgcaatcgcagggctgcaagcagagtggatgcagatgagctccctcggtaccgtggacgcgcctaatttcattgtggggaacccttgggacgacaaacttatcttcaagctgctgtcagggctgtccaagcccgtgtcaagctatccgaacacctttgaatggcaatgcaagttgcccgctattaagcccaaaaccgagttccagctgggatccaaactggtgtacgttcaccacctgctgggcgaaggcgcatttgcccaggtttatgaggcaactcagggcgaccttaacgatgcaaagaacaagcagaaatttgtcctcaaggtgcaaaagcccgctaatccctgggagttttacatcggaactcagctcatggagagactgaagccatctatgcagcatatgttcatgaagttctatagtgcccatctgttccagaatgggagcgtcttggttggggagctgtatagctacggaaccctgctgaacgctatcaatctttacaagaatacacctgagaaggtaatgccccagggcctagtgataagctttgcaatgagaatgctgtacatgattgagcaggtccacgactgcgagatcattcatggggacattaagcctgacaattttattctggggaacggttttttggagcaggatgacgaagacgatctgagtgctgggttggctttgatcgacctcggacagtccatcgacatgaaactgttcccaaaggggaccatcttcaccgcaaaatgcgagactagcggcttccagtgtgtggagatgctcagcaataaaccatggaattatcaaatcgactacttcggcgttgccgcaactgtctattgcatgctgtttggtacttatatgaaggtgaagaatgaagggggcgaatgcaaaccggaaggcctttttcgtcgcctcccccatcttgacatgtggaacgagttttttcatgtgatgctgaacataccagattgccaccacctgcctagcctagatttgctccgacagaagctgaagaaggtatttcagcagcactatacgaacaaaattcgggcccttcgaaatcgacttatagttttgctccttgaatgcaaaagatcccggaagtag

SEQ ID NO: 180889 - DNA, 2475 bp, synthetic construct
  misc_feature 1..2475: note = Description of Artificial Sequence: Synthetic coding sequence
  source 1..2475: mol_type = other DNA
atggacacccccgagaacgtgctgcagatgctggaggcccacatgcagtcttataagggcaacgaccccctcggcgaatgggaacgttatatacaatgggtcgaggagaattttcccgaaaacaaagagtatcttataacacttctggagcacctgatgaaagagtttctggacaagaagaagtaccacaatgatcccagattcatcagctactgcctcaagtttgccgaatataatagcgacttacaccagttcttcgaatttctgtacaaccacggcatcggcactctatcatcgccgctatatatcgcctgggccgggcatcttgaggctcagggggagctgcagcatgctagcgccgtactgcaaaggggcatccagaaccaggcagaaccaagagaattcctgcagcagcagtaccgacttttccagactcgccttactgagactcacttgccagctcaggccagaacttcagagccgctccataatgtgcaggtgctaaatcagatgataacaagtaaatcaaaccccgggaacaacatggcttgtatttctaagaatcagggctctgagttaagtggagtcatcagttcagcatgcgacaaagaaagcaatatggagaggagagttattactatttcgaaatcggagtactcagtgcacagtagcctggcttccaaggtggacgtcgaacaagtggtaatgtactgcaaggaaaagcttatccgaggagagagcgagttttcttttgaggagctccgggcgcagaagtataaccagcggaggaagcatgagcaatgggttaacgaagaccgccactacatgaaaaggaaggaggcaaacgcctttgaagagcagctgctgaagcagaagatggacgagctccacaagaagcttcaccaggttgtggagaccagccacgaagacctgcctgcttctcaggaaagaagtgaagtgaatcccgcgagaatgggcccatccgtagggagtcaacaagagctccgcgccccatgccttcctgtgacataccagcagacacccgttaacatggagaagaacccacgagaggccccccccgttgtgccccccttggccaacgccattagtgctgccctggtctcacccgctacttctcagagcatcgcccctccggtaccattaaaagctcagacagtcacagatagtatgtttgctgtagcgagcaaggatgctggttgcgtgaataagtcgacccacgagtttaaaccccagtcaggcgctgaaataaaagaagggtgcgagacccacaaagtggcaaatacatccagctttcatactacccctaacacaagcctcgggatggtgcaagctacccctagcaaggtgcaacccagtccaaccgtacataccaaggaggcgcttggatttattatgaacatgttccaggctccaactttaccagacatctctgacgataaagacgagtggcagagtctggatcagaacgaggatgctttcgaagcgcagtttcagaaaaatgtcagaagctctggggcctggggtgtgaacaagattatcagctccctgagtagtgcgttccacgtgttcgaggacgggaataaggagaattatgggcttccgcagccgaagaacaaacccaccggagcaaggacattcggggagagaagcgtgtcacgacttccatctaaacctaaggaggaggtgccccatgctgaagaatttttagacgacagcactgtctgggggatccggtgtaataagaccttggccccaagcccaaaaagccccggggactttacttctgcagctcaactggcttctacgccttttcacaagttgcctgtggagtcagtacatatcctggaagacaaggagaatgttgtagccaaacagtgcacacaggccaccctcgactcttgtgaggaaaacatggtggtcccctcgagggacggcaagtttagcccaatccaagaaaagtctccaaagcaggccctatccagtcacatgtatagcgcttccctcctgcgattaagccagcctgctgcgggaggagtgctcacttgcgaggcagaacttggtgttgaggcttgcagactgaccgacactgacgccgcaatcgctgaggacccaccagacgccatcgcaggccttcaggcagaatggatgcagatgtcatccctaggtaccgtggatgctcctaacttcatagtggggaatccttgggacgacaagttaatcttcaagctgctgtctgggctcagtaaacccgtgtctagttaccctaacactttcgaatggcagtgtaaattgcccgctatcaagcctaaaaccgaattccaactgggcagtaaattggtgtatgtgcaccacctgctcggggaaggcgcctttgcccaggtatacgaggctactcagggtgacctcaacgacgcaaagaataaacagaaattcgttctcaaggtgaaaagttag

SEQ ID NO: 180890 - DNA, 981 bp, synthetic construct
  misc_feature 1..981: note = Description of Artificial Sequence: Synthetic coding sequence
  source 1..981: mol_type = other DNA
atgaccggcagcaacgagttcaagctgaaccagccccccgaggacggcatcagctccgtgaagttttcaccaaacacaagccagttcctcctggtgagtagctgggacacatcagtgcgtctgtatgacgtgccggctaatagcatgcgccttaagtatcagcacacaggcgctgtcctggattgtgccttctacgaccctacacatgcttggtctggcggtttagaccatcaactgaagatgcacgacctcaatactgatcaggagaacctggtgggcacccatgatgctccaatccgctgcgtcgagtactgtccggaagtcaacgttatggtcacggggtcctgggatcagaccgtaaagttgtgggacccacgtaccccttgcaatgccggtaccttcagccagccagagaaagtatatactctgtctgtctcaggcgaccggctgattgtggggaccgcgggacggagggtattggtctgggaccttaggaatatgggatatgtgcagcagagacgcgagagttctctcaagtatcaaacgcgatgcatacgggcattccctaacaagcaggggtacgtactcagtagcatagagggcagggtagctgtggaatatctcgatccctcgcccgaagtccagaagaaaaaatatgcttttaaatgtcaccgactgaaagagaacaacatcgaacagatttaccccgtgaacgccatctcgttccataatatccacaatacttttgcgacgggagggtccgacggattcgttaacatctgggacccgttcaacaagaagagactttgtcagttccatcgatacccaaccagtattgcatcgttagcattttccaacgacggcaccacattggccatcgcctcaagctatatgtatgagatggatgacacagaacaccctgaagatggtatctttattaggcaggtaacagacgccgagaccaagcccaagtcgacctag

SEQ ID NO: 180891 - DNA, 987 bp, synthetic construct
  misc_feature 1..987: note = Description of Artificial Sequence: Synthetic coding sequence
  source 1..987: mol_type = other DNA
atgaccggcagcaacgagttcaagctgaaccagccccccgaggacggcatatcgagtgtcaagttcagccccaacacttcccagtttcttctggtctccagctgggatacatcagtgaggctctatgacgtgcccgccaacagcatgaggctgaagtaccaacacaccggtgcagtgctcgactgcgccttctatgaccccactcacgcctggagcggagggctggatcaccagctgaagatgcatgacctgaacaccgaccaagagaatctggtgggaacacacgacgcaccgatccggtgtgttgagtattgccctgaagtgaatgtgatggtaaccggatcctgggatcaaacagttaagctatgggaccccagaacaccctgcaatgccggtacattttcccagccagagaaggtgtatacactcagcgtctccggagatcgcctgatagtggggacagctggccggagggtgcttgtgtgggatctgagaaacatgggatatgtgcagcagcgacgggagtcgtctttaaagtatcagactagatgcatccgggcatttccgaataagcagggctacgtcttaagctccatcgaggggagggtagctgtcgagtatctcgatccatcacccgaggtgcagaagaagaagtatgcctttaagtgccaccggctgaaggagaataacattgaacaaatatacccagtgaatgctatcagctttcataacattcataatactttcgctacaggcggcagcgacgggtttgtgaatatttgggatcctttcaacaagaagaggttatgccaattccaccggtacccaacatcaattgcaagcttagcctttagtaatgacggaacgacgcttgctatcgcaagcagctatatgtacgagatggacgacacagagcacccagaggatggcatttttatccgccaggtcacggatgcggagaccaaaccaaagagtccttgtacttag

SEQ ID NO: 180892 - DNA, 747 bp, synthetic construct
  misc_feature 1..747: note = Description of Artificial Sequence: Synthetic coding sequence
  source 1..747: mol_type = other DNA
atgcacgacctgaacaccgaccaggagaacctggtgggcacccacgatgcacccattaggtgtgtggagtattgcccggaagtcaacgtgatggtgacaggttcttgggaccagacggtcaaactgtgggatcccagaacgccttgcaatgcggggaccttctcgcagcctgaaaaggtgtacaccctgtccgtgagtggcgatcgactcatcgtagggactgcagggaggcgcgtcctcgtttgggacttacgcaacatgggctatgtgcagcagaggagggaatccagcttgaaataccagacgcgctgcatcagggctttccccaacaaacaagggtacgtgctcagcagtattgagggcagagtggccgtggaatacctcgacccttcccccgaggttcagaagaagaaatacgcattcaagtgccacagactcaaagagaataatattgagcagatctatcccgtgaacgcaatttctttccataatatacacaatacctttgcaactggagggtcagatggtttcgtgaacatctgggatccgttcaataaaaagagactttgtcagtttcacaggtacccgacgtcaattgcttcattggccttcagcaacgacggtaccactctagctattgcatcctcctacatgtatgagatggatgacaccgagcatcctgaagacggaatatttatcagacaggtcactgatgcggagaccaaacctaagtccccttgcacttag

SEQ ID NO: 180893 - DNA, 1164 bp, synthetic construct
  misc_feature 1..1164: note = Description of Artificial Sequence: Synthetic coding sequence
  source 1..1164: mol_type = other DNA
atggcctgcaccatccagaaggccgaggccctggacggcgcccacttaatgcaaatactctggtatgacgaggaagagagcctttatccagctgtgtggctgagggacaattgtccttgctcagactgctacctcgacagcgcaaaagctcgcaagcttttggttgaagctctcgatgtgaacatcggcattaaaggattgatcttcgaccggaaaaaggtgtacataacctggcctgacgagcactatagcgagttccaggccgactggctcaagaaaaggtgcttctcaaaacaggcgcgcgcaaagctccagagggagctgttctttccagagtgccagtactggggatctgagctgcagctaccgacccttgactttgaagacgtcctacgctacgacgagcacgcctacaaatggctgtctacccttaagaaagtaggcattgttaggctgactggggcttctgataagcctggcgaggtgagcaaactaggaaaacgcatggggttcctttaccttacattctacggacatacctggcaagtgcaagataagatcgatgcaaacaacgtcgcatacaccaccggaaaactgtcctttcatactgattaccccgccctgcaccatccccccggcgtgcagcttcttcattgtatcaaacagaccgtgacaggcggcgattccgagattgtcgacggctttaacgtctgccaaaaattgaagaagaataatccccaggctttccaaatactctcctctaccttcgtggattttactgatatcggggtcgactactgtgacttcagcgtgcaatctaagcacaagattatagagctcgatgataaaggccaggtggtgcgaatcaacttcaacaatgcaactagggataccattttcgatgtacccgtggaacgcgtacaacccttctatgcagctttgaaggaattcgtagaccttatgaactccaaagaaagtaagtttacttttaaaatgaacccaggcgacgtgattacctttgataactggagactgttacacggaaggcgatcctatgaggcaggcaccgagatatccaggcatctggagggcgcatacgccgattgggatgtggtgatgagccggctcagaattctccgacaaagagttgagaatggaaactag

SEQ ID NO: 180894 - DNA, 1164 bp, synthetic construct
  misc_feature 1..1164: note = Description of Artificial Sequence: Synthetic coding sequence
  source 1..1164: mol_type = other DNA
atggcctgcaccatccagaaggccgaggccctggacggcgcccacctcatgcagatcttgtggtatgacgaggaggaaagcttgtatcctgctgtgtggctgagggataactgtccatgttccgactgttacctcgactctgcgaaggctcgtaagctgctcgtcgaggcactggacgttaacattggcatcaaggggcttatttttgatagaaaaaaagtttacattacgtggcccgacgagcactattctgagtttcaagccgactggctgaaaaagcgctgtttcagcaagcaggcaagggccaagctgcagagggaactcttttttcctgagtgccaatactgggggtcagaattgcagctgcccacgctggactttgaggatgtgctgcgctacgacgaacatgcctataagtggctctccacactgaaaaaggtcggaattgtccgcctcacaggtgcttctgacaagcccggggaagtgtctaagttagggaaacggatgggattcctttatctcaccttttatggccatacctggcaggtgcaggacaagatcgatgcaaataacgtggcatacacgactggtaagctctcatttcataccgattatcctgcacttcatcatcctcctggggtgcagctgctgcattgcattaagcagacagtgaccggcggcgactctgagattgttgacggcttcaacgtctgtcagaagctgaaaaagaacaatccccaagcgtttcagatactgtcgtctacctttgtggacttcaccgatatcggagtagactattgtgacttcagcgtccagtccaagcataaaataattgaactcgacgataagggccaggtcgttcggatcaacttcaacaacgcaactagggatactatttttgatgtgccagtcgaacgagtacagcctttttacgccgccctgaaagaatttgtagatctcatgaattcaaaggagagtaaattcactttcaaaatgaatcctggcgatgtgatcaccttcgacaactggcggcttctgcacggacgacggagctacgaggctggtacagagatctctcgtcatctggagggagcctacgcagactgggatgtggttatgtcccggctcagaattctgagacagagggtggagaacggcaactag

SEQ ID NO: 180895 - DNA, 1164 bp, synthetic construct
  misc_feature 1..1164: note = Description of Artificial Sequence: Synthetic coding sequence
  source 1..1164: mol_type = other DNA
atggcctgcaccatccagaaggccgaggccctggacggcgcccaccttatgcagatcttatggtatgatgaggaggaatctctgtaccctgccgtgtggctgcgtgataactgtccctgctccgattgctatttggactcagcaaaagccagaaagctcctggtggaagccctcgatgttaacattggcataaaagggctgatctttgaccgtaagaaggtgtatatcacttggcctgacgagcactatagtgagttccaagcagactggttaaaaaagcggtgcttcagtaagcaggcgcgggcaaagttgcaacgggagctattcttcccggaatgccagtattggggcagcgagctacagcttcccactctggacttcgaagacgtcttacggtatgacgagcacgcctataagtggctttccactcttaaaaaggttggaatcgtgaggctcaccggtgcctccgacaagccaggcgaggtgagtaagctggggaagagaatggggtttttgtatctgacgttttatggacatacttggcaggtccaggataaaatagatgcgaacaacgtggcttacaccacggggaaattgagctttcatacagactatccagctttacaccacccgcctggcgtccagctgctgcattgtataaagcagactgtaactggcggggatagcgagatagttgatggctttaatgtgtgccaaaaactcaaaaagaacaaccctcaggcttttcagatcctctcatctacctttgttgactttacggacataggggtcgactattgcgatttctctgtgcaatccaaacacaagatcattgaactcgatgataaaggacaggttgtccggattaactttaataatgctacgcgagatactatcttcgatgtgccggttgagagagtgcagccattctacgctgccttgaaggaatttgtggatttgatgaatagcaaagagagcaagttcacctttaagatgaacccgggtgacgttataacctttgataactggagactcctgcatgggcgcaggtcctacgaggccggcacagagatttccaggcacctggaaggcgcttacgccgattgggacgtggtgatgagtcgcctgaggattctccgccagagggtggaaaatggcaattag

SEQ ID NO: 180896 - DNA, 1164 bp, synthetic construct
  misc_feature 1..1164: note = Description of Artificial Sequence: Synthetic coding sequence
  source 1..1164: mol_type = other DNA
atggcctgcaccatccagaaggccgaggccctggacggcgcccacttaatgcagattctttggtacgatgaggaagagtccctctatcccgcggtgtggcttagggataactgtccgtgttctgattgttacctagactctgccaaagcacggaagctgctcgtggaagctctcgatgttaacatcggtattaagggtctcattttcgaccggaaaaaggtgtacattacatggcccgatgaacactacagtgaattccaagcagattggctgaagaagcgatgtttctccaaacaagcacgagccaagctgcagagagagttgttttttcctgagtgtcagtactggggcagtgaactgcagttacctaccttggactttgaggacgttctgcggtacgacgaacatgcttataaatggctctctactttgaagaaagtggggattgtgagactgacaggtgcatctgacaagcccggtgaggtatccaaactggggaaaaggatgggctttctatatttaacattttacggccacacctggcaggtccaggacaaaatcgacgctaacaatgtggcctatacgacgggcaagctctctttccacacggattatcctgccctgcatcaccctcctggcgtgcagttgctgcactgtatcaagcagacagtaacaggaggggattccgagatagttgatggctttaacgtctgtcagaagctgaagaaaaataatccccaggcctttcagattctttcgtcaacctttgtagacttcacagacattggcgtagactactgcgattttagtgtgcagtcgaaacacaagatcatcgagctggatgacaagggacaagtcgtgagaatcaacttcaacaacgcaacaagggacacaatctttgacgtgcccgtagagcgggtgcagcctttttatgcagccttaaaagagtttgttgacctcatgaactcaaaggagagtaaatttaccttcaagatgaatcccggcgatgtgatcacattcgataattggcggcttcttcacggtcggagaagctacgaggccggaaccgaaatcagtagacatctggagggagcgtatgcggattgggatgttgtgatgtcacgccttagaattctacgccagcgggtggagaacggcaattag

SEQ ID NO: 180897 - DNA, 207 bp, synthetic construct
  misc_feature 1..207: note = Description of Artificial Sequence: Synthetic coding sequence
  source 1..207: mol_type = other DNA
atggcctgcaccatccagaaggccgaggccctggacggcgcccacctaatgcaaatcttatggtatgatgaagaagagtctctgtaccccgcagtgtggctccgtgacaactgtccttgctccgactgttacctcgacagtgctaaggcccgaaaattgctcgtggaggcccttgacgtcaacattgggataaagggccttatctag

SEQ ID NO: 180898 - DNA, 771 bp, synthetic construct
  misc_feature 1..771: note = Description of Artificial Sequence: Synthetic coding sequence
  source 1..771: mol_type = other DNA
atggagcccgccgccgccctgcacttcagcctgcccgccagcctgttgctccttctactgttactattactcagcctgtgcgctctggttagcgcacaattcacagtcgtgggccccgccaatccaattttagccatggttggtgagaatacaactctgcggtgccacctgtccccagaaaagaacgccgaggacatggaagtgaggtggttccgtagtcaattcagcccagcagtttttgtgtacaaaggagggcgggagagaactgaagaacagatggaggagtacagaggccgtatcacattcgtctccaaagacattaaccgtggctccgtcgccctagtcatccacaatgtgacagcacaggagaacggtatttatcggtgctatttccaggagggccgaagctatgatgaggcgatcctgagattggtggtggccgagagtttcatgccgagcgccagcccctggatggttgccctcgccgtgatcttgaccgccagcccatggatggtgagcatgacagttatcctcgcggtcttcataatcttcatggccgtgtccatatgctgtattaagaaactacagcgtgaaaagaagattttaagcggtgagaagaaagtcgagcaagaggagaaagagattgcacaacagctgcaggaggagctacggtggcgaagaactttcctgcacgctggttacgagcttcctggaatccggggcccaagctggaaaagaccactgcacggggagccaccaagcgctttctag

SEQ ID NO: 180899 - DNA, 942 bp, synthetic construct
  misc_feature 1..942: note = Description of Artificial Sequence: Synthetic coding sequence
  source 1..942: mol_type = other DNA
atggagcccgccgccgccctgcacttcagcctgcccgccagcctgctgctcctcctgcttctgctactcctttccctgtgtgcacttgttagcgaaagcttcatgccttcggccagcccatggatggttgcccttgcggtgatcctgaccgcctcaccatggatggtatcgatgaccgtgattttagctgtgttcattatctttatggctgtatcgatttgctgcattaagaaactccagagagagaagaaaatcctctccggcgagaaaaaagtcgagcaggaggaaaaagagattgcacaacaattacaggaagagctaagatggcgccgcacatttctccatgctgctgatgtggtactagaccctgatactgcacatcccgagctcttccttagcgaagatcgccgctctgtcaggaggggaccgtacagacagcgcgtccccgacaaccctgagaggttcgatagccagccttgtgtgctgggttgggaatcattcgcatctgggaagcactactgggaggtcgaagtcgaaaacgtaatggtctggactgtgggggtgtgtcgccacagtgttgagagaaaaggagaagtcctcctgatacctcagaacggattctggaccctggagatgtttggaaatcaatacagagctctgtctagtcctgagcgaatcttgccattaaaagagtccctttgcagggtgggagtgttccttgactatgaggcgggcgacgtgagcttctacaatatgagggatcgcagccacatctacacatgtccaagatctgcatttacagtgcctgtccgacctttcttcaggctgggatccgatgactccccgatatttatttgtccggccttaacaggggccagcggtgtgatggtgcctgaagagggccttaagctgcatcgcgttggaacccaccagtccctgtag

SEQ ID NO: 180900 - DNA, 1608 bp, synthetic construct
  misc_feature 1..1608: note = Description of Artificial Sequence: Synthetic coding sequence
  source 1..1608: mol_type = other DNA
atggtgggcgaggacgccgacctgccctgccacctgttccccaccatgagcgccgaaacgatggagttacgttgggtttcaagctctttgaggcaggttgtgaacgtgtacgcagacggcaaggaagtggaagaccgccagagtgccccttacaggggcagaacaagcatcctccgtgatgggattactgctgggaaagcggccctgagaatccataacgtcacagcatctgacagcggcaagtacttgtgctattttcaggacggcgacttttatgaaaaggccttggtcgagctgaaagtagccgcgctgggttctgatctgcacatagaggtcaagggatatgaggacggaggaattcacctcgaatgtcgtagcaccggttggtacccgcagccccagattaagtggagcgacacaaagggagagaatatccccgctgtagaggccccagttgtcgcagacggcgttgggctgtatgcagtggcagcaagcgtgatcatgcgaggcagtagtggtggaggcgtgtcctgtattattagaaattcactgctgggccttgaaaaaaccgcgtccatttccatcgcggacccttttttccggtccgcacagccgtggatcgccgcactcgctgggacactcccaataagtctgcttctgctggctggcgccagctacttcctgtggcgacagcagaaggaaaagatcgctttgagcagggaaaccgaacgagagcgcgaaatgaaggaaatgggctacgcagccacagaacaggagatttccctcagagagtggcggaaaatacaatatatggcccgcggggaaaagtccctggcttaccacgagtggaaaatggctcttttcaaacccgcagacgttattctggacccagatacagctaatgccattctcctggtttctgaggatcagcgaagtgtgcaaagggctgaagaaccacgggatttacccgacaacccggaacgcttcgaatggcgctactgtgtgctaggttgtgaaaattttacatccggaaggcattattgggaggtggaggtgggcgatcgtaaggagtggcacattggcgtttgctcgaaaaacgtggagcgcaagaaggggtgggtgaaaatgacgccagagaacgggtactggaccatgggcttaactgatggaaacaaatacagggctctgaccgaacctcggactaacctaaagctgcctgagcctccaaggaaagtcgggatttttttggactacgaaaccggcgagatctcattctacaatgccactgatggcagccatatttatacattccctcatgcatccttcagcgaacccttgtaccctgtcttccgaatattaacgctagaaccaacggctctgacaatctgccccatacccaaggaagtagagtctagtcctgacccagatctggtacccgatcatagtttggagacgccattgacacccggtctggctaatgagtctggcgaaccacaggccgaagtgacaagtcttctgttgcccgcccacccgggggctgaagtgagccctagtgctaccaccaaccagaaccataagctgcaagcccggacggaggccctatactag

SEQ ID NO: 180901 - DNA, 1581 bp, synthetic construct
  misc_feature 1..1581: note = Description of Artificial Sequence: Synthetic coding sequence
  source 1..1581: mol_type = other DNA
atggccgtgttccccagcagcggcctgccccggtgcctgctgacccttattctcctgcagctgcctaagttagacagtgctcccttcgatgttatcggtcctcccgagccaatccttgccgtcgtcggagaggacgcagagctgccctgtcggctatcccccaatgccagtgcggaacatctcgagctgagatggttccgcaagaaagttagtcctgcagtactggtgcatagagatggcagggagcaagaagctgaacaaatgcctgaatacagagggcgggctacattagttcaggacgggattgcgaagggacgagtagcgctgcggataagaggggtcagagtatccgacgatggtgagtatacatgtttcttccgggaagacgggtcctacgaggaggccctggtgcatctcaaagtggcagccttaggatctgatccccacattagtatgcaggtgcaggaaaacggcgagatatgtcttgaatgtacttctgtagggtggtatcctgaaccccaagttcagtggcggacgagcaagggggaaaaattcccttctacatcggaatcccggaaccctgacgaagagggcctctttaccgtggccgcttcggtgatcatccgcgatacaagcgccaagaacgtttcatgctacattcagaacctgctgcttggacaggaaaaaaaggtcgagatctctattccggcttcatcactaccgaggttgactccctggatagtagcagtcgccgttatccttatggtcttagggctattgaccatcggctccattttcttcacatggaggctgtataatgaaaggccacgggaacgaagaaatgagttttcttctaaggagcggctcctcgaggagttgaagtggaaaaaggccactcttcatgctgtggacgtcaccctcgacccagacactgctcatccacatctgttcctgtacgaagacagtaaaagcgtgaggctcgaggactccaggcagaagctgccggaaaagactgaaaggttcgactcttggccttgtgtgctaggtcgcgagacctttacctctggtaggcactattgggaggtggaggttggggaccgaaccgactgggctatcggagtgtgtcgggaaaatgttatgaaaaagggcttcgatcccatgactcctgagaatggcttttgggcagtggagttgtatggcaacggttactgggcccttaccccactacgcactcctcttcctctggcaggacctccccgtagagtcggcatcttcctggattacgagagcggggatatttctttttacaatatgaatgacgggtccgatatttataccttttccaacgtgaccttctctgggcccctcaggccattcttctgcctgtggagttctggaaaaaaacccctcactatctgccccatcgcagatggccccgaacgcgtgactgtaatcgccaacgctcaggacctctcaaaagaaatcccactctcacctatgggggaagattccgccccgagagacgccgatacccttcactccaagctcataccaacccaaccatcgcaaggagctccatag

SEQ ID NO: 180902 - DNA, 1485 bp, synthetic construct
  misc_feature 1..1485: note = Description of Artificial Sequence: Synthetic coding sequence
  source 1..1485: mol_type = other DNA
atggccgtgttccccagcagcggcctgccccggtgcctgctgaccctcatcctgctacaacttcctaagctagattctgcacccttcgatgttatcggacctcctgagcccatacttgctgtggtaggggaagacgccgagttaccctgtcgcctgtccccaaacgcctccgcggagcacctggaacttaggtggtttcgaaaaaaggtgagcccagctgtgctcgttcatcgggacggtagggaacaggaagctgaacagatgcctgaatatcgcgggcgggctactctcgttcaggacggaatagcaaaaggaagagtggcacttaggattagaggggtcagggtgagtgacgacggtgagtacacctgttttttccgggaggacggatcttacgaggaagctttggtccatttgaaggtcgccgccctgggctccgacccccatatttccatgcaggttcaggaaaatggcgaaatctgtttagaatgcacctctgtcggatggtaccctgaaccacaggtgcagtggaggacgtcaaaaggagagaaattcccgtctacttccgagtcacgtaacccagatgaggagggattgttcacggtggccgcaagcgtcatcattcgagatacctctgcgaagaacgtatcatgctatattcagaacttgctgctgggacaagaaaaaaaggtagagatcagtattccagccagttcactccctagattgacaccatggattgtggcagtggcagtgatcctgatggttctgggcctgctgacgatcggttcgatcttttttacttggaggctctataatgagcgcccccgtgaacggagaaacgaatttagcagcaaggaaagactgctggaggaactgaaatggaagaaagccacgctgcacgctgtcgacgtgacactggaccctgacactgcccatcctcatctgtttctttacgaggactctaagtcagttaggctcgaagacagccggcagaaattgcccgaaaaaactgagcggttcgacagttggccttgtgttctgggcagagagacctttactagtggccgtcattattgggaggttgaagtgggagacagaaccgactgggccattggcgtctgccgggaaaacgtgatgaagaaagggttcgatcctatgacccccgagaacggattttgggcagtagagctgtatgggaatgggtattgggcactcactccactcaggacaccactgcctctggccgggccaccccgacgcgtgggcatttttctcgactatgagtctggagacataagcttttacaacatgaatgatgggtcagacatttatacattttctaatgtcacagtcatcgcaaatgcccaagacctttcaaaggaaatccctctctccccaatgggcgaggatagcgctcccagagatgccgacacccttcactctaagctaattcccactcaaccttcacagggcgccccctag

SEQ ID NO: 180903 - DNA, 1590 bp, synthetic construct
  misc_feature 1..1590: note = Description of Artificial Sequence: Synthetic coding sequence
  source 1..1590: mol_type = other DNA
atggagagcgccgccgccctgcacttcagccggcccgccagcctgttgctgctgctcctgtctctatgcgccctggtttcagctcagttcatagttgtcggccccacagatccaattttagccacagtgggagagaatactactctgagatgccatctctcccctgagaaaaatgcagaggatatggaagtgcggtggttccggagccagttctcgccagcagtgttcgtgtataagggcggtagggaacggactgaggaacagatggaggaatatcgagggcgcactacctttgtgtcaaaagatatctcgaggggttctgtggcactggttatacacaatatcacggcacaggagaacggcacatatagatgttatttccaggagggtaggagttacgacgaggctatccttcacttggttgtggccgggcttggatccaagcctctcatctcaatgcgcgggcacgaagacggagggattcgtttagagtgtattagtcgggggtggtacccgaagcctctcactgtgtggcgggatccatatggtggggttgcgccagcactcaaagaggtgtccatgcctgacgccgatggtctcttcatggtgaccaccgccgtgatcattagggataagtcagtacgaaatatgtcctgcagcataaacaacaccttgttggggcagaagaaagagtctgtgatcttcatcccagaatctttcatgccatccgtgtcgcctccgatcgctgtgtgcatctactggatcaataagctgcagaaagaaaagaaaattctcagtggcgagaaagagttcgaaagggaaacaagagagatcgctttgaaggaactggaaaaagagagggtgcaaaaggaggaggagctccaagtgaaggaaaaattacaagaggagctgcggtggcggagaacgtttcttcacgcggtggacgtggttttagacccagatactgcccacccagatctgtttcttagcgaggatcggcgatcagttagacgctgtccatttaggcacctgggagagtcagttccagacaatccggagaggttcgattcacagccgtgtgttttaggcagagagtccttcgccagcggcaaacattattgggaggttgaggtggagaatgtgatcgagtggacggtgggggtgtgcagggacagcgtggaaaggaagggcgaggtgctacttattcctcagaacgggttttggacattggagatgcacaagggacaataccgagccgtttcctcccccgacaggattttgcccctcaaagaatctctatgccgggtgggcgttttcttggattacgaggccggggacgtatccttttataacatgagagatcggagccacatctacacttgccctcgctctgccttctcagggccggatacaagtcagagcggagacccgcccgagccgatcgaatcaattccttggagtcattcacacgtcgataagccttggtcttcccagcagccacctcataacacacacctgcccgctgcctcgttcactcccacaacagacctctcaccttccttcctacttttgacacgactgtgcttctag

SEQ ID NO: 180904 - DNA, 1584 bp, synthetic construct
  misc_feature 1..1584: note = Description of Artificial Sequence: Synthetic coding sequence
  source 1..1584: mol_type = other DNA
atggagagcgccgccgccctgcacttcagccggcccgccagcctgctgttgttgctgctgagcctttgtgctttagtgtctgctcaatttattgtggtggggcccaccgacccaatcttagccaccgtgggagaaaacacgaccctccgatgtcacctgagcccggaaaaaaacgctgaagatatggaagtcagatggttccggagtcagttctctccggccgtctttgtctacaaggggggacgggaacgcaccgaggaacagatggaagaataccgcggacgcacaacttttgtcagtaaggatatatctcgggggagtgtggcactggtaatacacaacatcaccgcacaggagaatggaacataccgctgttactttcaggaggggcggagctatgacgaggcaattttacatctagtggtcgcagggctgggctctaaaccccttatctcaatgcggggccatgaggacggcggtattcgtttagaatgcatatcacgcggctggtacccaaagcctttaactgtctggcgcgacccatacggtggggttgcaccagccctcaaggaagttagtatgccggatgcagacggcctgttcatggttacaactgctgttattatccgcgataagtctgtccgaaatatgtcttgcagcattaataacactctactgggacagaagaaagaatcagtgatctttattcctgaaagctttatgccgagtgtttcaccgtgtgcggtagctttgcccatcattgtggtcatccttatgattccaattgctgtttgcatatattggataaacaagttacaaaaagaaaaaaaaatcttgagcggcgaaaaagaatttgaaagagagacacgggaaattgccttgaaagagctggaaaaagagcgtgttcaaaaagaagaagagctgcaggtgaaggagaaactacaggaggagcttcggtggcgcaggacattccttcacgccgtcgacgtggttctcgatccggacaccgcacacccagacctctttctctcagaggataggaggagcgtccgacgatgcccatttaggcatcttggggaatctgtgccagataaccctgagagattcgacagccagccttgtgtcttgggccgggagagttttgccagcggcaaacattactgggaggtggaagtggaaaacgtgattgaatggaccgtaggcgtttgtagagactccgtggagcgcaaaggcgaagtgttactgatcccacaaaacggtttctggaccctcgagatgcataaaggacagtatagagccgtctccagcccagaccggatcctcccgctcaaggaaagtctttgtagagtcggagtctttctggattacgaagcaggcgacgttagtttttataacatgcgcgatcgctcacacatctatacatgtccacggtccgctttctctgtgcctgtgagaccattttttcgactcggttgcgaagactcgcctatttttatctgccctgcactcactggtgctaatggcgtaacagttccagaggagggactgaccctgcacagggtcggtacccatcagagcctctag

SEQ ID NO: 180905 - DNA, 1005 bp, synthetic construct
  misc_feature 1..1005: note = Description of Artificial Sequence: Synthetic coding sequence
  source 1..1005: mol_type = other DNA
atggagagcgccgccgccctgcacttcagccggcccgccagcctgctattgctgctgctcagcttgtgtgctctggtttcggcgcagtttatcgtcgtcggaccaaccgaccctatcctcgccaccgtgggcgaaaacacaaccctgaggtgccacctctcccctgagaaaaacgccgaagacatggaggtgcgatggttcagatcccagttttcccccgcagttttcgtgtacaagggaggtcgggaaaggacggaagaacaaatggaggaataccgcggacgcacaaccttcgtttccaaagatatctccagaggcagtgtggcactggtgatccacaacataacggcgcaggagaacgggacctaccggtgttatttccaagaagggcggagttatgacgaagctatactacaccttgtggtggcaggattgggttctaagcctttaatctctatgagagggcatgaggacggtgggattagactggagtgcatcagtagaggctggtatccaaagccgctgactgtctggcgggacccatatgggggagttgcacccgctttaaaggaagtgagtatgcctgacgccgacggtctgttcatggtgactacagccgtcatcatccgggacaaatccgttagaaatatgagctgcagcatcaacaacacacttctgggacaaaaaaaggaatccgtgattttcattcccgagtcttttatgccatccgtgagcccctgtgcagtggccctgcccataatcgtggtgattctcatgattccaattgccgtgtgcatttattggattaacaagttacagaaagaaaagaagattctttccggggaaaaggaatttgagcgagagaccagggagatcgcattgaaagagctggagaaggaacgagtgcaaaaggaggaggaactgcaggtgaaagagaaactacaggaagagctgcggtggcgccgcacattcctgcatgcagagctacagttcttttcgaattag

SEQ ID NO: 180906 - DNA, 993 bp, synthetic construct
  misc_feature 1..993: note = Description of Artificial Sequence: Synthetic coding sequence
  source 1..993: mol_type = other DNA
atggagagcgccgccgccctgcacttcagccggcccgccagcctgttgctgctcctactgagcctgtgcgcactggtgtcagctcagttcattgtggtaggaccaaccgatcctatactcgcgacagttggtgaaaacaccacgctgagatgtcacctttctcctgagaagaacgccgaggatatggaagtgcgctggtttagatcacaattcagccccgctgtattcgtttacaaaggtggacgcgagaggactgaagagcaaatggaagaatacagggggcggaccactttcgtgagtaaggacataagccgaggaagcgtggctcttgtgatacacaatattaccgcgcaggagaatggcacatacagatgttatttccaggaagggcggtcatacgacgaggctatactgcacctggttgtagcgggactaggctctaagccactcattagcatgcgcgggcacgaggacggtggaatccggctggagtgcatttctagggggtggtacccaaagccacttaccgtttggagggacccatatggcggtgtagcaccagctttaaaggaggtgagtatgcccgatgccgatggactcttcatggtaacgactgctgtcattattcgggacaaatctgtccgaaatatgtcttgttcgatcaataacactctattaggtcagaaaaaggagtcagtaatttttatccccgagtcttttatgcctagcgtttcgccttgtgcagtcgccctcccgattatcgtggtgatacttatgattcccattgcggtgtgcatctactggatcaacaagttacaaaaagagaaaaagatcttgagtggtgaaaaggaatttgaacgcgaaacccgggagatcgcgctgaaagaacttgagaaggagcgcgtgcagaaggaagaggagcttcaagtgaaagagaagttacaagaggagttgaggtggcgcagaaccttcctgcacgcgggccctgtctag

SEQ ID NO: 180907 - DNA, 1401 bp, synthetic construct
  misc_feature 1..1401: note = Description of Artificial Sequence: Synthetic coding sequence
  source 1..1401: mol_type = other DNA
atggaggtgcggtggttccggagccagttcagccccgccgtgttcgtctacaaggggggcagggagcgcaccgaggaacagatggaggagtaccgcggcaggaccacattcgtgtcaaaggacatttcacgaggatccgtcgctcttgtgatccataatatcacagctcaggagaacggcacctatcgttgctatttccaggaaggacggagctacgatgaagcaatcctgcacctcgtggtggccggtcttggcagtaaaccactgataagcatgcgtggccatgaggatggcggcattcggctggaatgtatatcaagaggctggtaccctaaaccactgaccgtgtggagagatccctacggtggagtggctcccgcattgaaggaagtgtccatgccagatgcggatggcctgtttatggttactaccgctgtgattatccgcgacaaatcagtcaggaacatgagttgtagcattaacaacaccctcctcgggcaaaagaaagaaagcgtgatttttatccctgaaagctttatgccaagcgtttcaccctgtgccgtcgcgctgcctatcattgtagtgattctcatgatccctatcgccgtctgcatttactggatcaataaactgcagaaggaaaagaaaattctctcaggggagaaagagtttgaacgcgagacccgcgaaatcgcacttaaggagctggagaaggagagggtccaaaaagaggaggagctgcaggtcaaagagaagcttcaggaggaactccgctggaggcggaccttcttgcatgccgtagatgtggttctcgacccggatacagcacatcccgacttgttcctttcagaggacaggcgatcagtgaggaggtgtccattccggcatttaggggagtccgtccccgataaccccgagagatttgatagtcaaccttgcgttcttggacgagaaagctttgcctccggtaagcactattgggaagtagaagtggaaaacgtcatcgagtggacagtaggcgtgtgtcgcgatagcgttgagaggaaaggggaagttcttctcattccccaaaatggtttctggaccctggaaatgcacaaggggcagtatcgcgccgtatcaagcccagatcgaattctgccactgaaggagtccctgtgcagagtgggtgtttttctagactacgaggccggcgatgttagcttttataacatgagagatcggagccacatctatacttgtcctagatccgcattcagcgtgccagtgcgcccctttttccgacttggctgtgaggacagccctatattcatctgcccagccctcactggggccaacggagttactgtcccagaggaaggcctaactttgcacagggtgggcacacaccagtcactgtag

SEQ ID NO: 180908 - DNA, 1224 bp, synthetic construct
  misc_feature 1..1224: note = Description of Artificial Sequence: Synthetic coding sequence
  source 1..1224: mol_type = other DNA
atggagcccgccgccgccctgcacttcagcctgcccgccagcctgctgttgctcctcctgctcctgctcctcagcttgtgtgcgctggtgagtggcctcggatccaagccgctgatcgaaatcaaggcccaggaggacggtagcatctggctggaatgtattagtggcggatggtatccggagccacttaccgtgtggcgagacccttatggagaagtcgttcccgctctgaaagaggtgagcatcgccgatgccgacggtctgtttatggtgacgaccgcggtgattatcagagacaagtacgtccggaatgtgtcctgttccgtgaacaataccttgctgggtcaggagaaggaaacggtcatattcattcccgagtcattcatgccctcggcatctccgtggatggtggccctggcagtaatacttacagcgtcaccttggatggtatccatgaccgtgatcttggcggtcttcatcatttttatggcagtttcaatctgctgtatcaagaaacttcagagagagaaaaagatcttgtctggggaaaagaaggtggagcaggaagaaaaagagatcgcacagcagttgcaagaagaactgcggtggaggcgcactttcctgcatgctgccgacgtggtcctggatcccgacactgcacatcccgagctgtttcttagtgaagatcgacggagtgtccggcgcggaccttacagacagagggtgcctgacaacccagagagattcgattcccagccctgcgttctggggtgggagtcgtttgccagcggtaagcactattgggaagtggaggttgagaatgtgatggtttggacggttggagtgtgccgacattccgtagaacgcaaaggagaagttcttctgattccccagaacggtttttggaccctggaaatgttcggcaatcagtacagagctctctcttctcccgaacggatcttgccgctgaaggaaagcttgtgtcgcgttggggtctttctcgattacgaagccggggacgtttccttctacaatatgcgtgatcgttcacacatctacacatgcccgagaagtgcattcaccgtacccgtccggcccttttttcgattagggagcgacgactcgcccatatttatttgtccagctctgactggagcaagtggagtgatggtacccgaggagggcttaaaactacaccgggtgggcactcatcagagtctgtag

SEQ ID NO: 180909 - DNA, 1572 bp, synthetic construct
  misc_feature 1..1572: note = Description of Artificial Sequence: Synthetic coding sequence
  source 1..1572: mol_type = other DNA
atggagcccgccgccgccctgcacttcagcctgcccgccagcctgctgctcctgctgctactgctgttattaagcttatgcgcattggtatctgcgcagttcaccgttgtgggccctgccaatcctattctagcaatggtgggcgagaatactacactgaggtgccacctcagccccgagaagaacgccgaggatatggaggttaggtggttccggagccagttttctccggcagtgtttgtgtacaaaggaggccgagagcgaacagaggaacaaatggaagaatatcgcggcaggataactttcgtatccaaagatattaaccgcggaagcgtcgcactggtgatccacaacgtgactgcacaagaaaatgggatctacaggtgctacttccaggagggccgctcttatgacgaagccattctgcgtttagtagtcgccggcctgggcagtaaacccctcatcgaaatcaaagcccaagaggatgggtcaatttggcttgagtgcatcagcggtgggtggtacccagaaccattaacggtttggcgcgacccttatggagaggttgttccagccctgaaggaggtgtcaatcgccgatgcagacggactgttcatggtgacgaccgccgtgattatccgtgataaatacgtgcgtaatgtatcctgctccgttaacaatacgctgcttggccaggaaaaagaaactgtgattttcattcccgagagcttcatgccttccgccagcccatggatggtggcactcgcagttatcctgacagcatccccttggatggtcagtatgacagtcattctagccgtcttcatcattttcatggctgtgtcaatctgctgtatcaaaaaactccaacgggagaaaaagatactcagtggcgagaagaaagtggaacaagaagaaaaggaaatcgcacagcagcttcaggaagaactgagatggcgcaggacattcttacacgccgcagatgtggttctggaccccgataccgctcatcccgagcttttcctgtctgaggacagacgcagcgtccgacgaggcccttaccgccagcgggtgccagacaaccctgagcggtttgactcccagccttgtgtgctgggctgggaatctttcgcctccggaaagcactactgggaagtggaagtggagaacgtgatggtctggaccgtgggcgtttgcaggcacagcgtggaaaggaaaggggaggtgctgctgatcccgcagaatggattctggacacttgagatgttcggcaaccagtatcgcgctctctcctccccagagaggatcttgccattgaaagagtcactgtgcagagtcggcgtgtttttggattacgaggcaggggacgtgagcttttacaatatgcgcgaccgaagtcacatttacacttgtccgcgctcagctttcactgtaccagtgaggcctttctttcgtttgggaagcgatgatagtcctatattcatatgtccagccttgacaggcgccagcggagtgatggtgcccgaagagggcctgaaactgcatagagtaggtacgcaccagagtctgtag

SEQ ID NO: 180910 - DNA, 1572 bp, synthetic construct
  misc_feature 1..1572: note = Description of Artificial Sequence: Synthetic coding sequence
  source 1..1572: mol_type = other DNA
atggagcccgccgccgccctgcacttcagcctgcccgccagcctgctgcttttactccttcttctcttgctgtctttatgcgcactggtcagcgcacaattcaccgtcgtgggacccgcaaaccctattttggcgatggtcggagagaataccactctacgctgtcacttgagcccagagaagaacgctgaagatatggaggtccggtggttcagatcccaattctcgccagccgtttttgtgtataaggggggcagagaaaggaccgaagagcaaatggaagagtacagagggcggatcacttttgtctccaaggacattaacagaggctccgtagcccttgtcatccataacgtcaccgcacaagagaacggcatttatcggtgctattttcaagagggaagaagttatgatgaggctatcctccgattagtcgtggctgggctcggctcaaagcccttgatagaaattaaagcccaagaggacggcagtatttggctggagtgtatttccggcgggtggtacccggagcctctgacagtttggcgcgatccatatggagaagtagtccccgcgctgaaagaggtatcaatagccgacgccgacggactgttcatggtgaccaccgcagttataattcgggataaatacgtgcggaacgtttcttgcagcgtgaataacaccctgctggggcaggaaaaggagaccgttatcttcattcccgagtcattcatgccttcggcctccccatggatggtggccctggccgttattctgaccgcatctccatggatggtcagcatgactgtgattctggccgtgtttattatcttcatggcagtgagcatctgttgcatcaagaagctgcaacgggaaaagaagattcttagtggagagaaaaaggtggagcaggaggagaaagagattgcccagcagttgcaggaagagttgcggtggcgtcgcacttttctgcacgccgcagatgtcgtcctggaccccgacaccgcacaccctgagctgttcctatccgaggaccgaagatcagtgcgacggggtccctataggcagcgcgtacccgataaccccgagagattcgactctcagccctgtgttctgggatgggagtcctttgccagtggcaagcactattgggaggtggaagtcgagaacgtgatggtgtggacagtcggggtatgtcggcattctgttgaacgcaagggggaagtactgctcataccgcagaatggattctggaccctcgagatgtttggcaaccagtatcgggccttgagctctccggagcgcatccttccgttgaaggaaagcctgtgtagggtaggagtcttcctagactatgaggcaggcgacgtctctttctacaatatgagagatagatcccatatctatacatgtccacgatcggctttcactgtgcctgtcaggcctttctttcgcctcgggagtgacgactcccccatcttcatttgtcccgcactgacaggcgctagcggcgttatggttcccgaagagggcctgaaactgcatcgcgtaggcacccaccagtctctgtag

SEQ ID NO: 180911 - DNA, 1011 bp, synthetic construct
  misc_feature 1..1011: note = Description of Artificial Sequence: Synthetic coding sequence
  source 1..1011: mol_type = other DNA
atggagcccgccgccgccctgcacttcagcctgcccgccagcctgctgttgctattgcttctgctcctcctgagtctgtgcgcattggttagtgcccaattcacagtggttggacctgctaatcctatcttggccatggtcggtgagaacactaccttgagatgccaccttagtccagagaagaacgctgaggatatggaagtccgctggtttcggtctcagttctcacccgctgtctttgtatataaaggcggaagggaacgtacagaagagcaaatggaggagtatagggggcgcatcacttttgtgtcaaaggatattaaccgcggatctgtggcccttgtaattcataacgtgactgctcaggagaatggaatataccgctgctactttcaggaaggacgcagctatgacgaagcaattcttagattggtcgtggccggactgggatccaagccccttatcgagatcaaagcacaggaggatggcagcatctggcttgagtgtatttcagggggctggtatccggagcctctgactgtgtggcgggatccctatggcgaggttgtgccagcattgaaagaggtatcaatcgccgacgccgacggtctgttcatggtaactactgcagtgattattcgggacaaatacgtcaggaatgtttcatgctctgtcaataacacgctactcgggcaagaaaaggagacagtgatcttcattccagagagcttcatgccaagtgccagcccttggatggtcgcattagccgtgattctgaccgcttcaccatggatggttagtatgacggtcatcctggccgtgttcattatcttcatggctgtcagcatctgctgcattaagaaactacagagagagaaaaaaattctgagcggtgagaagaaggtcgagcaggaggaaaaggagatcgcacagcaactgcaggaggaattacggtggaggcgaactttcttgcatgccgatgttaacctcacagggctgagaaacacatag

SEQ ID NO: 180912 - DNA, 333 bp, synthetic construct
  misc_feature 1..333: note = Description of Artificial Sequence: Synthetic coding sequence
  source 1..333: mol_type = other DNA
atggagcccgccgccgccctgcacttcagcctgcccgccagcctgctactcctgctactgctgctcctactgtccctgtgtgctttagtgtccggtctcggcagtaaacccctgatagaaattaaagcccaggaagacggctccatttggctggagtgtatatcaggaggctggtaccctgaaccactgacagtgtggagggacccatatggggaagttgtcccggcactgaaggaggtaagcatcgcggacgcagatggcctgtttatggtgacaaccgctgtgatcattagggataagtacgtgcgcaacgtcagctgcagcgtcaactag

SEQ ID NO: 180913 - DNA, 555 bp, synthetic construct
  misc_feature 1..555: note = Description of Artificial Sequence: Synthetic coding sequence
  source 1..555: mol_type = other DNA
atggagcccgccgccgccctgcacttcagcctgcccgccagcctgctgctacttctgctcctcctactgctgtccctctgcgccctcgtgagtggccttggctccaagccgttaattgagataaaggctcaggaagatggctccatctggctcgaatgtatctctggtggctggtatcctgagcctctgaccgtctggagagatccctacggggaagttgtccctgcactcaaggaagtcagcatcgcagacgctgatgggctgttcatggtcactacggctgtcattattcgggacaaatatgtgcgaaacgtgtcttgttcggtgaacaacactttgctcgggcaggagaaggagaccgtcatcttcattcctgaatcttttatgccaagcgctagtccgtggatggtggccttggccgttatcctcaccgccagcccttggatggtgagcatgactgtgattcttgccgtgttcatcatctttatggccgtgtcaatatgttgcattaaaaagttgcagcgcgaaaaaaaaattttatccggcgagaagtag

SEQ ID NO: 180914 - DNA, 720 bp, synthetic construct
  misc_feature 1..720: note = Description of Artificial Sequence: Synthetic coding sequence
  source 1..720: mol_type = other DNA
atggagcccgccgccgccctgcacttcagcctgcccgccagcctgcttctgctgctgctgttgctcttgctcagcctgtgcgcgctcgtaagtgcccagtttactgtggtagggcctgccaatccaattttggcaatggtgggcgagaacacaacattgcgctgccacctgtcccctgagaagaatgcggaagatatggaggtacggtggtttagatcccagttttctccagccgtgtttgtgtacaagggcggcagagaacggaccgaagaacagatggaagagtatcgcgggcggattacctttgtgagtaaggacatcaatagaggttctgtcgcactagtcattcacaatgtgactgcacaagaaaatggcatctatcgctgttacttccaagagggccgaagctatgacgaagccatcttgcgccttgtggtcgccggcctgggatctaagcccctgattgagataaaagcccaggaagacggttctatttggctggaatgtatttcaggcggatggtacccggaaccacttaccgtttggcgagacccgtacggcgaagtggtgccagccttgaaggaggtcagcatcgccgatgccgatgggctgtttatggtgactacagcagtcatcattcgggataaatatgtgcgaaacgtgagctgctccgtgaataataccctcctcggtcaggagaaggagaccgtgattttttag

SEQ ID NO: 180915 - DNA, 291 bp, synthetic construct
  misc_feature 1..291: note = Description of Artificial Sequence: Synthetic coding sequence
  source 1..291: mol_type = other DNA
atggagcccgccgccgccctgcacttcagcctgcccgccagcctgctcctgcttctcctcctcctgttgctgagtctttgtgcgttggtatctgcacagttcactgttgtgggacctgcgaacccaatcctggctatggtaggcgaaaacacgacattgaggtgtcatctaagccccgagaagaatgccgaggatatggaagtgagatggtttcgcagccagttttcccctgctgtgtttgtgtacaagggcggcagggagcggaccgaggagcagatggaggagtactag

SEQ ID NO: 180916 - DNA, 1542 bp, synthetic construct
  misc_feature 1..1542: note = Description of Artificial Sequence: Synthetic coding sequence
  source 1..1542: mol_type = other DNA
atgaagatggccagcttcctggccttcctgctgctgaacttccgggtgtgtctcctattacttcagctgcttatgccccattctgcccagttcagcgtgctgggacccagtggccctatcttggcaatggttggggaagacgccgacctcccctgccacctatttcctacgatgtccgcggaaacaatggaactaaaatgggtgagctcttctctccgccaagtcgtaaacgtgtatgccgatggaaaagaagtcgaggataggcagtccgcgccataccgaggaaggacttctatcctgagagatggaatcaccgccggcaaagccgcattaaggatccacaatgtgaccgccagcgacagtggaaaatatctttgttactttcaagacggcgacttttatgagaaagctttggtggaactgaaggtggccgccttgggctccgacctgcatgtagatgttaagggatataaggacggtggtatacatttggagtgccgctcaaccggctggtacccacagccccaaatccagtggagcaataataaaggggagaacattccaactgtggaggctcctgtagtcgctgatggcgtgggactttatgccgtggccgccagtgttatcatgaggggctccagtggagagggcgtctcatgcacaatcaggtcttctttgcttgggttagagaagaccgcctctatatctatcgccgacccgttttttaggagcgcccagcgctggatcgctgcgctagccggtaccctcccggtgctgttgttgttgctgggaggtgctggatactttctgtggcagcagcaggaagagaagaagacacagttccgaaagaagaaacgagaacaagagctaagggagatggcatggtcgacaatgaaacaagagcagtctactcgggttaagttgctcgaggaattgcggtggcggtcaatccaatatgcatcccgtggagagagacatagtgcgtataacgaatggaagaaagctcttttcaagccagccgatgtcattctcgacccaaagaccgccaatcctatcttgcttgtgagcgaggaccagaggagcgtgcagagagcaaaggaaccgcaggacctgcccgacaaccccgaacgatttaactggcactattgcgtgctcggctgcgagtccttcatttccggcagacactactgggaagttgaagtcggtgaccgcaaggaatggcatatcggagtctgtagcaaaaacgtacagcgtaagggatgggttaagatgacgcccgaaaacgggttttggaccatgggtctcactgacggtaacaagtaccggacgctgaccgaacctaggaccaacttaaaactccccaaacctcctaagaaagtcggagtctttctggactatgaaactggcgatatctcattctataatgcggtggatggcagccacatccacactttcttggacgtcagcttcagtgaggcactgtaccccgtcttccgaattctaacacttgagccaaccgccctaacgatttgtcccgcctag

SEQ ID NO: 180917 - DNA, 1386 bp, synthetic construct
  misc_feature 1..1386: note = Description of Artificial Sequence: Synthetic coding sequence
  source 1..1386: mol_type = other DNA
atgaagatggccagcttcctggccttcctgctgctgaacttccgggtttgcctcctgctgctgcagcttctcatgccccattcagcacagttctcggtcttaggtccaagcggaccaatcctcgctatggtgggagaggatgcggacctaccttgccatctgtttccaaccatgtccgccgagacgatggagctgaagtgggtgtcctcttccctgaggcaggtggtgaatgtctatgctgacggaaaggaagtggaggaccggcagtccgccccttatagggggagaacatctattttgcgcgacggaatcaccgcgggcaaggccgctctccggatccacaatgtcactgcatctgattccgggaaatacctgtgctacttccaggatggagacttttatgagaaagcgctagtggaactgaaagttgccgacggggtaggcctctatgctgtcgcagcctctgtgatcatgcgcggaagttcaggagagggtgttagttgcaccataaggtcttctcttcttggactggagaagacagctagtatctctatagccgatcccttcttccggtctgcccagcggtggattgccgcgctagcaggcacactgcccgtcttgctgctgttactcggaggagcaggatattttctgtggcagcagcaggaagagaagaaaacacaattcagaaaaaaaaagagagagcaggagctgcgggagatggcttggagtacaatgaagcaagaacagagcacccgggtcaaacttctggaagagctgaggtggcgaagcatccagtatgcatcccgtggcgagcgacacagtgcatacaatgagtggaaaaaggccctctttaagcccgccgatgtcatcctggaccccaaaactgcaaatcctattttactggtatccgaggatcagcgttctgtgcaacgggcaaaagaacctcaggacctccccgacaatcccgagaggttcaattggcactactgtgtgctgggttgtgagtcctttatcagcggacgccattactgggaagtggaggtgggtgatcgtaaagagtggcatattggggtttgcagtaaaaacgtacaaaggaaggggtgggtgaaaatgacccccgagaacggtttctggactatgggtctgacggatggcaacaaataccgcacattgacagaaccacggaccaatctgaagttgccaaaacccccaaaaaaggtgggggtcttcctggactatgaaacaggggacatttccttttataacgccgttgatggatcccacatccatacgttcctggacgtttctttttcagaggccctgtacccggtattcaggatactcaccttggagcccacagctctaacaatatgtccagcttag

SEQ ID NO: 180918 - DNA, 1137 bp, synthetic construct
  misc_feature 1..1137: note = Description of Artificial Sequence: Synthetic coding sequence
  source 1..1137: mol_type = other DNA
atgaagatggccagcttcctggccttcctgctgctgaacttccgggtttgtcttcttcttctgcagctccttatgcctcacagcgcccagttttcagtacttgggccgtccggacctatcctagccatggtgggggaggacgccgatctgccatgtcatctgttcccgactatgagcgccgaaaccatggagctgaagtgggtgagttcgagcctccggcaagtggtaaacgtgtacgccgatggaaaggaggtggaggaccggcaaagcgccccttaccgggggagaacctccatactgcgggacggtatcacagccggcaaggccgcactgcgaatccataacgttactgcatccgattcaggcaaatatctgtgttatttccaggatggcgacttctacgaaaaggccctcgtggagctcaaggtcgcagcgttaggtagtgatctccatgtggacgtgaagggctacaaagacggtggtatccatctggagtgcaggagcacaggatggtacccccagcctcagatccaatggtcgaataacaaaggcgagaacatccctacggttgaggctcccgtcgtggccgatggcgttggactgtacgccgtcgccgcaagcgtgattatgcgaggttccagtggtgagggcgtgtcttgcacaatcagatcctctctgctgggcctggaaaagacagcctcgatttcgattgcagacccttttttccgctccgctcagcggtggattgcggcactggctggaactctcccagtgcttttactcctgttggggggcgctggatactttctttggcagcaacaggaggagaagaagacgcagtttcgcaagaagaagagggagcaggagcttcgggagatggcctggtctaccatgaaacaggagcaaagcactagagttaaactgttagaagaactgcgttggcggtcaatacagtacgcatcccggggcgagcgtcactccgcgtacaacgagtggaagaaggccctctttaaacccggccccccaattggccagacacagcaacagacccggggtcaaggttcgccagtggccctcagtcaggagtcggctcagcgaacagactcttggggacccgaggagggaggtgagagttag

SEQ ID NO: 180919 - DNA, 132 bp, synthetic construct
  misc_feature 1..132: note = Description of Artificial Sequence: Synthetic coding sequence
  source 1..132: mol_type = other DNA
atgaagatggccagcttcctggccttcctgctgctgaacttccgggtttgtctgctactcctgcagctgctgatgcctcacagcgcacaattctctgttctcggaccctcaggcccaatcctggctatgtag

SEQ ID NO: 180920 - DNA, 360 bp, synthetic construct
  misc_feature 1..360: note = Description of Artificial Sequence: Synthetic coding sequence
  source 1..360: mol_type = other DNA
atgaagatggccagcttcctggccttcctgctgctgaacttccgggtctgtttgttacttctgcagcttctcatgccccactcagcacagttcagtgtgctcggcccctcgggacccatcctggccatggtgggcgaagatgcggacctgccttgtcatctttttcctactatgtctgcagagacaatggagcttaaatgggtgtctagtagtctccggcaggtggtcaatgtctatgctgacggcaaagaagttgaggatagacagagcgcgccctacagagggcgaaccagtattttgcgagacggtataactgcaggcaaggcagccctccgcatccacaacgtgacggcctcttag

SEQ ID NO: 180921 - DNA, 1059 bp, synthetic construct
  misc_feature 1..1059: note = Description of Artificial Sequence: Synthetic coding sequence
  source 1..1059: mol_type = other DNA
atgaagatggccagcttcctggccttcctgctgctgaacttccgggtgtgtcttctcctcctccaactgctgatgccacacagcgcgcagttttcagttttgggaccctccggtcccatcctggccatggtaggtgaagatgctgacttgccctgccacctgtttcctacaatgtctgctgaaactatggagcttaaatgggtgagcagttccttacgtcaagtggtgaacgtctatgccgatggcaaggaagtagaggacagacagagcgctccttatagaggacggacttcaatactgcgggacggaatcaccgcaggtaaggcagccctgcggattcacaatgtcactgcatctgatagcgggaaatatctgtgttattttcaagacggcgatttctacgaaaaggccctagtggaactgaaagttgcagctctcggcagcgatttacacgtggatgttaagggttacaaagatggcggaatccaccttgaatgccgatctacaggctggtacccccagccacagattcagtggtcaaataacaaaggagaaaatatcccaacagtcgaagctcctgttgtggccgatggcgttggactgtatgctgtggccgcgagtgtaatcatgaggggttcatccggagaaggcgtgtcctgcacaattcggagcagtctgctgggactcgagaagacagccagtatttccatagcggatcctttcttcagaagcgctcagcgctggatcgccgctctcgcaggaacgttaccggtactgcttttgctgctggggggagcagggtactttttgtggcagcagcaggaggagaagaagacgcagttcagaaagaagaagagagagcaagagctgagagaaatggcttggtctacaatgaaacaggaacagagtaccagggtaaaattgctcgaggaactgcggtggaggtcaatacagtacgccagccggggcgaaaggcatagcgcttataacgagtggaaaaaggcattgtttaaaccaggcgaggagatgctgcaaatgcgactgcacttcgtgaaatag

SEQ ID NO: 180922 - DNA, 279 bp, synthetic construct
  misc_feature 1..279: note = Description of Artificial Sequence: Synthetic coding sequence
  source 1..279: mol_type = other DNA
atgaagatggccagcttcctggccttcctgctgctgaacttccgggtgtgcctcttgttgctgcagctccttatgccacattccgcacagttttctgtgttaggtccatccgggccaattctggctatggtgggagaagatgcagatcttccctgtcacctctttccaaccatgtccgcagaaaccatggaactcaagtgggtgtcttccagcttgcgtcaggtcgtcaatgtgtacgcagacggcaaggaggtcgaggacaggcagtcggccccctag

SEQ ID NO: 180923 - DNA, 1005 bp, synthetic construct
  misc_feature 1..1005: note = Description of Artificial Sequence: Synthetic coding sequence
  source 1..1005: mol_type = other DNA
atgaagatggccagcagcctggccttcctgctgctgaacttccacgtttctctgctcctcgtgcagctgctgaccccttgcagcgctcagttctccgtcttgggaccctccggaccaatcctggcaatggtcggagaagatgcagacctcccctgtcatctttttcccaccatgtcagcagagaccatggaactgaagtgggtgtctagtagtctgcgacaggtggttaacgtatatgcagatggaaaagaagtcgaagatcgtcagtccgctccgtacagaggccgaacaagtatccttcgtgacggaatcacggcggggaaagctgcgctacgcatacacaatgtgactgcctcagattctggcaaatacctctgttattttcaagacggagatttctacgaaaaggccctggttgaactaaaagtggcagccttaggtagcaacctccacgtcgaagtcaaagggtatgaggatggcgggatacacctggagtgtcgctctacaggctggtatccccaacctcaaatacagtggagcaatgctaaaggggaaaacattccagcagtcgaagccccagttgtggccgatggggtcggcctgtacgaggtggccgcatctgtaataatgaggggcggtagcggagaaggggttagctgcatcattaggaactccctgctcggcctggaaaaaacggcatccatcagcatcgccgacccctttttcaggtcagcccagccgtggatcgctgcgctagctggcactcttcccatattgctcttgctgttggctggcgcatcttattttctatggaggcaacagaaggaaattaccgcgttgtcaagcgaaatcgaatctgaacaagagatgaaggagatgggatatgcagcaactgagagagagatcagcctcagggagtctcttcaagaagagttaaaaaggaagaagatacagtacctgactcgaggggaagagagcagttccgataccaacaagagtgcttag

SEQ ID NO: 180924 - DNA, 1005 bp, synthetic construct
  misc_feature 1..1005: note = Description of Artificial Sequence: Synthetic coding sequence
  source 1..1005: mol_type = other DNA
atgaagatggccagcagcctggccttcctgctgctgaacttccacgtgagtctgctcctggtgcagctacttacaccctgtagcgcccagttctctgttctcggcccatcaggcccaatcttggcaatggtcggtgaggatgcagatcttccttgtcatctatttccaacaatgtccgctgaaaccatggaattgaaatgggtttcttcgagtttgcgtcaagtggtgaacgtatacgcggatggaaaggaagttgaggaccgacaatctgcaccttatcgcggaaggactagcatcctgcgtgatggcataacggccggaaaagcagcactcaggatccataacgtgaccgcctctgatagtggaaagtacctctgctatttccaggacggtgatttctatgagaaggccttggtggagctcaaagtggccgccctaggcagtaatcttcatgttgaagtgaaaggttacgaggacggcggcattcatttagagtgcaggtccacgggttggtacccccagccccagattcaatggagtaacgcaaagggagaaaacatcccggcagtggaggcgcccgtggtcgccgacggggtgggcctttacgaggtggcggccagtgtgattatgcgaggaggctccggcgagggagtaagctgcattatccgaaattctttgctcgggctcgaaaagactgcatctatctcaattgcagatcccttttttcgatcagcccagccttggattgccgcattagcagggaccctccctattttgttgttgctactcgcaggagcatcttattttttgtggaggcagcagaaagagattactgcgctgagttccgagatcgagtccgaacaggaaatgaaggaaatggggtatgccgctacagaacgggagatttctcttagggaaagccttcaggaagagctaaaaagaaagaaaatccagtacctgacacgaggcgaggagagctcttccgacacgaataaatcagcctag

SEQ ID NO: 180925 - DNA, 936 bp, synthetic construct
  misc_feature 1..936: note = Description of Artificial Sequence: Synthetic coding sequence
  source 1..936: mol_type = other DNA
atgggcatcccccgggcccagttcagcgtgctgggccccagcggccctattctggcaatggtcggagaggatgcagatctgccatgccacctcttccctacaatgagtgccgagacaatggagctgaaatgggtgagtagctctctccgccaggtcgttaatgtctacgctgatggcaaggaggtcgaggacaggcagagtgccccgtaccgcggtcgcacctcaattctgagagatggcataaccgcgggaaaagctgctctccgaatacacaacgtcactgccagtgatagcgggaaatacctgtgttatttccaagatggagacttctacgaaaaggcgctggttgagttgaaagtcgccgcactcgggtccaacctgcacgttgaagtcaaaggctatgaggatggaggtatccacctggagtgtcggagcactggttggtacccacagccacagatccagtggagcaacgctaagggagaaaatattcccgcagttgaggctccagtggtcgccgacggcgtaggcctctatgaagttgccgcgtccgtcatcatgaggggcggaagtggagagggcgtgagttgtattatacggaatagcctgttgggcctggagaaaactgcctcaattagtattgctgatccatttttccgcagcgcccagccctggatcgctgccctggccggaacactccccatccttctattgctcctggctggggccagctacttcttatggaggcagcagaaggagataaccgcactctcatccgagattgaatctgaacaagaaatgaaagagatgggctacgccgcgaccgagagagagatatcactcagagaaagtctgcaggaggaactgaagcgtaagaagatccagtacctgacgcgtggcgaggagagcagttcagacacaaacaagtcagcatag

SEQ ID NO: 180926 - DNA, 1005 bp, synthetic construct
  misc_feature 1..1005: note = Description of Artificial Sequence: Synthetic coding sequence
  source 1..1005: mol_type = other DNA
atgaagatggccagcagcctggccttcctgctgctgaacttccacgtgagccttttgctcgtgcagcttctgactccttgtagcgctcagttctctgtactcggtcccagtggccctatcctggccatggtaggcgaagatgccgacctgccctgtcatctcttccccaccatgagcgcagagactatggagctgaaatgggtgagctcatcacttcggcaagtggtgaatgtttatgccgatggcaaagaagttgaagatcgacagagcgccccctaccgcggccggacctccatcctaagagacggcatcacggccggcaaggctgccttgcggatccataacgtcaccgcttccgactctggaaagtatctgtgttacttccaggatggggacttctacgaaaaagcccttgtcgagctcaaggtcgccgcactgggctccaatctgcacgtcgaggtgaagggctacgaagacggagggatccatctggagtgccgcagcactggatggtatccccagccccagatacaatggagcaacgccaaaggggaaaatattccagccgtggaggctccagtcgtggccgatggagtgggactatatgaggtcgctgcgagcgttataatgcgcggaggttccggggaaggcgtcagctgtattatcagaaattctttgctgggcctggaaaaaactgcctctatttctatcgctgacccattctttcgtagcgcccagccatggatcgccgcgctagcaggaaccctccctatcctgcttctgctactagcaggcgcaagctactttttatggcggcaacagaaggaaattacagccttgtctagcgaaatagagtcagagcaggaaatgaaggaaatggggtatgccgctacagaacgagagatttctctgcgcgagtccctgcaagaggagctgaagcggaaaaaaatccaatatctcacccgcggcgaggagtcctcatctgacactaacaaaagcgcttag

SEQ ID NO: 180927 - DNA, 879 bp, synthetic construct
  misc_feature 1..879: note = Description of Artificial Sequence: Synthetic coding sequence
  source 1..879: mol_type = other DNA
atggtgggcgaggacgccgacctgccctgccacctgttccccaccatgagtgcagaaaccatggaattaaaatgggtgtcgagctccctacgccaggttgtgaatgtgtacgcagacggcaaagaggtagaggaccggcagtctgccccttatagaggccgaaccagcattctgcgggacggcatcaccgccggtaaggccgctctgagaattcacaatgtgaccgcaagcgattctggcaaatacctctgttattttcaggatggtgacttttatgagaaagcgctggttgaactgaaagtggcggcactgggcagcaacttgcacgtcgaggtaaaggggtatgaagatggcggcatccacctagagtgccgcagtaccggatggtatcctcagccacagattcagtggtctaatgctaaaggggagaacatccctgctgtagaagccccagtggtggctgacggtgttgggttgtacgaggttgcggcttcagttataatgagaggcggcagcggcgaaggggtgtcctgtatcatacggaattctctacttggacttgagaagactgcgagtatttccatcgctgatccctttttccggagcgcgcaaccatggatagctgcccttgccgggacactgcctatcctcctcctcctgttagccggggcttcctactttctctggcgccagcaaaaggaaattacagcactctcttccgaaattgagtcagaacaagagatgaaggagatgggctacgcagccacggaacgggaaattagtctccgcgagtcactgcaggaggagctcaagaggaaaaagatccaatacttaacccgtggggaggaaagctcctcagatactaataaaagtgcatag

SEQ ID NO: 180928 - DNA, 1005 bp, synthetic construct
  misc_feature 1..1005: note = Description of Artificial Sequence: Synthetic coding sequence
  source 1..1005: mol_type = other DNA
atgaagatggccagcagcctggccttcctgctgctgaacttccacgtttccctcttactcgtccagctcttgactccatgtagcgcacagttttcggtcctcggaccatcaggccccatcttagctatggtcggagaggatgcagatctgccctgtcacctctttccgactatgtcagcagagacaatggagcttaagtgggtgtccagttctctccggcaggttgtgaatgtctatgccgatggtaaagaggttgaggaccgacagtctgccccatacaggggacgaacaagtatcctgagggatgggatcaccgctgggaaagcagctctgagaatccacaatgtgactgctagcgactcaggaaagtacctgtgttattttcaggacggtgacttttacgagaaggccctcgtggaactgaaagtagccgctttaggctcaaatttgcatgtggaagtcaaggggtatgaggatggtggaatccatctggaatgtagatccactggttggtaccctcagccacagattcagtggagcaatgctaaaggtgagaacatacccgctgtggaggcacctgttgtggccgatggtgttgggctttatgaggtcgccgcgagtgtgattatgcggggtggcagcggggaaggcgtgtcttgcatcatcagaaacagtctgcttggattggaaaaaacagccagcatttctattgccgaccccttctttcgtagcgctcagccatggatcgccgctctggccgggaccctgcccatcctgttgctgttgttggcaggtgccagctacttcctgtggcggcagcaaaaagaaattacggctctgtcttctgaaatcgaatcagaacaagaaatgaaagagatgggctatgccgcaacggaacgcgaaatctcccttcgggagagtctgcaggaagagctgaagcggaagaagatacagtacttaacgcgcggagaggaatccagctccgatacaaataagagcgcttag

SEQ ID NO: 180929 - DNA, 960 bp, synthetic construct
  misc_feature 1..960: note = Description of Artificial Sequence: Synthetic coding sequence
  source 1..960: mol_type = other DNA
atgaagatggccagcagcctggccttcctgctgctgaacttccacgtgtcattactcctcgtgcagctgctaacgccatgctcagcacaatttagcgtgttaggaccaagcggcccgattctggcaatggtgggcgaagacgctgatctgccatgtcaccttttcccaactatgtcagccgagaccatggaactcaagtgggtgagcagctcactccgccaggtagttaacgtgtacgctgacgggaaagaagtagaggaccggcaatcagccccttaccgtggacggacctctattctgcgtgacggcattactgctgggaaggccgctctgcgaatccacaatgtgaccgcttcagacagcgggaagtacttgtgctacttccaggatggcgatttctatgaaaaggccctggtggagttgaaggtcgccgctctgggatcaaatttacacgtggaagtaaaagggtatgaggatggcggcattcacctggaatgtcgatccacgggctggtatccgcagccccagatccagtggtccaatgccaagggtgaaaacatcccagccgtggaagcaccagtcgtggcggatggggtcggtctgtatgaggtggccgcctccgtaatcatgcgcggggggtcaggggaaggcgtcagctgcatcatccgcaacagcctgctggggttggagaagactgcatcaatttctatcgccgacccattttttcgatcagctcagccgtggatcgccgcactggccggaaccctgcctatcttgctgcttctcctggccggtgcctcttatttcttatggcggcagcagaaagagattacagcattatcttctgaaattgagagtgagcaggagatgaaggagatgggctacgccgccactgaaagggaaatttctctacgggagagcttacaggaggaactgaaacgtaagaaatccagcacctag

SEQ ID NO: 180930 - DNA, 1755 bp, synthetic construct
  misc_feature 1..1755: note = Description of Artificial Sequence: Synthetic coding sequence
  source 1..1755: mol_type = other DNA
atgaagatggccagcagcctggccttcctgctgctgaacttccacgtgtccctctttctggtgcaactgctgaccccatgtagcgcccagttctccgtgctgggtccatcaggcccaatccttgcgatggtcggtgaggacgccgacctgccatgtcatttattccctacaatgtcagccgaaactatggaactgcgctgggtgtcctcctcgctgcggcaggtggtgaacgtgtatgctgacgggaaagaggtggaggatcggcagtccgcaccctatcgcggcagaacaagtatcctgcgagatggaataactgccgggaaagccgcgctgaggattcacaacgtgactgcctctgacagtggcaaatacttatgctattttcaagacggggatttctacgaaaaggctctggtggagctgaaagtggctgctctcggttcggacttacacattgaagttaagggttatgaagacggcgggatccacttagagtgtcgcagtaccgggtggtatcctcagccgcagatcaaatggtcggacaccaagggcgagaacattcctgcagtggaggcgcctgtcgtcgccgacggagtaggtctctatgctgtggcggctagcgtcatcatgcggggatccagcgggggcggggtgtcctgcattatcagaaatagccttctgggactggaaaaaacggcgtccattagcatcgccgacccattttttagatctgcacagccatggatcgccgcacttgccgggacgctcccaatttctctcctgctcttggccggagcaagttacttcctttggcgacagcaaaaagagaagatcgctctgagccgcgagaccgaacgcgaaagggaaatgaaggagatggggtacgctgctacggagcaggagatctctttacgagagaaactgcaggaggagctcaagtggagaaagatccaatacatggcgaggggagagaagagtcttgcgtaccatgaatggaaaatggctctctttaaaccagccgacgtgatcctggacccagacacagccaatgccattttactggtctcagaggaccagaggtccgtgcagagagcagaagagccgagggatctgccagataacccggaacgcttcgagtggcgatattgtgtcctggggtgtgaaaatttcacgtctggccggcactactgggaggttgaggtgggcgacagaaaagagtggcatatcggagtctgcagtaagaacgtagagcgcaagaaaggctgggtgaagatgacgcctgaaaacggatattggacgatgggactcaccgatgggaacaaatacagggctcttactgagccaaggaccaatctgaagttgccagagcccccaaggaaggttggcatcttcctggactacgaaacgggcgaaatctcattctacaatgcgactgacggaagtcacatttacactttccctcacgcctcattcagcgaaccgctgtatccagtatttcggatcctgacgctggagcctacggcccttacgatatgcccaattcccaaggaggtggagtctagccccgatccggacctcgtgccagatcattccttggagaccccactcacacctggactggctaacgagagtggggaaccccaagccgaggtgacaagcctgctgctcccagctcacccaggggctgaggtgtctccaagcgcaaccacaaaccagaatcataaattgcaagcgcgaaccgaagcactgtattag

SEQ ID NO: 180931 - DNA, 1629 bp, synthetic construct
  misc_feature 1..1629: note = Description of Artificial Sequence: Synthetic coding sequence
  source 1..1629: mol_type = other DNA
atggtgggcgaggacgccgacctgccctgccacctgttccccaccatgagtgcggagaccatggaattacgatgggtatcaagttcattgaggcaggtagtcaatgtttacgctgatgggaaggaagtagaagacaggcagtcagccccttatagaggcaggacgagcatattgagagacggcataaccgccggcaaggctgcactcaggattcataatgttaccgcctcagacagcggcaagtatctgtgttactttcaggacggagacttttacgagaaggcgctggttgaactgaaggtggctgcccttgggagcgatctgcacatcgaagtcaagggttacgaagatggcggaatccaccttgaatgtcgatcaacaggatggtacccccagccgcaaatcaagtggtccgatactaagggggaaaacattcccgccgttgaggcgcctgtcgtagctgacggagtgggcctgtatgcggtggctgcctctgtgatcatgcgtgggtcctctggagggggagtgtcctgtatcatcagaaactcactcttgggcctcgagaaaactgcatcaatttcaatcgctgacccattctttcgctcggctcagccctggatagccgccttagcgggcaccctgcccataagtcttctcctgttagcgggggcgtcatactttctctggcgtcagcagaaagagaaaattgccttatcacgggaaactgaaagagagcgcgaaatgaaggagatgggctacgccgctaccgaacaagagattagcctaagggagaagctacaggaggaattaaagtggagaaaaattcaatatatggctagaggcgagaagtccttggcctaccatgaatggaaaatggccctgtttaaaccggccgatgtgatactggatccggacaccgcaaatgccatcttactcgtcagcgaagaccagcgatcagtccagcgcgctgaggaaccacgagacctaccagacaaccccgagcgttttgaatggcgatattgcgtgttgggttgcgagaatttcacttcaggacgccattactgggaagtcgaggtgggcgacagaaaagaatggcatattggcgtgtgttctaaaaacgttgagcgcaagaaaggatgggtgaagatgacgccagaaaacgggtattggaccatgggccttacagacgggaataagtatcgcgctctcaccgaaccaagaaccaatttgaagctgcccgaacccccaaggaaggtcggcatattcctggactacgaaacaggtgaaatatcattttataacgcaacagatgggagtcatatctatacctttccacatgcttccttcagtgagccactgtatcccgtgttcagaattttaacactcgagccaacggccctgactatttgtccgattcccaaggaggtggagagcagtcccgaccctgacctcgtcccagatcatagcctggaaacgcccctgacccctggtctggctaatgaaagtggtgaaccccaggccgaggtgacctcccttctgttaccagcccaccctggagccgaggtgagcccttcagccactactaatcagaaccataaactacaggccaggaccgaggcgctgtactag

SEQ ID NO: 180932 - DNA, 417 bp, synthetic construct
  misc_feature 1..417: note = Description of Artificial Sequence: Synthetic coding sequence
  source 1..417: mol_type = other DNA
atgaagatggccagcagcctggccttcctgctgctgaacttccacgttagtctgttcctggtacagctgctcactccgtgtagcgcccagttctccgttctgggaccaagcggcccgatactagccatggtaggggaagacgcagacctgccttgtcacttattccctacaatgagtgccgaaacaatggagttacgatgggtttcctcatccttgcggcaggtggttaatgtctatgcagatgggaaggaggtagaggacagacagagcgctccttaccgaggcaggacaagcatactgcgggacggtatcactgcaggcaaagcggcactgagaatccataacgttactgcttctgatagcggaaagtacctctgctacttccaggacggtgatttttacgaaaaggctctgtag

SEQ ID NO: 180933 - DNA, 717 bp, synthetic construct
  misc_feature 1..717: note = Description of Artificial Sequence: Synthetic coding sequence
  source 1..717: mol_type = other DNA
atgaagatggccagcagcctggccttcctgctgctgaacttccacgtctccctgtttctggtgcagctgctcacgccgtgttccgctcagtttagcgtcctgggaccctcaggccctatactggccatggtgggggaagatgccgatttgccatgccacctgtttccaaccatgtctgccgaaacgatggaattaaggtgggtgtcatcatcattaaggcaagtggtgaacgtgtatgcggatggtaaggaagtggaggacagacaatccgcaccatacaggggacggacctccattctccgtgatggcattacggccggtaaagcagccctgagaattcacaatgtgacggcctccgattctggaaaatacctctgttattttcaggatggggacttttatgaaaaggctctcgtggaacttaaggtagcagccctgggcagcgatctgcatatcgaggtgaaggggtatgaagacggggggatccatttggagtgtaggtcaacaggttggtatcctcaaccgcagatcaaatggagtgatactaagggcgaaaatatccccgcggtggaggcccctgtagttgcagacggggtgggactttacgccgtggcagcgtctgtcatcatgaggggaagcagcggcggcggcgtatcatgcatcatcaggaacagtttgttgggattagagaaaacagctagcatatcaatagcttag

SEQ ID NO: 180934 - DNA, 1368 bp, synthetic construct
  misc_feature 1..1368: note = Description of Artificial Sequence: Synthetic coding sequence
  source 1..1368: mol_type = other DNA
atggtggacttccccggctacaacctgagcggcgccgtggccagcttcttgttcatcctgctcacaatgaagcagtctgaagacttccgggtgattgggccggcccatccaatcctagccggcgtgggcgaggacgcactcttgacttgtcagctgcttcccaagcggacaaccatgcatgtggaagtccgctggtatagaagtgagcctagtacacccgttttcgttcacagggatggcgtagaagttaccgaaatgcaaatggaggagtatcgtggctgggtcgaatggatcgaaaacgggattgctaaaggtaacgtagcactgaaaatccacaacatccagccaagcgataacggtcagtactggtgccactttcaggatggaaattattgcggcgagactagcttgctactaaaggtggctggactcggctccgccccatctatacacatggagggtcccggagagtcaggagtgcagctggtttgcacggcccgcggatggttcccagagccccaggtctattgggaagacatccgcggagagaagctgttggccgtgtccgagcacagaattcaggacaaggatggtctgttctatgccgaagctaccctggtggtgagaaacgctagtgcagaatccgtctcttgcctagtacataatcccgtgttgacagaagagaaagggtctgtcatttcactgcccgagaagttgcagacagagcttgcctcgctcaaagtaaacgggccttcacagcctatccttgttagggtcggcgaagatatccagctgacgtgttacttgtctccaaaggcaaacgcccagtcaatggaggtccggtgggataggtctcatagatatccagccgtgcatgtctatatggacggggaccacgtcgcaggagagcagatggccgagtaccgcggaagaactgtacttgtgtccgacgccatcgacgagggtcgtctgacgctgcagatccttagcgccaggccttccgatgacgggcagtatcggtgtctgtttgaaaaagatgacgtgtaccaggaagcctcattagatttgaaagtggtgtcgttgggatccagtcctctcatcacagtggaggggcaggaagatggggagatgcagcccatgtgctcctcagacgggtggttcccgcaacctcatgtgccttggagagatatggaggggaagacaattccgagtagctcgcaggccctcacacaaggatcccacggattgttccacgttcaaactctgctgcgggttaccaatattagcgccgtggatgtcacctgttcaatctccatcccgtttctgggggaggagaagatcgcaactttttcactgagcggatggtag

SEQ ID NO: 180935 - DNA, 1167 bp, synthetic construct
  misc_feature 1..1167: note = Description of Artificial Sequence: Synthetic coding sequence
  source 1..1167: mol_type = other DNA
atggtggacttccccggctacaacctgagcggcgccgtggccagctttttatttatacttctgacgatgaagcaatccgaggatttccgagtgatcgggcccgcccaccctattcttgcaggggtgggagaggacgcgctgttgacttgccagctactgcctaagaggactaccatgcacgtcgaggtcagatggtaccgctccgaacccagcacaccggttttcgtgcacagggatggcgtcgaagtgaccgagatgcagatggaagagtatagaggctgggttgagtggatcgaaaatggcatagccaagggtaatgttgcactcaaaattcacaacattcaaccctcagacaacggacagtactggtgtcattttcaggatgggaattattgtggcgaaactagcttactgctaaaagtcgccgagaagctactggcggtcctgagcagcttgaaggtgaacggcccttcccaaccaatcttagtacgagtgggagaagatattcagctgacctgttacttatcgcctaaggctaacgcgcagagtatggaggttcggtgggatcggagccacagataccccgcagtgcacgtctacatggatggcgaccatgtagccggagagcagatggcggaatacagaggcaggaccgtgctggtcagtgacgccatcgacgagggaagactgaccttgcagatcctgagcgctcgtcccagcgacgacggtcaatacagatgtctgttcgagaaggatgacgtgtatcaggaagctagtctagacctcaaggtcgtgtctctggggtcttctccacttatcaccgtggagggtcaagaggatggagaaatgcagccaatgtgcagcagtgatggttggtttcctcagccacatgtcccgtggagagacatggaaggaaagaccattccctcaagtagccaggctttaacacaagggagccacggcctttttcacgtacaaacactgctgcgcgtcacaaacatctcagcagtcgatgtgacatgcagcatctccatcccatttctgggagaggagaagatcgcaacgttcagtctctccgagtcccgcatgacattcctatggaagactctgctggtatggggattactgctggccgttgctgtggggctgcccaggaagcgatcttag

SEQ ID NO: 180936 - DNA, 738 bp, synthetic construct
  misc_feature 1..738: note = Description of Artificial Sequence: Synthetic coding sequence
  source 1..738: mol_type = other DNA
atggtggacttccccggctacaacctgagcggcgccgtggccagcttccttttcatattactgaccatgaagcaaagcgaaaaattacagacggaattggcatctctcaaggtgaacgggccaagtcagcccatcttggttagagtaggtgaagacatccagcttacatgctacctctcaccgaaggccaacgcgcagagcatggaagttagatgggatcgtagccacaggtatcctgcagtccatgtgtatatggatggagatcacgttgcgggagaacagatggccgaatatcggggccgaactgttctggtcagcgatgctatcgacgaaggcagactcacactccagattctgtcagctcggcctagtgacgatggacagtacaggtgcttgtttgaaaaagatgacgtatatcaggaggcgtcattagacctaaaagtcgtttcactgggcagctccccactgataacagtggagggccaggaggatggagagatgcagccaatgtgctcctccgacggatggtttcctcagccccatgttccatggcgggatatggagggcaagactatcccgtcatcttctcaagccctgactcagggcagtcatggcctgttccacgtgcaaactctcctgcgcgtgaccaacatctcagcagtagatgtaacctgtagcattagtatacccttcctcggggaagaaaagattgccacattttctctatcaggatggtag

SEQ ID NO: 180937 - DNA, 327 bp, synthetic construct
  misc_feature 1..327: note = Description of Artificial Sequence: Synthetic coding sequence
  source 1..327: mol_type = other DNA
atggtggacttccccggctacaacctgagcggcgccgtggccagctttctgttcatactgctgaccatgaagcagtcagactttagagtgatcgggccggcacacccaattctggctggtgttggcgaagacgctctgcttacgtgtcagttattgcccaagcgcaccacaatgcacgtggaggtaaggtggtatagatccgaaccgtccacgcctgtcttcgtgcaccgggacggagtggaggtaaccgaaatgcagatggaggagtatcgcggctgggtagaatggattgagaacgggatcgctaaggggaacgtggctctttag

SEQ ID NO: 180938 - DNA, 780 bp, synthetic construct
  misc_feature 1..780: note = Description of Artificial Sequence: Synthetic coding sequence
  source 1..780: mol_type = other DNA
atggtggacttccccggctacaacctgagcggcgccgtggccagctttctctttatactgctcaccatgaagcagtcggaggatttcagagtgatcggaccagcccacccaattcttgcgggggtcggagaagacgccctccttacgtgtcagctgctcccaaaacgcactactatgcacgttgaagtccgctggtatagatcggagccttccacgcctgtgttcgtccatagggacggtgtcgaggtgactgaaatgcagatggaggagtatcgaggttgggtcgagtggatcgagaacggtattgcaaagggtaacgtagccctgaagatacataacatccaaccctcagataacggccagtactggtgtcacttccaggatgggaattactgtggggagacgtccctcctgcttaaggtagctgggctgggctccgccccatcaatacatatggaaggccccggtgaatcaggggtgcagttggtgtgtacggcacgaggctggttccccgaaccacaagtctactgggaggacatacgaggggagaagctcctcgcagtaagtgagcaccggatccaggacgaggacggactgttttatgcagaagcgactcttgtggtgagaaacgcttccgctgagagtgtttcctgcctggtgcacaatccagtgttaacagaagaaaaaggctcagtgatctccctgcccgaaaagctgcagaccgagctggggaaatacgaggttctagcacacacctgcgggggctcactatgtccttag

SEQ ID NO: 180939 - DNA, 780 bp, synthetic construct
  misc_feature 1..780: note = Description of Artificial Sequence: Synthetic coding sequence
  source 1..780: mol_type = other DNA
atggtggacttccccggctacaacctgagcggcgccgtggccagctttctgtttatccttctaaccatgaaacaatctgaagacttccgggtcataggtcctgctcatcccattcttgcaggagtgggggaggacgcccttctgacctgtcagttgcttcccaagagaacgactatgcatgtggaagtcaggtggtaccgcagcgaacccagtaccccagtcttcgtgcaccgtgacggggtggaagtgacagaaatgcaaatggaagagtaccgcgggtgggtggaatggatcgaaaacggcatagcgaagggtaacgtggccctgaaaatacacaatatacagccatccgataacggacagtactggtgccatttccaggacggcaattattgcggagaaacttccctgttgcttaaggttgcaggcctgggaagcgccccctccattcatatggagggcccaggtgaatcaggagtgcagctggtttgcacagcccggggttggtttcccgaaccccaggtctactgggaggacatccgtggcgagaaactgctcgctgtatcagagcatcgtattcaggacaaggatggcctgttctacgccgaggccactcttgtagtaagaaatgcttccgccgaatcagttagctgtctcgttcataaccccgtcctcacagaagagaaagggtcagtaattagcctccctgagaagcttcaaaccgagctgggcaagtacgaggtgttggcccacacgtgcggcgggagcctgtgcccctag

SEQ ID NO: 180940 - DNA, 636 bp, synthetic construct
  misc_feature 1..636: note = Description of Artificial Sequence: Synthetic coding sequence
  source 1..636: mol_type = other DNA
aaggccaacgcccagagcatggaggtgcggtgggaccggagccacagatatccagcagtccatgtttacatggacggggaccatgtggcaggcgaacagatggccgagtatagagggaggacagtgctggtgagtgatgctattgacgagggacgtctcaccctgcaaattttgagtgctagacccagcgacgatggccagtatagatgcttatttgagaaggatgacgtctaccaggaagcctccctggatttgaaggtagtcagtttaggttcatcaccactcataaccgtagaaggtcaggaggacggggagatgcagcccatgtgttcaagcgatggttggttccctcaaccgcatgttccatggcgcgacatggagggaaaaacaatcccctcaagcagccaggcccttacccagggcagccatggcctatttcatgttcagacccttctgcgcgtcactaacatttccgccgtggatgtgacttgcagtatatcaatcccatttttaggcgaagaaaaaattgccaccttttccctctccgagtcgagaatgacatttctctggaaaacgctgttggtctggggcctgcttctggccgtcgccgtagggttacctaggaaacgcagttag

SEQ ID NO: 180941 - DNA, 780 bp, synthetic construct
  misc_feature 1..780: note = Description of Artificial Sequence: Synthetic coding sequence
  source 1..780: mol_type = other DNA
atggtggacttccccggctacaacctgagcggcgccgtggccagctttctgttcattttactcactatgaagcagtccgaagacttcagagtcataggccccgctcatccaatcctggcgggggtgggggaagacgcgttactcacttgccagctactgcccaagcgaaccacaatgcacgtggaagtgcggtggtacagatctgagccctcgacccctgtgttcgtgcaccgcgacggcgtagaggtaacagaaatgcagatggaagaatacagaggatgggtcgagtggattgagaacggcatcgcaaaaggcaacgtggctctcaagatacacaacatacagccatcagataatgggcagtactggtgtcactttcaggacggtaattattgcggcgagacaagccttttgctcaaggtggccggcctaggctctgcaccaagtatacacatggaaggccccggtgaatccggcgtgcagctggtgtgcactgccagggggtggtttcccgagccacaggtttattgggaagacatccggggcgagaaattgcttgccgtgtccgaacacaggatccaggacaaggatggactgttctatgcggaggcaactctcgtggtgagaaatgcttccgccgaatcggtatcctgcctcgttcataaccctgttttgactgaagagaagggctccgtgataagcttgcccgagaagctgcagactgagcttggcaaatatgaagtcctcgctcatacgtgtggtggttccctttgcccatag

SEQ ID NO: 180942 - DNA, 327 bp, synthetic construct
  misc_feature 1..327: note = Description of Artificial Sequence: Synthetic coding sequence
  source 1..327: mol_type = other DNA
atggtggacttccccggctacaacctgagcggcgccgtggccagcttcttgttcatcctgcttactatgaagcaaagcgacttccgcgttattggtccagcccatccaatccttgctggtgtcggtgaggacgctctgctgacttgccagttattgccgaaacgtacaacaatgcacgttgaagtccggtggtacaggtctgagccctcgacgcccgtgttcgtgcacagagacggcgtggaggtgaccgaaatgcaaatggaagaataccgcgggtgggtcgagtggatcgaaaatgggattgctaaaggtaacgtggccctgtag

SEQ ID NO: 180943 - DNA, 327 bp, synthetic construct
  misc_feature 1..327: note = Description of Artificial Sequence: Synthetic coding sequence
  source 1..327: mol_type = other DNA
atggtggacttccccggctacaacctgagcggcgccgtggccagcttcctcttcattttgctgacaatgaagcagtccgattttcgcgtaataggaccagctcatccaatactagctggtgtcggtgaggatgccctgctcacctgccaactgctccctaagcgcaccactatgcacgtggaggtgaggtggtacaggtctgagcctagcactcccgtattcgtccaccgcgacggcgtggaagtgactgaaatgcagatggaagagtataggggctgggttgagtggatcgaaaacggtatcgcaaaagggaacgtcgcattatag

SEQ ID NO: 180944 - DNA, 636 bp, synthetic construct
  misc_feature 1..636: note = Description of Artificial Sequence: Synthetic coding sequence
  source 1..636: mol_type = other DNA
aaggccaacgcccagagcatggaggtgcggtgggaccggagccacagatacccagccgtacacgtatatatggacggcgaccatgtagccggcgaacagatggccgagtataggggtagaaccgtgctcgtatctgacgccattgatgaaggcaggttaaccctgcagattctaagtgcaaggccatcagacgatggccagtatagatgtctgtttgagaaagacgacgtctatcaagaggcctccctcgatttaaaagtcgtcgggctgggtagctcccctctcatcacagtggaagggcaggaggatggtgagatgcagcctatgtgttcctccgacggatggttcccgcagccccacgtgccttggcgtgacatggaagggaaaacaataccttccagctcccaggctctgacacagggcagtcacggattgttccacgtccagacccttctgcgtgtaacaaacatttctgcggtagacgtgacctgctcaatcagcattccattcttgggcgaggagaaaatcgcaacttttagcctctctgagagccgcatgactttcttgtggaaaacgttactggtatggggcctgctgctggccgttgccgtgggcctgcctcgaaagaggagctag

SEQ ID NO: 180945 - DNA, 816 bp, synthetic construct
  misc_feature 1..816: note = Description of Artificial Sequence: Synthetic coding sequence
  source 1..816: mol_type = other DNA
atggtggacttccccggctacaacctgagcggcgccgtggccagctttctctttattttgctgacaatgaaacagtctgaagatttccgcgttatcggtcctgcccatcctatcctggccggcgtgggggaagacgccctgctcacatgccaactgctgcccaaacggactactatgcacgtggaggtgcggtggtataggtccgagccctcaacccctgtttttgttcaccgcgacggagtggaagtgaccgaaatgcaaatggaagagtatcgcggttgggtggagtggattgaaaatggaatcgcaaaggggaacgtggctctgaagatacacaatatccagcccagcgataacggtcagtactggtgccactttcaggacggtaactattgtggagagacaagccttctgctgaaagtggcagcagttttgcgagacgacattatcgcaagtctcaaggtcaatggaccaagccagccaatactggtgcgagtcggagaggacattcaattgacatgctacctgagccccaaagccaatgctcagtctatggaggtgaggtgggaccgaagtcacaggtatcccgctgtgcacgtgtacatggatggagaccatgtcgcaggtgagcagatggccgagtataggggtaggacagtgcttgtctctgacgctattgatgagggccgacttacacttcagatcctttcagccagaccaagtgacgacggtcagtatagatgcttattcgaaaaggacgacgtgtatcaggaagctagtttagacctgaaggtcgtgtgggtgctgccacattag

SEQ ID NO: 180946 - DNA, 327 bp, synthetic construct
  misc_feature 1..327: note = Description of Artificial Sequence: Synthetic coding sequence
  source 1..327: mol_type = other DNA
atggtggacttccccggctacaacctgagcggcgccgtggccagcttcctatttatactcctaactatgaaacagtcagacttccgagtcattggtcccgctcatccaatcttagctggagtcggcgaagatgctctgctgacatgccagttgctcccaaaacgcacaaccatgcacgttgaagtgagatggtaccgtagcgaacccagtacccccgtttttgtgcatagagatggggtggaagttacagagatgcagatggaggagtaccgcgggtgggtagagtggatcgagaacggcatcgctaagggcaacgttgctctgtag

SEQ ID NO: 180947 - DNA, 780 bp, synthetic construct
  misc_feature 1..780: note = Description of Artificial Sequence: Synthetic coding sequence
  source 1..780: mol_type = other DNA
atggtggacttccccggctacaacctgagcggcgccgtggccagcttcctattcatcctcttgacaatgaagcaatccgaggactttagggtaattggaccagcccacccaatcctagccggtgtaggcgaggatgcacttttgacgtgccaattactccccaaacggactaccatgcacgtcgaagtgagatggtatcggtccgagccctcaactcccgtgttcgtgcacagggacggtgtggaagtgaccgagatgcaaatggaagagtatcgagggtgggttgagtggatagagaacggcatcgccaaaggcaacgtggccttgaaaatccacaacatacagccatccgataacggacaatactggtgccattttcaagacgggaactactgcggcgaaacttctcttctgctaaaagtcgcaggcctcggctcagcgccttccatccacatggagggcccgggggagtcaggcgtacagctagtttgcacagccagagggtggtttcctgaaccacaggtctactgggaggatatccgtggagagaaacttctagcagtgtcggaacatagaatccaggacgaggacggactgttctatgcagaagcaacattggttgttagaaatgccagcgccgagtccgtctcttgccttgtccacaaccctgtgctgacagaagagaaaggtagcgtgattagcttacctgagaaactacaaaccgagctggggaagtacgaagtgctggcccacacctgtggggggtccttgtgtccctag

SEQ ID NO: 180948 - DNA, 327 bp, synthetic construct
  misc_feature 1..327: note = Description of Artificial Sequence: Synthetic coding sequence
  source 1..327: mol_type = other DNA
atggtggacttccccggctacaacctgagcggcgccgtggccagctttctcttcattttgttgactatgaagcaaagtgactttcgggtgatcggtcctgctcatcccatactggcaggggttggcgaagacgccttgttaacatgccaattgcttcctaagcgcaccaccatgcacgtggaggttaggtggtaccgctccgaaccatccacccccgtgtttgtgcaccgggatggagtagaagtaaccgagatgcagatggaggaatataggggttgggtcgagtggattgagaacggaatcgcgaagggcaacgtcgccctatag

SEQ ID NO: 180949 - DNA, 636 bp, synthetic construct
  misc_feature 1..636: note = Description of Artificial Sequence: Synthetic coding sequence
  source 1..636: mol_type = other DNA
aaggccaacgcccagagcatggaggtgcggtgggaccggagccacaggtaccccgccgtgcacgtctatatggatggagaccacgttgccggagaacagatggctgagtatcgggggcgcacagtcctggtgagtgatgctatcgatgagggtagactgacgctgcagatccttagtgccagaccttcagacgacggccaataccggtgcctgtttgaaaaggacgacgtctaccaggaggcttcactcgacctgaaagtggtgggactcggttccagtccgctgataactgtggaaggccaggaggatggagaaatgcagcccatgtgctcatccgatggatggtttccccaaccacatgtgccttggcgggacatggaaggcaagaccattccttctagctctcaggcactgacgcagggctcacacggcttgttccacgtgcagacccttttgagggtgaccaatatcagcgccgtggatgttacctgttctatctctatccccttcttgggcgaagagaagattgccacgttctccctttccgaaagccggatgacattcctgtggaagacactcttggtgtggggactgttgctggcagtggccgtgggactccccagaaagcggtcatag

SEQ ID NO: 180950 - DNA, 780 bp, synthetic construct
  misc_feature 1..780: note = Description of Artificial Sequence: Synthetic coding sequence
  source 1..780: mol_type = other DNA
atggtggacttccccggctacaacctgagcggcgccgtggccagcttcctattcattttactgacgatgaaacagagtgaggacttccgtgttatagggcctgcgcaccctattctggcaggggtgggggaagacgcgctgctgacatgtcagttgctgcccaaacgaactactatgcacgttgaggtacggtggtacagatccgagcccagtaccccagtctttgttcatcgcgacggtgtggaggtgaccgaaatgcagatggaagagtatagaggctgggtagaatggatcgagaacggcattgcaaagggcaacgtggctctaaagatccacaatattcagccctctgataacggccagtactggtgccacttccaggacggcaactattgcggggagactagcctgctcctcaaagttgccggacttggtagcgctcccagcatccatatggagggacccggcgagagtggagtgcagctggtgtgcacagcccgcggttggtttccagaaccccaagtctactgggaggatatccgtggggaaaagctcttggccgtgtcggagcacagaatccaagatgaagacggcctgttttacgcagaagccactcttgttgttagaaatgcctccgctgaatcggttagctgcctggtccataatccagtgctaactgaagaaaagggctcggtcatctctttacctgagaagctacagaccgagctgggtaaatacgaggtgttagctcatacttgtggaggctccttgtgcccatag

SEQ ID NO: 180951 - DNA, 780 bp, synthetic construct
  misc_feature 1..780: note = Description of Artificial Sequence: Synthetic coding sequence
  source 1..780: mol_type = other DNA
atggtggacttccccggctacaacctgagcggcgccgtggccagcttcctgttcattctgctgacaatgaagcagagtgaggatttcagggtaatcggccctgcacatcccatcctggctggcgtcggcgaagacgcattgcttacatgccaactccttcctaagagaaccaccatgcatgtggaggtcaggtggtatcggtcagagccatcaacgcccgtttttgtccacagggacggggtcgaggttaccgagatgcaaatggaggagtataggggctgggtcgaatggattgagaatgggatcgcaaagggtaatgttgctctcaaaattcacaacatccaaccctccgataatggacaatactggtgccatttccaggatgggaattattgcggcgaaacaagtctcctgctcaaggtcgcgggactagggtctgctcccagtatacacatggaaggccccggagagagcggcgtccagctggtgtgcaccgcccgcgggtggttcccagagccccaggtctactgggaggacatccgcggagaaaaattactggcggtgtctgaacaccgaatacaggacaaagatggcttgttctacgctgaagcaaccctggtggttaggaacgcatccgctgagagcgtcagttgccttgtgcataatcctgtgctgaccgaagaaaaggggtcggtgatcagtttacctgagaaactccagactgagttaggcaagtacgaggttctggctcacacctgtgggggctcactgtgcccgtag

SEQ ID NO: 180952 - DNA, 327 bp, synthetic construct
  misc_feature 1..327: note = Description of Artificial Sequence: Synthetic coding sequence
  source 1..327: mol_type = other DNA
atggtggacttccccggctacaacctgagcggcgccgtggccagcttcctatttattctgttaactatgaagcagagcgactttcgggtcatcggaccagcccatccgattctggccggtgtgggcgaggacgcactcctcacatgccagctgttacctaagcggacgaccatgcatgtagaggtgagatggtatcgctctgagccaagtacacccgtatttgtacatcgtgacggagtggaggtaacagaaatgcagatggaggaataccgggggtgggtggaatggattgagaacggcatagcgaagggtaatgtagctctatag

SEQ ID NO: 180953 - DNA, 780 bp, synthetic construct
  misc_feature 1..780: note = Description of Artificial Sequence: Synthetic coding sequence
  source 1..780: mol_type = other DNA
atggtggacttccccggctacaacctgagcggcgccgtggccagcttcctttttatcctcctgactatgaaacaatccgaagatttccgcgttattggcccagcccatcccattctagccggggttggggaggatgccctgctaacttgtcagctgctcccaaaacgcactaccatgcacgtcgaggtgaggtggtatagatccgagccaagcacacctgtcttcgttcatcgggacggagtggaagtgacagagatgcaaatggaagagtatcgcgggtgggtcgaatggatcgagaatggcattgcaaaaggcaacgtggctctgaagatccacaatatccaacccagtgacaacggacagtactggtgccacttccaggacggcaactattgtggcgagacaagccttctgttgaaggtagctgggttaggctcggcgccctcaatccacatggaaggaccaggcgagagcggagtgcagttagtctgtactgcccggggctggttccctgagccccaagtgtattgggaggatattcgaggtgaaaagctgttggccgtgtctgaacataggattcaagataaggacggcctgttctacgctgaagctactttggttgttagaaatgcttcggccgagtcggtctcttgccttgtccacaacccagtactgaccgaagagaagggcagcgttatctcccttcctgaaaagctgcaaactgagttgggaaaatatgaggtgttagcacatacctgtggaggctccctgtgcccttag

SEQ ID NO: 180954 - DNA, 636 bp, synthetic construct
  misc_feature 1..636: note = Description of Artificial Sequence: Synthetic coding sequence
  source 1..636: mol_type = other DNA
aaggccaacgcccagagcatggaggtgcggtgggaccggagccaccgttatccagctgttcacgtgtatatggacggcgaccacgtggctggtgaacagatggccgagtaccgtggacggactgtactcgtcagtgacgctatcgatgagggtcgactgactctgcagatcctgtcagcacggccttctgacgacggacaatatcgctgtctatttgaaaaggacgatgtatatcaagaggcaagcctggacctaaaggtggttggtctgggcagctcacccctgattactgtcgagggacaggaggatggtgagatgcaacctatgtgcagttcagatggctggttcccacagccacacgtgccttggagagatatggagggaaaaaccatccctagttcgtcgcaggcgctgacccaggggtcccatggcttattccacgtgcagaccttgctgcgcgttaccaacatcagtgctgtcgatgtgacatgctcaatctctattccttttctgggggaagagaagattgccacttttagtctgtccgaaagtaggatgacatttctttggaaaacactgttagtgtgggggttgctactggcagtggctgtggggctgccacgcaaaagatcttag

SEQ ID NO: 180955 - DNA, 636 bp, synthetic construct
  misc_feature 1..636: note = Description of Artificial Sequence: Synthetic coding sequence
  source 1..636: mol_type = other DNA
aaggccaacgcccagagcatggaggtgcggtgggaccggagccacaggtatcccgctgtgcacgtctacatggatggggatcacgtcgcgggggagcaaatggcagaatatagaggccggacagtgttggtgtcagacgctatcgatgagggcaggctaacacttcagatattatcggccaggccatcggatgatggccagtaccggtgcctgttcgaaaaggacgacgtataccaggaagcgtcccttgacttgaaagttgttagtctcggatccagtcccctcatcactgtagagggccaggaagacggcgagatgcagccaatgtgcagcagcgacggatggttcccccagcctcatgtgccatggagagacatggagggtaaaacaattcccagctctagccaggcgctaacacagggcagccacggcctctttcacgttcagacgttgttgcgcgtaaccaacatatcagccgtggacgtaacttgcagtattagcattccctttctgggggaagaaaaaatcgctactttctccctaagtgagtctaggatgacctttctttggaagaccttgcttgtatggggtctccttttggctgtggcggtcggcctcccccgaaagcgatcatag

SEQ ID NO: 180956 - DNA, 636 bp, synthetic construct
  misc_feature 1..636: note = Description of Artificial Sequence: Synthetic coding sequence
  source 1..636: mol_type = other DNA
aaggccaacgcccagagcatggaggtgcggtgggaccggagccaccgttatccagctgtgcatgtctacatggatggcgatcacgtggcaggagaacaaatggccgaataccgaggacgaaccgtgctcgtatctgatgctatcgatgagggacggctgacactccagatcctctccgccagaccttccgacgacggacagtatcgttgcctcttcgaaaaggacgacgtctaccaggaagcttcgttggatctaaaggtggtcagtctcgggtcctcccccctgataactgtggagggtcaagaggacggtgaaatgcagccaatgtgtagtagcgacggctggtttccccaaccacacgtaccatggagggacatggaaggaaaaacaatcccttctagttcccaagcactgacgcaggggtcccacggactcttccatgtccagacactactgagggtgacaaacataagcgccgtggacgttacatgcagtattagcatcccgtttctcggggaggaaaagatagccaccttttcgctgtctgagtcccggatgacctttttgtggaaaacactgctggtgtggggcctactgctcgccgtcgccgtgggactgccaaggaaacgaagctag

SEQ ID NO: 180957 - DNA, 327 bp, synthetic construct
  misc_feature 1..327: note = Description of Artificial Sequence: Synthetic coding sequence
  source 1..327: mol_type = other DNA
atggtggacttccccggctacaacctgagcggcgccgtggccagctttctgtttatcctgttgaccatgaaacagagtgattttagagttatcggcccagcacaccctatcctggccggcgttggtgaggacgccctcctcacatgtcagctgctaccaaagagaaccaccatgcacgtggaagtgcgatggtatcggtccgagccttcaaccccagtgtttgtgcatcgagacggcgtcgaagtgaccgagatgcagatggaggagtataggggttgggtcgagtggatcgaaaacggcatcgctaaaggcaacgtggccctgtag

SEQ ID NO: 180958 - DNA, 636 bp, synthetic construct
  misc_feature 1..636: note = Description of Artificial Sequence: Synthetic coding sequence
  source 1..636: mol_type = other DNA
aaggccaacgcccagagcatggaggtgcggtgggaccggagccacaggtatcccgctgtacatgtgtatatggacggcgaccacgttgccggcgaacaaatggctgagtaccgaggccgtactgtgcttgtcagtgatgctatagacgaaggccgactaaccctgcagattttgagtgccagaccgagcgatgatggacagtacaggtgtctctttgaaaaggacgatgtctaccaggaagcgagcttagatttaaaggtggtgtcactaggctcaagccctctcatcaccgttgaaggccaggaggacggggaaatgcaacctatgtgcagttcggatgggtggtttccacaaccacacgttccatggcgagatatggagggcaagacgattcccagctcatcccaggcgttgacacagggaagccacggtctgtttcacgtgcagaccctgcttagagttactaacatctcagcggtggacgtgacatgctctatttccatcccgttccttggcgaagagaaaatcgctactttctcgctgtctgaatcccggatgactttcttgtggaaaaccctcctggtctggggtctgctgctggcggttgccgttgggctcccacgcaagcgctcgtag

SEQ ID NO: 180959 - DNA, 1449 bp, synthetic construct
  misc_feature 1..1449: note = Description of Artificial Sequence: Synthetic coding sequence
  source 1..1449: mol_type = other DNA
atggtggacttccccggctacaacctgagcggcgccgtggccagctttctgttcattcttttgaccatgaagcaaagtgaggatttcagggtgattggtccagctcaccctatattggccggagtgggcgaggacgcccttttgacctgccagttactgcccaaaagaaccactatgcatgtcgaggttcgctggtatcgctcagagccatctacacccgtcttcgtacaccgggatggagtggaagttaccgaaatgcagatggaagaatatcgcggctgggtggagtggatcgaaaacggcatcgcgaagggtaatgtcgcgctgaaaatacataatatccagccgagtgataatggacagtactggtgccattttcaagacgggaactactgcggagaaacatcactgctgctaaaggtggctggcctaggcagcgctcctagcatccacatggaggggcccggagagtccggggtgcagcttgtttgtacagctagggggtggtttccagagccccaagtgtactgggaggacattcgaggcgaaaaacttctggccgtgtcggagcaccgaatccaggataaagacgggctcttttatgccgaggcaacattagtggtcaggaatgcctcggcagagagtgtgtcatgtctggtgcacaatcctgtgctcaccgaagagaagggttccgtcatcagcctccctgagaaactgcagaccgaactggcatccttaaaagttaatggcccctcgcagccgattctcgttcgtgttggtgaggacattcagttgacttgttatctgagtcccaaagccaatgcccagtctatggaggtacgatgggataggtctcaccggtatcctgccgtccatgtttatatggatggggaccacgtggctggcgaacagatggctgaataccgaggaagaactgttctagtcagcgacgcaatcgatgaaggaagacttacgctccagattttgagcgccagaccctcagacgacggtcagtacaggtgccttttcgagaaggacgacgtctatcaggaggcaagtctcgacttgaaggttgtcagcctcgggagttcaccactgatcacagtggagggtcaggaggacggcgaaatgcagccaatgtgttcgtctgacggctggtttccacagcctcacgtgccttggcgggatatggagggcaagaccataccttccagttctcaagccctgacccagggctctcacggtctctttcacgtccagacccttcttagagtcacaaatatctccgctgtggatgtaacctgtagcatctctattccttttctgggggaggaaaaaattgccacgttctccttgtctgagtccagaatgaccttcctttggaagacccttctggtgtggggcctgctgctggctgtggctgtggggctccccagaaagcgctcatag

SEQ ID NO: 180960 - DNA, 738 bp, synthetic construct
  misc_feature 1..738: note = Description of Artificial Sequence: Synthetic coding sequence
  source 1..738: mol_type = other DNA
atggtggacttccccggctacaacctgagcggcgccgtggccagctttctttttatcctgctgacaatgaaacagagcgaccgtctggatacccctaaggcctcactgaaagttaacgggccaagccagccaattcttgttcgagtcggcgaggacatacagctgacttgctatctgtccccaaaggcaaacgcccagtcaatggaggttaggtgggacagaagccatcgctaccccgctgtccatgtgtacatggacggcgaccatgtcgccggcgagcagatggccgaataccggggaaggacggtcctagtgagcgatgctatcgatgagggccgccttacactgcaaatactttcagcgcgcccgagtgacgacggccaatatagatgcctttttgaaaaagatgatgtgtatcaagaggctagtttagacttgaaggttgtgtcgctgggaagttcacccctgatcactgtcgaaggccaggaggatggtgaaatgcagcccatgtgttcttcagatggatggttcccacagccacacgtgccctggcgggacatggaagggaaaaccattccatctagttcccaggcactaacgcaaggctcgcacgggcttttccacgtacagaccttactgcgtgtgacaaacatctccgcggtcgatgtaacttgttctatctctattccctttttgggagaagaaaagatcgctaccttctcgctgagcggctggtag

SEQ ID NO: 180961 - DNA, 537 bp, synthetic construct
  misc_feature 1..537: note = Description of Artificial Sequence: Synthetic coding sequence
  source 1..537: mol_type = other DNA
atggaggtgcggtgggaccggagccaccggtaccccgccgtgcacgtgtacatggacggtgaccacgtggctggcgagcagatggccgagtacagaggccgcactgtcctagtgtccgatgctatcgacgagggtagactcacactgcaaattttgtctgctagaccctcagatgatggccagtatcgctgcctgtttgaaaaagacgatgtataccaggaggcctcactcgacctgaaggtggtgtctctgggtagctcccctctgataactgtcgaaggtcaggaggatggagagatgcaaccgatgtgttcttccgacgggtggtttcctcagccccacgttccttggagagatatggagggcaaaactatcccttcttcctctcaggcactgacccagggcagccatggtttgtttcacgtgcaaacactgcttcgagttacaaatattagcgccgtagatgtgacttgttcaattagcataccttttcttggggaggaaaaaattgccaccttctccctgagcggctggtag

SEQ ID NO: 180962 - DNA, 1167 bp, synthetic construct
  misc_feature 1..1167: note = Description of Artificial Sequence: Synthetic coding sequence
  source 1..1167: mol_type = other DNA
atggtggacttccccggctacaacctgagcggcgccgtggccagctttcttttcattctgctcacaatgaagcagtccgaggactttcgcgttatcggcccagcccacccgattttagcaggagtcggagaggatgccttgctgacgtgtcagctgctgcctaagcggaccacgatgcatgtagaagtacgatggtaccgttctgaaccaagcacgcccgtttttgtccaccgagacggggtggaggtgaccgaaatgcaaatggaagaatacaggggatgggtcgaatggattgaaaatggaattgccaaaggtaatgtggccttgaagatccacaatattcaaccaagcgataacggtcagtattggtgccattttcaggacgggaattactgtggggaaacatctctacttctgaaggtggctgagaagctgcttgccgtcctgtcttctttgaaagtgaatgggccttcccagcctatcctcgtaagggttggcgaagacattcagttaacttgttatctcagtcccaaggccaatgcacaatcaatggaagtgcggtgggatcgctcacaccgctatccagctgttcatgtttacatggatggtgatcacgtggccggcgagcaaatggcagagtacagaggcagaaccgttctggtcagcgatgccattgacgaaggtaggctgaccttacagattctgtctgcgaggccttcagacgatggccagtacagatgtctttttgagaaggatgacgtgtaccaggaagcatctttggacttgaaggtagtgagcctagggagctctccactgattaccgttgagggccaggaggacggcgaaatgcagccgatgtgcagctccgatggctggttcccacagccacacgtcccatggcgcgatatggaagggaaaacaatcccaagcagttctcaggcccttactcagggctcacatgggttattccacgtccaaactctcttgagggttactaatatctctgccgtggatgtgacttgttccatcagtatacccttcctcggcgaggagaagatagctaccttttctctatccgaaagtcgcatgacatttctctggaagaccttgctggtttgggggctgctgctcgctgtcgccgtaggactcccccggaaacggagctag

SEQ ID NO: 180963 - DNA, 1167 bp, synthetic construct
  misc_feature 1..1167: note = Description of Artificial Sequence: Synthetic coding sequence
  source 1..1167: mol_type = other DNA
atggtggacttccccggctacaacctgagcggcgccgtggccagcttcctctttatccttctgactatgaagcagagcgaggatttccgggtcatcgggcctgcccatcctatcctcgcaggggtgggtgaggatgctctgttgacgtgccagttacttcctaagaggactacaatgcatgtggaggtaagatggtatagaagtgaaccatcaactcctgtcttcgtgcatagggatggagtggaagtgacagagatgcaaatggaagagtacagaggctgggtagagtggatcgaaaacggtatagccaaaggaaacgttgctctgaaaatccataacattcaaccaagcgataatgggcagtactggtgccactttcaggatggcaactactgcggtgaaactagcctgctgcttaaagtggctgagaagctcctcgcagttctctccagcttgaaggtcaacggcccatctcagcccatactcgtgagggtcggcgaagatattcaattaacatgctacctatcccccaaggcgaatgctcagagcatggaagtgaggtgggataggtcgcacagatatccagcagtgcacgtttatatggatggagatcacgttgcgggggagcaaatggctgaataccggggccgcactgtgttagtgtccgacgcaatcgatgaggggaggctaacattacagattctctccgctaggccctcagatgatggacagtataggtgcttgttcgaaaaagatgacgtgtaccaggaagcttccctggacctgaaagttgtcggactcggatcttcaccgctgatcacggtcgaagggcaagaggatggagagatgcagccgatgtgctcatccgatggttggttccctcagccacatgtgccatggcgggatatggaaggcaagaccatccctagttccagtcaagccctcacccaagggtcccatggactcttccatgtgcagaccctcttaagagttaccaatatttcagccgtagatgtgacatgttcaatctccattccctttctgggggaggagaagattgctacattctcactgtccgagagtcgtatgaccttcttgtggaaaacccttctcgtgtggggtctcttgctggccgtggctgtcggactgccgaggaagcggagctag

SEQ ID NO: 180964 - DNA, 1167 bp, synthetic construct
  misc_feature 1..1167: note = Description of Artificial Sequence: Synthetic coding sequence
  source 1..1167: mol_type = other DNA
atggtggacttccccggctacaacctgagcggcgccgtggccagcttcctctttattcttctgactatgaagcaatccgaagatttccgggtcataggacccgctcaccctatcctggcaggagttggcgaagacgcactgctcacttgccaattgttacccaagcgcacgactatgcacgtggaggtccggtggtatcggtcggagcccagcacccctgtgttcgtgcacagggatggcgtggaggtaacggaaatgcagatggaagaataccgcggttgggtggaatggattgagaacggcatcgctaagggcaatgtggccctgaagatccataacatccagccctctgacaacggccagtattggtgccatttccaggatggcaattattgcggcgagaccagtctgttacttaaggttgcagaaaaattgctcgcagtgctgtccagtttgaaagtgaacgggccctctcaacccatcttagtcagagtcggggaagatattcagctgacttgctacctgagtcccaaagcaaacgcacagtcgatggaggtgcggtgggacaggagccaccggtaccctgctgtccacgtttacatggacggcgatcatgtggctggcgaacagatggccgagtaccggggcaggactgtgctggtctcggacgccattgatgaaggtcggctcacacttcagatcctttctgcgcgaccttccgacgacggccagtatcgctgcctctttgagaaagacgacgtgtaccaggaggccagcctggacctcaaagtggtgtccctgggcagtagtcctctgatcacagtagagggccaggaagatggcgaaatgcagccaatgtgcagcagcgatggatggttcccgcagcctcatgtcccctggagggacatggaagggaagacaattccgtcatcttcgcaggcccttacacaaggctcccatggcctgtttcatgttcagacactcctgagggtgaccaatattagcgctgtcgacgttacatgcagcattagcatcccgtttctgggcgaggaaaagatcgcaacattctcgttgagtgagagccggatgacctttttatggaaaaccctgctcgtgtggggattgctattggcagtagccgtcggcctccccaggaaaagatcatag

SEQ ID NO: 180965 - DNA, 738 bp, synthetic construct
  misc_feature 1..738: note = Description of Artificial Sequence: Synthetic coding sequence
  source 1..738: mol_type = other DNA
atggtggacttccccggctacaacctgagcggcgccgtggccagcttcttattcattttacttaccatgaaacagtctgaccgcctggacactccaaaagcatctttaaaagtaaacggaccaagtcagcccatcctcgtacgagtcggggaggacatccagttaacatgttacctgtcccccaaagcgaatgcccagtccatggaggtgaggtgggaccgctctcaccggtaccctgcagtgcacgtgtacatggacggtgatcatgtggccggtgaacagatggccgagtacagaggcagaaccgtccttgtatcagacgccattgacgagggccgactgaccctgcagattctcagcgctcgcccaagcgacgatggccagtatagatgcctgtttgaaaaggacgacgtataccaggaagcctccctcgatctcaaagttgtggggctgggatctagtccactgatcacagttgagggccaggaggatggcgaaatgcagccgatgtgcagttcagatgggtggtttccccagccacacgtgccgtggcgggacatggagggaaaaactatcccaagtagctctcaggccctgacccagggttcacatggcctgtttcacgtacagacactgttgagagtgacaaatatctcagccgtggacgtgacatgtagcattagtattccttttctgggggaggaaaaaatagcaactttcagtctttccggatggtag

SEQ ID NO: 180966 - DNA, 738 bp, synthetic construct
  misc_feature 1..738: note = Description of Artificial Sequence: Synthetic coding sequence
  source 1..738: mol_type = other DNA
atggtggacttccccggctacaacctgagcggcgccgtggccagcttcctgttcattttactcacaatgaagcagtccgatagattggacactcctaaggcaagcttaaaggtcaacggaccaagccagccaattcttgtccgggttggggaagatattcaactgacttgctatctctctccaaaagctaatgctcagagtatggaggtaaggtgggatcgctcgcatcgctaccccgctgttcatgtctatatggatggcgaccacgtcgctggagagcagatggccgagtaccggggacggactgtcctcgttagtgacgccattgatgaaggtcggttgacgcttcagatcttgagcgctaggccatctgatgacggacagtacaggtgcttgttcgagaaggacgacgtctaccaggaggcctctttggacttaaaagttgtttcgctcgggtctagccccctcattacagtagaggggcaggaggacggcgagatgcagcctatgtgttcctcagacggttggtttcctcagccccacgttccatggagagacatggaaggtaagacgatcccttcctcctcacaggccctgactcaaggaagccatgggctttttcacgtgcaaaccctgttaagggtcacaaacatttccgctgtcgacgtcacctgcagcattagcatacccttcttaggagaagaaaaaatcgcaacattctctctgtcaggttggtag

SEQ ID NO: 180967 - DNA, 1167 bp, synthetic construct
  misc_feature 1..1167: note = Description of Artificial Sequence: Synthetic coding sequence
  source 1..1167: mol_type = other DNA
atggtggacttccccggctacaacctgagcggcgccgtggccagcttcctgttcattctcctgacaatgaaacaatccgaagattttagggtgatcgggcccgctcacccaatactagctggcgttggcgaggacgcacttttgacctgccaattgctcccaaaacgaacgaccatgcacgtggaggttcgttggtatagaagtgaacccagtacgcccgtcttcgtccacagagacggcgtggaggtgactgagatgcaaatggaagaatatcggggctgggtggagtggatcgaaaatggaatagcgaaagggaacgttgccctcaaaatccacaacattcagccgtctgacaatggccagtattggtgtcatttccaggatggcaattattgtggcgagacaagtctcttgctcaaagtggctgagaagctgctggctgtattgtctagcctcaaagtaaatggcccttcccaacccattctcgtgagggtcggcgaggacatccagttgacttgttacctatcacccaaggcaaacgcccagtccatggaagtgcgctgggacagatcacatcgataccccgccgtgcacgtctatatggacggcgatcacgtcgctggggagcagatggctgagtatcgtggcaggactgttctggtgtctgacgcgattgacgagggccgcttaacattgcagatcctttcggctaggcctagcgacgatgggcagtacagatgtctgtttgagaaagacgatgtgtaccaggaagcgtcactcgatctgaaggtggtttctttggggtcctctcctcttatcacggtggaggggcaggaggatggcgagatgcagcctatgtgtagctcagacggctggttcccacagccccacgttccttggcgtgatatggaagggaagaccatcccctccagctctcaggctctgacccagggctcacatggactgttccatgtgcagaccctcctgagagttaccaatatatccgccgtggacgtaacatgctcaatttcaattccctttctgggcgaggagaaaatcgctaccttcagcctttctgagagcaggatgaccttcttatggaaaacactgctcgtttggggactcctcctggcagtggccgttggcttacccagaaagaggtcttag

SEQ ID NO: 180968 - DNA, 816 bp, synthetic construct
  misc_feature 1..816: note = Description of Artificial Sequence: Synthetic coding sequence
  source 1..816: mol_type = other DNA
atggtggacttccccggctacaacctgagcggcgccgtggccagctttctgttcattctgctgaccatgaagcagtcggaagacttcagggtgattggcccagcccatcctatcctggccggcgtgggcgaagacgcactactgacatgccagctccttcccaaacgtacaactatgcatgtggaggtgagatggtatcgcagtgagccctctacacctgttttcgtgcatcgggatggggtggaggttactgaaatgcagatggaggagtatcggggctgggtggagtggatcgagaacggcattgctaaaggaaacgttgcgctaaagattcataacattcagccctccgataacggccagtactggtgccatttccaagatggcaattactgcggcgaaaccagtctgcttctgaaagtggcagctgtgctaagagatgatatcattgctagcctcaaagtgaacggaccttcccagcccatcctcgtgcgggtgggggaggatatccaactgacctgttatctttccccgaaggcaaatgcacagtcgatggaagttaggtgggataggtctcatagatatcctgccgtccacgtttacatggacggtgaccatgttgccggggaacaaatggcagaatatcgaggccgaacagtgctggtatcagacgccatagacgaagggaggctcacactccagattctgagcgcgagacccagcgatgacggtcaatataggtgcctgtttgaaaaggacgatgtataccaagaagcttcgctagatctcaaggttgtgtgggtgcttcctcactag

SEQ ID NO: 180969 - DNA, 738 bp, synthetic construct
  misc_feature 1..738: note = Description of Artificial Sequence: Synthetic coding sequence
  source 1..738: mol_type = other DNA
atggtggacttccccggctacaacctgagcggcgccgtggccagcttcttgttcatactgctaaccatgaagcagagcgagaaattgcagactgaactggcttccttgaaagttaatgggccttctcaaccaattcttgtgcgagtgggcgaggatatacaactgacctgttatttgtccccaaaagccaatgcccagagcatggaggtgcggtgggatagatctcaccgttaccctgccgtgcacgtgtacatggatggggaccacgtcgctggagaacaaatggcagaatatcgcgggagaaccgtgctcgtgagcgacgccattgacgaaggcaggctgacgctgcagatactgtcagcccgaccctccgacgacggacaatatcgatgtctcttcgagaaagatgacgtctatcaggaagctagtctggacctcaaagtagttggactgggaagcagtccccttattaccgttgagggacaagaggatggggaaatgcagcctatgtgctcgagtgacggttggttccctcaaccccatgttccttggcgggatatggagggcaaaaccataccttccagctctcaagctcttactcagggcagccacggcctcttccacgtccaaacgctcctgcgcgttacaaatattagcgccgttgatgttacctgttctatctccattccatttctgggcgaagagaaaatagcaaccttctcgttatccggctggtag

SEQ ID NO: 180970 - DNA, 537 bp, synthetic construct
  misc_feature 1..537: note = Description of Artificial Sequence: Synthetic coding sequence
  source 1..537: mol_type = other DNA
atggaggtgcggtgggaccggagccaccggtaccccgccgtgcacgtctatatggacggagatcatgttgctggggagcagatggccgagtaccgaggccggactgtattggtcagcgacgctatcgacgagggtcggctcactctacagatcctgtctgcccggccgtccgacgatggtcagtaccgttgcctcttcgagaaagatgatgtatatcaagaagccagcctggacctgaaggtggtcgggcttggcagttcacctctgatcacggtcgaaggccaagaagacggggaaatgcagcccatgtgtagtagcgacggctggtttccacaacctcacgtgccgtggagagatatggagggaaagaccataccatcgtcttctcaagccttgacacagggcagccacgggttgtttcacgttcaaactctgcttagggtgaccaacatttccgccgtcgatgtgacttgtagcatatccatccctttcctgggtgaggagaaaattgccacattctctctgtctgggtggtag

SEQ ID NO: 180971 - DNA, 738 bp, synthetic construct
  misc_feature 1..738: note = Description of Artificial Sequence: Synthetic coding sequence
  source 1..738: mol_type = other DNA
atggtggacttccccggctacaacctgagcggcgccgtggccagcttcctctttatcttgctcacgatgaaacagtccgatcgactcgacactcctaaggctagtctgaaggtcaacggtccttcccagccaatattggtgcgcgtgggtgaggacattcagttaacatgctacctttctcctaaagcaaacgcccagagtatggaagtgagatgggaccgtagccaccgatacccagccgtgcacgtgtatatggacggagaccatgtggccggcgaacagatggccgagtatagaggacgcactgtccttgtttcggatgctatcgacgagggcagactcacgctccagatactttccgcacggccctcagacgatggtcaatacaggtgcctctttgagaaagacgatgtttaccaggaggctagcctggatctgaaagtggttagtctggggagctcccccctcattactgtggaaggtcaggaagacggtgagatgcagccgatgtgctccagtgacgggtggtttccgcagccccatgtgccatggcgcgatatggagggcaaaaccatcccgagttcttctcaggctctgacgcaaggcagccacggtctgtttcatgtgcagactctgttacgggttactaatatctcagctgtcgatgtgacgtgcagcatcagtatcccctttttgggcgaggaaaaaattgcaactttctctctcagcgggtggtag

SEQ ID NO: 180972 - DNA, 1368 bp, synthetic construct
  misc_feature 1..1368: note = Description of Artificial Sequence: Synthetic coding sequence
  source 1..1368: mol_type = other DNA
atggtggacttccccggctacaacctgagcggcgccgtggccagcttcctattcatcctgctgacaatgaaacagtcagaggactttcgggttatagggccggctcaccctattctcgcgggtgtgggagaggacgcactcttaacctgccaactcctgccaaagcggacaacgatgcacgtagaggttcgttggtatagatccgagccatcgactcctgtctttgtccatagagatggtgtggaggtgactgagatgcaaatggaagaatacagagggtgggtggagtggattgagaacggcatcgcaaaaggtaacgtggcgctgaaaattcataatatacagcccagtgacaacggacagtattggtgccatttccaagatggcaactactgtggagagacttcccttttactaaaagtggccggtctgggtagtgctcccagcatacacatggaaggtcccggcgaatccggagtgcaacttgtttgtacagcccgaggctggtttccagaacctcaagtatattgggaggatatccgaggagaaaagctgcttgctgtgtctgaacacagaatccaggacgaagatgggctgttttatgctgaagctacccttgtcgttcgtaatgcgtctgcagaaagcgtctcctgcctggtgcataacccggtcttgactgaagagaaaggcagtgtcatctccctgccagaaaagctgcaaactgaactggcaagcctcaaggtgaatggaccatctcaacccatcctcgtccgggtcggtgaggatatacagttaacctgctacctctctccgaaggctaatgcccaatccatggaagtgcgctgggatcggtctcatcgctatccagcagtgcacgtgtacatggatggtgaccacgtggcgggagagcaaatggccgagtaccgcgggcggaccgtgctcgtgagcgatgctattgatgagggtcggttaactctgcagatactgtcagctcggccctcagacgatggacagtaccggtgcctgttcgaaaaagatgacgtctaccaggaggcgtccctggacctgaaagtcgttgggctggggagttcacctctgattacagttgaggggcaggaagacggggaaatgcagccgatgtgcagcagcgacggctggttcccccagccacatgtgccctggagggacatggaaggcaagaccatcccctcctcctcgcaggccctcacccaaggatcgcatgggctgtttcacgtccaaacactgctgcgggtgactaacatcagcgctgtggacgtgacatgcagcattagtataccctttcttggtgaagaaaaaatcgctacattcagcctatcaggatggtag

SEQ ID NO: 180973 - DNA, 816 bp, synthetic construct
  misc_feature 1..816: note = Description of Artificial Sequence: Synthetic coding sequence
  source 1..816: mol_type = other DNA
atggtggacttccccggctacaacctgagcggcgccgtggccagctttctgtttattctgctaacgatgaagcagtccgaagatttccgggttattggtcctgcgcacccaattcttgcaggcgtgggagaagacgccttactgacgtgtcagctgttgcctaaacgaaccaccatgcacgtagaggttcgctggtatcgaagtgagcccagtactcctgtgttcgttcatcgagacggcgtggaagtgaccgaaatgcagatggaggaatacaggggctgggtggaatggattgagaatggcatcgctaaagggaatgttgctcttaaaattcacaacattcagcctagcgacaatggtcagtattggtgtcactttcaggatggcaactactgcggcgaaacatctctgttgctcaaggtcgccgctgtcctgagagacgatatcatcgcctccctgaaggttaatgggcccagtcagcccatactggtcagggtcggagaagatatacagcttacatgctatttgagccccaaggccaacgctcagagtatggaagtcagatgggacaggtcccatcgctatccagctgtgcacgtgtacatggatggggatcatgtagcgggggaacagatggcagagtacagagggcgtaccgtcctcgtatccgacgctatcgatgaaggtcgcctgacactgcagatcctgtcagctagaccaagcgacgatgggcagtaccggtgcctattcgaaaaagacgacgtgtaccaagaggcttcattagatttaaaagtggtctgggtgctgcctcattag

SEQ ID NO: 180974 - DNA, 816 bp, synthetic construct
  misc_feature 1..816: note = Description of Artificial Sequence: Synthetic coding sequence
  source 1..816: mol_type = other DNA
atggtggacttccccggctacaacctgagcggcgccgtggccagctttttgttcatccttctgaccatgaaacagtcggaagattttcgcgtgatcggccctgctcacccgattcttgctggtgtcggagaggatgctctgcttacttgccagctcctgcccaaacggacaactatgcatgttgaagtgcggtggtatcggtctgaacctagcacacctgtcttcgtgcacagggacggtgtggaggttactgagatgcaaatggaggagtaccggggatgggtggaatggatcgagaacggaatcgccaaagggaatgtggctttgaaaatccataacatccaaccctctgataacggccaatactggtgtcatttccaagacggcaattattgcggcgagacctcccttcttctcaaagtcgctgctgttctgcgggacgacatcatcgctagcctgaaggtgaacggcccgtcacagcccattctcgttcgagtcggggaggatatccagctgacatgctatctttcccctaaggcaaatgcccagtccatggaggtgagatgggaccggtcccatagatatccagccgtacatgtctacatggacggcgaccacgtggccggtgagcaaatggcggaataccgggggagaactgtcctagtgagcgacgctatcgacgagggaagacttacgctgcaaatcttatcggcaagacccagtgatgacggacagtatagatgtttgtttgagaaagatgacgtgtatcaagaggcatcgctggatttgaaagtcgtgtgggtactgccccattag

SEQ ID NO: 180975 - DNA, 738 bp, synthetic construct
  misc_feature 1..738: note = Description of Artificial Sequence: Synthetic coding sequence
  source 1..738: mol_type = other DNA
atggtggacttccccggctacaacctgagcggcgccgtggccagctttctctttattcttttaacgatgaagcagtccgaccggttggacactccgaaagcatcactgaaggtgaatggcccaagtcagcctattctggtgcgggtgggtgaggatatacaactgacatgttatctgtctcctaaggcgaatgcacagtcaatggaggtgcggtgggaccgtagccaccgctatcctgcagttcacgtatatatggacggcgatcacgtcgccggggagcagatggcggagtatcgtgggagaactgtgttagtgtcagatgcgatcgacgagggacggctgacccttcagatcctgtctgctaggccttctgatgatggtcagtataggtgcctctttgaaaaagatgacgtttatcaggaggccagtcttgacctgaaagtcgtgtctctgggttcgagcccactgattacagtagagggtcaggaagatggagagatgcaacctatgtgtagctccgacgggtggtttcctcagccccacgtcccttggagggatatggaaggaaagactatcccctcgtcatcccaggctcttacacaggggtcccacggcttatttcatgtccagacgttgttacgcgtgaccaacataagcgcagttgacgtgacttgttccatctcaatcccctttcttggggaggaaaaaattgccacgttctccctgtccggctggtag

SEQ ID NO: 180976 - DNA, 816 bp, synthetic construct
  misc_feature 1..816: note = Description of Artificial Sequence: Synthetic coding sequence
  source 1..816: mol_type = other DNA
atggtggacttccccggctacaacctgagcggcgccgtggccagctttttgttcattctcctgactatgaagcagagcgaagactttagggtgattgggcccgcacacccaatactcgctggcgtaggcgaggacgcgctgctgacatgtcaactcttgcccaagcgcaccacaatgcacgtggaagtgagatggtacaggtccgagccttctacaccagttttcgtgcaccgggacggggttgaagtaaccgaaatgcaaatggaagagtatagaggttgggtagagtggatagaaaacggcattgccaagggcaatgtcgcactgaaaattcacaacatccagccatcggataacgggcagtactggtgccatttccaagacggaaattattgcggtgagaccagtctcctgctgaaggtggcagccgtcctgcgcgacgatattatcgccagtctcaaagtgaacgggccctctcagcccatactggtacgggtcggtgaggacatccagctgacctgctacttgtctccaaaggctaatgcccagtctatggaggtccgatgggaccgctcccatcggtatcccgcggtccatgtatatatggacggggaccacgtagccggcgagcaaatggcggagtacagaggccggacagtgctggtttctgacgcaatagatgaggggcgcctcaccctgcagatcctctcggcaaggccctccgacgatggtcagtataggtgcctgttcgaaaaagatgatgtttaccaggaggcctcgctggaccttaaggttgtgtgggtcttaccgcattag

SEQ ID NO: 180977 - DNA, 738 bp, synthetic construct
  misc_feature 1..738: note = Description of Artificial Sequence: Synthetic coding sequence
  source 1..738: mol_type = other DNA
atggtggacttccccggctacaacctgagcggcgccgtggccagctttttgtttatcttattaaccatgaagcagtccgaccgccttgacaccccaaaggcctccctgaaggtgaacggccccagccagcccatccttgtgagggtgggcgaggacatccagctgacatgctacctctcacccaaggcgaatgcgcagagtatggaagtgaggtgggatcgaagtcaccgatacccggctgtacacgtgtacatggacggagaccacgtggcaggcgaacagatggctgaatatcgcggtcgaaccgtactggtttctgatgccatagacgagggaagactgacgctgcagattctgtccgcccggcccagcgacgacggccaatatcgatgtctttttgaaaaagacgatgtttatcaggaggcttcactggatttgaaggtggtaggccttggctcttcccccttgattacagttgaggggcaggaggatggcgaaatgcagcctatgtgctcttccgacggatggttccctcagccccacgtgccctggcgcgatatggagggcaagactataccttcatcttcccaagctcttacccagggaagccacgggcttttccatgttcaaacccttctccgggtgactaatatcagtgccgtggacgttacctgtagtatctctattcccttccttggcgaagagaaaattgctactttttcactgagcggatggtag

SEQ ID NO: 180978 - DNA, 738 bp, synthetic construct
  misc_feature 1..738: note = Description of Artificial Sequence: Synthetic coding sequence
  source 1..738: mol_type = other DNA
atggtggacttccccggctacaacctgagcggcgccgtggccagcttcctgtttatcctgctcaccatgaagcagtccgacagactagacactcctaaggcatccttaaaagtcaacggcccaagccagcccatcttggtgagggtcggagaggatatacaactgacatgttatctctccccaaaagctaacgcgcagtctatggaggttcggtgggatcgctcccatcggtaccctgccgtccatgtgtatatggatggggatcacgtggcaggcgaacaaatggccgaatatcgcggccgaacagtcctagtatccgacgcgattgatgaagggagactgaccttgcagatcctgtccgcacgcccctctgacgatggccagtaccgctgtctctttgagaaggacgacgtgtaccaggaagcttctttggacctcaaggtggtgagccttggctcatctccactaattaccgtagagggacaggaggacggggaaatgcaacccatgtgttctagcgatggatggtttccacagcctcatgtgccctggcgagatatggagggaaaaaccattcctagttcttcccaggccttaacacagggttcccacggcttatttcatgtccagacactgctccgcgtcaccaacatatcggctgtcgacgtaacctgcagtatcagcataccatttctcggggaggaaaagatcgccactttctcactcagcggatggtag

SEQ ID NO: 180979 - DNA, 1368 bp, synthetic construct
  misc_feature 1..1368: note = Description of Artificial Sequence: Synthetic coding sequence
  source 1..1368: mol_type = other DNA
atggtggacttccccggctacaacctgagcggcgccgtggccagctttctttttatattgctaaccatgaagcagtcagaagacttccgcgtcattggtcccgcacacccgattttagccggtgtcggagaggatgctctactgacgtgccagctgctgccaaagcgaaccactatgcatgtggaagtgaggtggtaccgttcagagccatctactcctgtgtttgttcacagggatggcgtggaagtcacagaaatgcagatggaggagtacagagggtgggtggagtggatcgaaaacggtatcgccaaggggaacgtagccctaaagatccacaacatacaacctagcgacaatggccagtactggtgccatttccaagatggaaactactgcggcgaaacctcacttctcctgaaagtcgctggcctgggctctgctcctagcatccatatggaggggcctggcgaatcgggtgtgcagctggtctgtactgcccgtgggtggtttccagagcctcaggtgtattgggaagacatcaggggggagaaactactagccgtgtctgagcaccggatccaggacaaggacgggctcttttatgccgaggcaacactggtagtaagaaatgcaagcgctgagtccgtgtcctgtctcgtgcacaacccagttctgactgaggagaagggctcagtgatctctcttcccgaaaagcttcaaacagagctcgcatctctgaaagttaacggacctagtcagcctattcttgtacgcgtgggagaggatattcagcttacatgctacttgtcccccaaagctaacgcccagagtatggaagtgcgttgggataggagtcatcgctatccagccgtccacgtctacatggacggggatcatgtggccggggagcagatggcggagtatcgcggccgcactgtgctcgtgagtgatgccatagatgagggtcggctcactctgcagattttgtcagccaggccaagcgatgatggtcaataccgttgtctgttcgagaaagatgatgtataccaggaggccagtctggatctcaaggtcgtgtctcttggttcaagtcccctgattaccgtagaggggcaagaggacggagagatgcagccaatgtgctcatccgatgggtggtttccacagcctcacgtaccctggcgagacatggagggtaagaccatcccgtcttccagtcaggccttgacgcaagggtcccatggactgttccacgtccagaccctgctacgagtaactaatatctcggcagttgacgtgacctgctcaatcagcatacccttcctaggagaggagaagatagccaccttttccctgagtgggtggtag

SEQ ID NO: 180980 - DNA, 1368 bp, synthetic construct
  misc_feature 1..1368: note = Description of Artificial Sequence: Synthetic coding sequence
  source 1..1368: mol_type = other DNA
atggtggacttccccggctacaacctgagcggcgccgtggccagcttcctctttatcctgctgactatgaagcagtccgaggattttcgagtgatagggcccgcgcatcctatcctagccggagtgggcgaagacgctctgttaacatgccaacttctgccaaaaagaacaaccatgcacgtagaagtaagatggtaccgctcagaacctagcacccccgtgtttgtccatcgggatggtgtggaggtgacagaaatgcaaatggaggaatataggggatgggtcgaatggatcgagaacgggatcgcaaaggggaacgtcgcactcaaaattcacaatattcagccgtccgataacggacagtattggtgtcactttcaggacggaaattactgtggcgaaacgagcctgctcttgaaagtggctggcctggggagtgccccgtcaatccatatggaaggtcctggtgagagtggtgtgcaactagtttgtacagctcgggggtggttccccgagccacaggtgtactgggaggatatcaggggcgagaagttgctggcagtgtcagaacaccggatccaagataaagatggcttgttttacgcggaggccacacttgtggtgcgcaacgcaagtgccgaatctgtgtcctgtctggtccacaatccagtactgactgaggagaaaggcagtgtaatatctctgccggaaaaattgcagacagaattggccagcctgaaggtgaacgggccttctcagcctattctcgtgcgggtcggagaggatatccagctgacttgctatctatctcccaaagccaatgcccagagtatggaagttagatgggacaggtcgcaccggtatcctgctgtgcacgtctatatggatggcgaccatgtggcaggcgagcagatggccgagtatcgaggacggaccgtattggttagcgatgcgatcgatgaaggtaggctgacactccaaatcctgtccgcccgaccatcagatgacggacagtataggtgtctcttcgagaaggacgacgtgtatcaggaagcatctctcgatctgaaggtggtatccctgggatccagcccgttaatcacggtggaggggcaggaggacggcgagatgcagcctatgtgtagtagcgatggctggtttccccagccccacgtgccttggcgcgacatggaaggcaaaaccattccttcttcttctcaggctctcacccaaggcagccatggtctgttccatgtccagactctgctcagagtaacgaatatttctgccgtcgatgtgacctgttctatttcaatcccctttctgggcgaggaaaaaatcgcaacattcagtctcagcggatggtag

SEQ ID NO: 180981 - DNA, 537 bp, synthetic construct
  misc_feature 1..537: note = Description of Artificial Sequence: Synthetic coding sequence
  source 1..537: mol_type = other DNA
atggaggtgcggtgggaccggagccaccggtaccccgccgtgcacgtgtacatggacggagatcacgtagctggcgagcagatggccgaatatcgcggccggaccgtgttggtgtccgacgctatcgacgaaggaagactgacactacaaatcctgtctgcccggccttccgacgacggtcagtatagatgccttttcgagaaggacgacgtctaccaagaggcgagtctggacctgaaggttgtgtctcttggaagttcgcccctcatcacagttgagggacaggaggacggtgagatgcagcccatgtgtagctctgatggttggtttccacaaccccacgtgccttggcgtgacatggagggcaaaaccataccctccagctcacaggctctcacacaaggaagtcatggcttatttcacgtccaaaccctcctgcgggtgaccaacatttccgccgtggatgttacttgtagcatcagcattccattcttgggcgaggaaaaaattgccactttcagcctgagcggctggtag

SEQ ID NO: 180982 - DNA, 1368 bp, synthetic construct
  misc_feature 1..1368: note = Description of Artificial Sequence: Synthetic coding sequence
  source 1..1368: mol_type = other DNA
atggtggacttccccggctacaacctgagcggcgccgtggccagcttcttatttattctcttgaccatgaaacagtccgaggactttcgtgtgatcggaccagcgcaccctatccttgcaggggtgggcgaggacgccctgctgacttgccagctgctgcccaaaagaaccacgatgcacgtggaagtgaggtggtaccgctcagagccttctacccctgtgttcgtgcatagggacggggttgaagtgaccgaaatgcagatggaggagtataggggctgggtggaatggatcgagaacgggattgctaagggaaatgtggcattgaaaatccacaatattcagccgtcagataacggtcagtattggtgccatttccaggatgggaactactgcggtgagacctcactgttgctgaaggtggccggtctgggttcagctcccagtattcacatggagggccccggagagagcggagtccaacttgtttgtaccgccaggggctggttccccgagccccaagtttattgggaggacataaggggtgagaagctgttggctgtttccgagcatcgaattcaggacaaggacggattattttacgctgaggccacactggtggttcgcaacgcctccgccgagtctgtgagttgtcttgtgcacaatccagtgcttaccgaggagaaagggagtgtcattagtctgcccgagaagctacagaccgaactggcaagcttaaaggtgaacggaccttcccaacccattctagtgcgggttggcgaagacattcagctgacctgctacctgtctccaaaggcgaacgctcagagcatggaggtgaggtgggaccggagccaccggtacccagcagttcacgtgtacatggatggggaccatgtagctggagaacagatggcagaataccggggcaggaccgtgctcgttagcgatgctatcgacgagggccgcttgaccctgcagatcctatctgcacggcctagtgatgacggacagtatcgctgcctgttcgagaaggacgatgtgtaccaggaggcctctctcgacctcaaagtcgtttcgcttggctcttcccctctgatcactgtggagggccaagaggacggcgagatgcaaccgatgtgtagctccgatggatggttcccccagccccacgttccttggcgcgatatggaaggaaaaaccattcctagctcctcccaggccctcacgcagggcagccatggcctcttccacgtccagaccctgcttcgggtgacaaatatatcagctgttgacgtgacctgcagcatctccatacctttcttgggagaagagaaaatagctacctttagtctcagtggatggtag

SEQ ID NO: 180983 - DNA, 816 bp, synthetic construct
  misc_feature 1..816: note = Description of Artificial Sequence: Synthetic coding sequence
  source 1..816: mol_type = other DNA
atggtggacttccccggctacaacctgagcggcgccgtggccagctttctctttatattacttaccatgaagcagagcgaggacttccgcgtgattgggcctgctcacccgattcttgcaggagtaggggaagacgcgttgctcacttgccagctactgccgaagcgcaccactatgcacgttgaagtacgttggtataggagcgagccttccactccagtgttcgtacatcgcgatggcgtggaagtcacagagatgcagatggaggaatatcgtggatgggtggaatggatcgagaatggcattgcaaaaggtaacgtggctctgaaaattcacaacatacaacctagcgataatggccagtattggtgtcactttcaggacgggaactactgtggcgaaacctcattgcttctcaaggtggcggcggtgctgcgggacgacatcatcgccagcctgaaggtaaacgggccaagtcagcctatactggtccgggttggagaggacattcagctcacatgctacctttcccctaaggctaacgcacagtcaatggaggtcaggtgggataggagccacagataccccgcagtgcacgtctacatggatggcgatcacgtggccggagaacaaatggccgagtatagaggcagaaccgtcttagtctcagacgcaattgatgaaggcaggctcacattgcaaattctatccgccagaccatcagatgacggtcaatatagatgcttgttcgagaaggacgacgtgtatcaggaggcgtctttagacctcaaagtggtatgggtgctgccccactag

SEQ ID NO: 180984 - DNA, 1368 bp, synthetic construct
  misc_feature 1..1368: note = Description of Artificial Sequence: Synthetic coding sequence
  source 1..1368: mol_type = other DNA
atggtggacttccccggctacaacctgagcggcgccgtggccagctttctgtttatattgctcaccatgaagcagagtgaagacttcagagtgattggccccgcacatcctatcctggccggggttggagaggacgctttgttgacctgtcagttgctgcccaagcgcaccaccatgcatgtcgaggtccggtggtacagatcagagccctccactcccgtctttgtgcaccgagatggagttgaagttaccgagatgcaaatggaggaatacagagggtgggtggagtggatagaaaatggaatagctaaaggcaacgtcgcactgaagattcataacatccagccaagtgacaacggccagtattggtgccatttccaagacgggaactattgtggggagacgtcactgctgctcaaggtagccgggctgggaagtgcaccatccatccatatggagggcccgggtgaaagcggagtgcagctggtgtgcacagcccgggggtggtttcccgagccgcaggtgtactgggaggacattagaggagaaaagctcctagccgtatctgaacataggatccaggacgaagacggcctgttctatgccgaagctacgcttgtggtgagaaacgcgagcgcggaatcagtctcttgcttggtgcataatccagtccttaccgaagaaaagggctctgttatctctctgccagagaagttgcaaactgagctggcttctctcaaggttaacgggccttctcaaccaatattggtaagggtcggggaggatatccagcttacttgctacctcagcccaaaggctaacgcccaatctatggaggtgcggtgggatcggtctcatcggtatcccgccgtgcatgtttatatggatggggaccatgtagcgggcgaacaaatggccgagtatagaggtaggactgtactggtctctgatgcgattgacgagggccgcctgaccctgcaaattctgagtgctagacctagtgacgatggacaatatagatgcctgttcgaaaaggatgatgtttaccaagaggcaagtctcgatctgaaagtcgtaggtctggggtcatcaccgttgatcactgtggaaggacaggaggatggagagatgcagcctatgtgctccagcgatgggtggtttccacagccacacgtcccctggagagacatggagggaaagacgatccctagctcttcccaagctctcacgcaaggcagccacggtctgtttcacgtccagaccctcctacgagttacaaacattagtgccgtagatgtgacgtgttctatctcaattccattcttaggggaagaaaagattgcaacgttcagtctgagcggatggtag

SEQ ID NO: 180985 - DNA, 1368 bp, synthetic construct
  misc_feature 1..1368: note = Description of Artificial Sequence: Synthetic coding sequence
  source 1..1368: mol_type = other DNA
atggtggacttccccggctacaacctgagcggcgccgtggccagctttctgtttatccttctcacaatgaaacagagcgaggattttagggtgatcggaccagcacaccctatcctggctggagtgggggaggacgcattgctaacttgccagttgctgcccaagcgcacgacaatgcacgttgaggttcgctggtacaggtcagaaccctccactcccgtgttcgtccatagagatggggtggaggttactgagatgcagatggaagagtaccgcggctgggtggagtggatcgaaaacgggatagccaagggaaatgtggccctaaagattcacaatatccaacctagcgacaacggccagtattggtgtcacttccaggatggaaactattgcggggaaaccagtcttctccttaaagtggcgggtttgggtagtgcaccttccatccacatggaggggccaggagaatctggcgttcagctcgtttgtactgcgcgtggttggttccctgagccgcaggtgtactgggaagatatcaggggcgagaaactgcttgccgtaagtgagcacagaatccaggatgaagacggtctgttctatgctgaggctaccctggtggttagaaatgcctcagccgagtccgtctcctgccttgtgcataatcccgtactgactgaagagaaaggctcagtaatctccctccccgagaaactccagacagagctggccagcttaaaggtcaacggccccagtcagcctatcctggtgagggtcggcgaagacatccagttgacatgctatctgagccctaaggcaaatgcccaatccatggaggtgcgctgggatcgctcacataggtaccctgcagtgcacgtgtacatggatggggatcatgtcgctggggaacagatggctgaatacaggggaaggacagttctggtgtccgatgccattgatgaggggaggctgaccctccaaattttgtcagccaggcccagcgacgatggtcagtacagatgcctcttcgagaaggatgatgtataccaggaagccagtctggacctgaaagtcgtcggtttgggctcatcacctctgatcacggtggagggtcaggaagacggggaaatgcagcctatgtgcagttcagatggttggtttcctcagccacatgttccgtggcgcgacatggaaggcaagaccatcccctcctctagccaggccctgacccaggggtcccacggtttgttccacgtgcagacattattgcgagtaacgaacatttctgccgtggatgtgacctgttccatctctattccgttccttggagaagaaaagattgccaccttttcactctctggttggtag

SEQ ID NO: 180986 - DNA, 816 bp, synthetic construct
  misc_feature 1..816: note = Description of Artificial Sequence: Synthetic coding sequence
  source 1..816: mol_type = other DNA
atggtggacttccccggctacaacctgagcggcgccgtggccagctttctgtttattctgcttaccatgaagcaaagcgaagactttagagtgattggccccgcacaccctattctggcaggggttggggaggacgctctgctgacctgtcagcttttacccaaacgcacgactatgcatgtggaggtccgatggtacagaagtgaaccttcaaccccagtgtttgtccatcgagacggggtggaagtcaccgaaatgcaaatggaggagtacagaggctgggtggagtggatagaaaatggaatagcaaagggcaacgtggcactgaaaatccacaatattcagccctcagataatggacagtactggtgtcattttcaagatggaaactactgtggggagacaagccttctgctcaaggtggccgccgttcttagagatgatatcatcgcttccctcaaggtgaacgggccctcccagccgatcctggtacgtgtcggcgaggatatccaattgacctgttacctgtcccccaaggccaacgctcagtcgatggaggtgcgatgggaccggagtcatagatatcccgccgtgcacgtgtatatggacggtgatcacgttgcaggtgagcaaatggccgagtacagaggccgcaccgtgctggtgtctgacgccattgacgagggaaggttaacactgcagattctcagcgctagacctagcgatgacgggcagtataggtgtctcttcgaaaaagacgacgtttatcaggaggcttctcttgatttgaaggttgtgtgggtcctgccccactag

SEQ ID NO: 180987 - DNA, 537 bp, synthetic construct
  misc_feature 1..537: note = Description of Artificial Sequence: Synthetic coding sequence
  source 1..537: mol_type = other DNA
atggaggtgcggtgggaccggagccaccggtaccccgccgtgcacgtttacatggatggtgaccacgtggcaggagagcagatggccgagtatagagggcgcacggtgctggtgtctgacgctattgacgaaggccgtttaacactgcagatacttagcgcgaggccgtccgatgatggccaatatcgatgtctcttcgaaaaagacgatgtgtatcaggaggcatccctggatctaaaggtggtggggttgggcagctcgcctctcattacagtggagggacaggaagacggcgaaatgcagcccatgtgctccagcgacggatggttcccccagcctcatgttccctggcgggatatggagggcaagacaattccctcatcaagccaggctttaacacagggatcccatggtctgttccatgtgcagacactcctgcgggtgaccaacatcagcgctgtagatgtaacctgctcgatcagcatcccttttctgggagaggagaaaattgccacctttagtctctctggatggtag

SEQ ID NO: 180988 - DNA, 738 bp, synthetic construct
  misc_feature 1..738: note = Description of Artificial Sequence: Synthetic coding sequence
  source 1..738: mol_type = other DNA
atggtggacttccccggctacaacctgagcggcgccgtggccagcttcctgtttattcttctgaccatgaagcagtctgagaaattacaaacagaactggccagcctgaaggtgaacggtccaagccagccgatcctggtgagggttggggaagatatccagttgacttgttatctttcacccaaggccaacgctcagagcatggaggtgcgctgggacaggtcacaccggtatcctgccgtccacgtctatatggacggagaccacgtcgcgggggaacagatggcagaatatagaggccgaacggtgctagtcagtgacgctattgatgaagggcgtttgaccttacaaattctgtccgctcgaccctcagatgacgggcagtacagatgtctgtttgaaaaggacgacgtctatcaagaggctagcctcgacctcaaagtcgtgggcctaggttcctctccgctaattaccgttgaaggacaggaagacggtgagatgcagccaatgtgcagtagcgatggttggtttccccaaccccatgtgccatggagagacatggagggaaagaccattccctcctcttcccaggcgctgacccaggggtctcacggattgttccatgtccagactctgctgcgtgtcaccaacatctcagctgtggatgttacatgtagcatctctatcccattcctcggtgaggagaaaatcgcgaccttttcacttagtggctggtag

SEQ ID NO: 180989 - DNA, 738 bp, synthetic construct
  misc_feature 1..738: note = Description of Artificial Sequence: Synthetic coding sequence
  source 1..738: mol_type = other DNA
atggtggacttccccggctacaacctgagcggcgccgtggccagctttctgttcatacttttaacgatgaagcaatccgaaaaattacagacagaacttgcaagcctgaaggtgaatggaccctcgcaacccatccttgtgcgggtgggcgaggacattcaactgacctgttatctttcacccaaggcaaacgcccagtccatggaggtgcggtgggaccggtcacaccgctaccctgcggtgcatgtctacatggatggcgaccacgtcgccggagagcagatggccgagtaccgcggacgaaccgttctggtgtccgatgccatagatgaaggacggctgaccttacagattctcagcgctcgtcctagcgatgatggacaatataggtgcctcttcgaaaaggatgatgtctatcaggaggcatccctcgacctgaaggtggtatcgttggggagctcacctcttattaccgtggaggggcaggaagacggcgaaatgcagcccatgtgttcctccgatggctggttcccccagccacacgtgccgtggcgagacatggaaggtaagaccataccctcctctagccaggcacttactcaggggtcccacggactctttcacgttcaaactttactgcgagtaacgaatatttcagccgtcgacgttacatgctccatcagtattccattcctgggggaggaaaagattgccacattcagcttaagcgggtggtag

SEQ ID NO: 180990 - DNA, 1167 bp, synthetic construct
  misc_feature 1..1167: note = Description of Artificial Sequence: Synthetic coding sequence
  source 1..1167: mol_type = other DNA
atggtggacttccccggctacaacctgagcggcgccgtggccagcttcctgtttattctccttacgatgaagcagtctgaagactttcgagtgatcggccctgcacaccctatcctggccggcgtcggggaggatgcactccttacttgccagctcctgcccaagcgcacgaccatgcatgtagaggtgaggtggtatcgctcagagcctagcactcctgtgtttgtccacagggacggagtagaagtaactgaaatgcagatggaggagtatagaggatgggtcgagtggatcgagaacgggattgctaagggaaacgtagctttaaaaatccataatattcaacctagtgataacggacaatactggtgtcactttcaagacgggaactattgtggcgagacatcgctcctccttaaagtcgcagagaagcttctcgccgtgctcagctcactgaaagtgaatggaccgtcccagcctatcttggttcgggttggagaggatattcagctcacttgctacctgagtccaaaggcaaatgctcagagcatggaagtgcgatgggacaggagtcaccgatatcctgccgtgcatgtttatatggacggtgatcacgtggccggggagcagatggcggaataccgaggccgcacagttctggtttccgacgctatcgatgaggggaggcttacccttcagattttgtcggcacgaccctctgatgatgggcagtaccggtgtctctttgaaaaagacgatgtgtaccaggaggcatccctggatctgaaggtggtgtcactggggagtagtccactgataacagtagaggggcaggaggacggtgagatgcagccaatgtgtagctccgacggttggtttcctcaacctcacgtcccgtggagagatatggagggcaagacaatccccagcagtagtcaggcccttacacaagggtcccatggccttttccatgttcagacactcctccgcgtgaccaacatttcggccgtggacgtgacgtgttcaattagcattccattcctcggagaagagaaaatcgcaactttctcactgtccgagagccgaatgacgttcctgtggaagaccctactcgtatggggtttacttcttgccgtggccgtaggattgcctaggaagaggtcttag

SEQ ID NO: 180991 - DNA, 1368 bp, synthetic construct
  misc_feature 1..1368: note = Description of Artificial Sequence: Synthetic coding sequence
  source 1..1368: mol_type = other DNA
atggtggacttccccggctacaacctgagcggcgccgtggccagctttttgttcattctgcttacaatgaagcagtccgaagatttcagagtcatcggacctgcccatcctatcctggctggcgtgggtgaagacgccctgctgacatgccaactcctgccaaagagaaccacgatgcacgtggaggtgaggtggtacagatctgaacctagcaccccagtgtttgtccatcgagacggtgtggaagtgacagagatgcaaatggaggaatatcggggctgggtggagtggatagagaacgggattgccaaaggaaatgtcgcgctgaagattcataatatacagccaagcgataacggtcaatattggtgtcacttccaggatggcaattattgtggggaaacttcccttctgctcaaagttgctggacttgggtctgcaccctctattcatatggagggcccaggcgaatctggtgttcagctggtttgcactgcccgtggatggttccctgagccccaagtgtactgggaggatatccgaggcgaaaagcttttggccgtgtccgagcacaggattcaggacaaggatgggctgttttacgctgaagccacactggttgtgcggaatgccagcgccgagtccgtgagttgtctggtccacaaccctgtactcaccgaagaaaaagggagtgtcatcagcctccctgagaagctgcagacagagctggcctctttgaaagtcaatggacccagccagccaatcctggtccgcgtcggcgaagacattcagttgacttgctacctaagccctaaggcgaacgcccagtccatggaggtgcggtgggataggagtcaccgctatcccgctgtccacgtctatatggacggagaccatgtggccggtgagcaaatggctgagtaccgcggtaggactgttctggtatccgacgctattgatgaagggcgacttaccttgcaaatcctctctgcccgaccatctgatgatggccagtacaggtgcctatttgaaaaggatgacgtataccaggaggcctccctggacctgaaggttgtatcattggggtccagcccactaattaccgtagagggtcaggaggacggggagatgcagccaatgtgtagctcagatggttggtttcctcagcctcacgtgccctggcgggatatggaaggaaaaactattccatcatcctctcaggctctgacacagggttctcatggactttttcatgttcagacgctgttgagagtcacaaacatctctgctgtggatgtaacgtgcagcatttccattcccttccttggcgaggaaaagatcgcgacattttctttgagcggctggtag

SEQ ID NO: 180992 - DNA, 1167 bp, synthetic construct
  misc_feature 1..1167: note = Description of Artificial Sequence: Synthetic coding sequence
  source 1..1167: mol_type = other DNA
atggtggacttccccggctacaacctgagcggcgccgtggccagctttctgttcattctgttgacaatgaagcagagtgaggatttcagagtgattgggccagcccacccaatcctggccggggtcggagaagatgcgctgctaacctgccaactgctgccaaagcggaccacaatgcacgtcgaggtaaggtggtataggtctgagccgtcaacccctgttttcgtccatagggatggcgttgaggtgaccgaaatgcagatggaggaatatcgcggctgggtggagtggatcgaaaatggtatagcaaaaggcaacgtcgccctgaaaattcacaatatccagccctctgacaacggtcaatactggtgtcatttccaggacggaaattattgcggagagacatccttattgcttaaggtggctgaaaagcttttagccgtcctttcatctttaaaagtgaacggcccctcacagcccatcttagtgagagtgggcgaggatatacagctgacctgctacctgtctccgaaagctaatgcacagagcatggaagtgcggtgggacaggtctcatagataccccgctgtgcacgtctatatggacggtgaccacgtcgctggtgagcagatggccgagtatcgggggagaaccgtgctcgtgagcgatgctattgatgagggaaggctgaccctgcagatactgtcagctcggcccagtgatgatggacagtaccgttgtctgtttgaaaaggacgatgtctaccaggaagcctcactggatctgaaagtggtgggcctggggagtagtcccttaattactgtggagggccaagaggatggcgagatgcagccaatgtgttcgtccgacggatggtttcctcaaccacacgtgccgtggcgggacatggagggcaagactattccgtcatcctctcaggctcttacccagggctctcatggactgttccatgtccagaccttactgcgtgtgactaacatcagtgccgtggacgtgacgtgtagcatttccattccattcttgggcgaggagaagattgccaccttctctctcagcgaatcccgcatgaccttcttatggaaaaccctgctggtgtggggcctgttattggcggtggcggtgggattaccgcgaaaacgctcttag

SEQ ID NO: 180993 - DNA, 738 bp, synthetic construct
  misc_feature 1..738: note = Description of Artificial Sequence: Synthetic coding sequence
  source 1..738: mol_type = other DNA
atggtggacttccccggctacaacctgagcggcgccgtggccagctttttgttcatactcctcacaatgaaacaaagtgatagactggacacacccaaggcgtctctaaaagtgaacggaccatctcagcctatcctggtgcgcgtgggagaggacatccagctcacctgctacttgtctcctaaagctaacgcccaaagtatggaggtgagatgggatcgcagccacaggtacccagccgtgcacgtttatatggacggagaccatgtagctggggaacagatggccgaatacaggggacggactgtcttagtctccgatgcaatcgacgaaggccgccttaccctacagattctttccgccaggccaagtgatgacggacagtatagatgtcttttcgagaaggacgatgtgtaccaagaagccagcctcgatctgaaagtcgtgggcctggggtcctcacccctcattacagtggaagggcaggaggacggcgaaatgcaaccaatgtgctcctcggatggctggtttccccagccccatgttccctggcgtgacatggaaggaaaaaccattcctagctcctcccaggctctaacgcaggggtcacacggcttatttcacgtccagaccctgctgcgggtgaccaatatttccgcagttgacgtgacttgtagtatctccattccttttttgggagaggaaaagatcgccacctttagtctatcaggatggtag

SEQ ID NO: 180994 - DNA, 816 bp, synthetic construct
  misc_feature 1..816: note = Description of Artificial Sequence: Synthetic coding sequence
  source 1..816: mol_type = other DNA
atggtggacttccccggctacaacctgagcggcgccgtggccagcttcctgtttatccttttaacaatgaagcagtcagaagatttccgggtgatagggcccgcccacccgattttggccggagttggagaggatgcactactcacttgtcagctcctcccaaagcgcacgacaatgcacgtagaggtcaggtggtataggtcagaaccttcaacacctgtgttcgtacatcgggacggggtcgaggtcactgagatgcaaatggaggaatatcgcggatgggtggagtggattgaaaacggtattgccaagggaaatgtggctctcaagattcacaatatccaaccaagcgacaatggtcagtactggtgccacttccaggatggaaattactgtggggagacttcactcctgctcaaggtcgctgccgttttacgggacgatatcatcgcctcactgaaggttaacgggccctctcagccaattcttgtgcgcgtgggcgaagatatccagttgacatgctatctgagccccaaggccaatgcccagtccatggaagtgaggtgggacaggagccatcgctaccccgcggtgcatgtgtatatggacggtgatcacgtagccggagagcagatggcagagtaccgcggccgcacagtcctcgtgagcgacgctattgacgagggccgcctgactttgcagatcctcagtgcaaggccatccgatgacggacagtacagatgcttatttgaaaaagatgacgtataccaagaagctagcttggatttgaaggtagtgtgggttctgccacattag

SEQ ID NO: 180995 - DNA, 1167 bp, synthetic construct
  misc_feature 1..1167: note = Description of Artificial Sequence: Synthetic coding sequence
  source 1..1167: mol_type = other DNA
atggtggacttccccggctacaacctgagcggcgccgtggccagcttcctttttatcctcctgaccatgaaacagtctgaggacttccgagtgattggacccgctcaccctattctagcaggggttggtgaggatgcacttctgacatgccagttgctcccaaagcgcaccaccatgcatgtggaggtgcggtggtacaggagcgagcctagcacccccgtttttgtgcatagagacggggtcgaagtgaccgaaatgcagatggaagaataccgtggctgggttgaatggattgaaaacggcattgctaagggcaatgtagcactcaagattcacaatattcaacctagtgacaacggccagtactggtgtcacttccaggacggaaattactgcggcgaaacgtccttgctgttgaaagtcgctgaaaagttactcgcagtgttgtcctccctgaaggtgaacggtcctagccagccaatcctggttcgcgtaggcgaggatatccagctcacatgctacttgtctcccaaggccaacgcccagtcaatggaagttcgctgggatagatctcacaggtacccggccgtgcacgtttacatggatggcgaccacgttgctggcgagcagatggcagaatatcgcggcagaaccgtgctggtgtcagacgcaatcgatgaggggcggctgacgctccagatattatccgctcgcccttccgacgatggccagtaccggtgcctgttcgagaaagacgacgtctatcaggaagcctcgctggatttgaaggtcgtgggcctgggaagctcacctctcattacggttgagggacaagaggacggtgagatgcagcccatgtgtagctctgacggctggtttccgcagccacacgttccgtggcgcgacatggaaggcaaaaccataccctcttcctcgcaagccctaacccaaggaagccacggactgttccacgttcagacgctgcttagagtcacgaatattagcgcggtcgatgtaacatgttctatctcgatacccttcctgggggaagaaaagatcgccaccttcagcttaagtgagtcccggatgacattcttgtggaaaaccttgctggtgtggggcctcctgctggccgtggccgttgggttgccgaggaagagaagctag

SEQ ID NO: 180996 - DNA, 1401 bp, synthetic construct
  misc_feature 1..1401: note = Description of Artificial Sequence: Synthetic coding sequence
  source 1..1401: mol_type = other DNA
atggccttcgtgctgatcctggtgctgagcttctacgagctggtgtccggccagtggcaggtcaccggtccaggcaaattcgtacaggcactcgtaggggaggacgccgtgtttagctgcagcctgtttcctgagacgagtgccgaggcaatggaggtgcgcttcttcagaaatcagtttcatgcggttgtccatctctatagggatggagaggattgggaatctaaacagatgccccagtatcggggccgtaccgaattcgtgaaagattcaatcgctggaggaagagtcagcctgagactgaagaacattacaccaagcgatattggcctttacggatgttggttctcctcccaaatttacgatgaagaagctacttgggaactgcgcgtcgccgccctgggtagcctgccattgattagtatagtgggatacgtagatggggggatccaactgctttgcctaagtagcggatggttccctcagcccactgccaagtggaagggccctcagggacaggatctttcttccgattctcgtgcaaatgccgatggctatagcctctacgacgttgagatcagtatcatagttcaggagaacgctggtagcattctgtgcagtatacacctcgccgagcaaagccacgaagtggagtcaaaggtactgataggtgagacatttttccaaccatccccatggcgactcgcctccattcttcttggcctgctgtgtggggctctgtgtggagtcgtgatggggatgattatcgtgttcttcaagagtaaagggaagatccaagcagagctggactggaggcgcaagcatgggcaggcggagctacgcgatgccaggaagcatgccgtcgaagtgacactggatcctgaaaccgcccatcccaaactatgcgtgtcggacctgaaaaccgtcactcacagaaaggcccctcaggaagtcccgcacagtgagaagcgattcacaagaaaatccgtggtggcctctcagggattccaggctggaaagcactattgggaggtggacgtggggcagaacgtcggatggtatgtgggggtgtgcagagatgacgtcgaccgagggaaaaacaacgttaccctaagccctaacaacggttactgggtcctgaggctaaccacagagcacctgtattttacctttaaccctcacttcattagtctgccaccaagcaccccaccgacccgggtcggggtcttcctagattacgaaggcggtaccatcagcttctttaatacaaatgaccagagcctgatatacactctgttgacatgccagtttgaaggattgcttaggccctatattcagcatgccatgtacgacgaggaaaagggaacccctatcttcatttgtcccgtgtcctggggttag

SEQ ID NO: 180997 - DNA, 1299 bp, synthetic construct
  misc_feature 1..1299: note = Description of Artificial Sequence: Synthetic coding sequence
  source 1..1299: mol_type = other DNA
atggccttcgtgctgatcctggtgctgagcttctacgagctggtgtccggacagtggcaggttactggtcctggaaagtttgtgcaggcccttgtgggagaagacgctgtcttttcctgcagccttttccccgagactagtgcagaggctatggaagtgagattttttaggaatcaattccacgcagtcgtgcatctgtatagggatggcgaagattgggaatccaaacaaatgcctcagtacagaggccgcacagagtttgttaaggatagcattgccggagggagagtttcactacgactgaaaaatatcacaccctcagacataggcctgtatggctgttggttttcctcccaaatctacgatgaggaggctacatgggagttgcgcgttgccgcactgggcagcttacctctgatttcaattgtagggtatgtggatggcggcattcagctgctgtgcctgtccagcgtccagccctctccttggagattagcaagtattcttctgggactgctgtgcggtgcgttgtgcggcgtagtcatgggcatgattatcgtctttttcaaatctaagggcaagattcaggcagagctgggaatgtgccatgtgttatccctcccacacatggtgctcccaggtcccagtctcatacattccctgtccctctggacaaccctggccgcaggttggacaggatccaccgactggcggcgaaagcatggacaggcggaactgcgagacgcacgtaagcacgcagtcgaggtgacacttgaccccgagaccgctcaccccaagttatgcgtgagtgacctcaaaacagtgacccacagaaaagctcctcaggaagtgcctcactcagagaaaaggttcaccagaaagtccgtcgtggcctcacaggggttccaagcaggcaaacattattgggaagttgacgtggggcaaaacgtagggtggtacgtgggcgtatgccgtgacgatgtggaccgagggaaaaacaacgtgaccctttcccctaacaacggatattgggtcttaaggctgaccacggagcacctttacttcactttcaaccctcacttcataagcttacctccatcgaccccccctacgagagtgggcgtctttctggattatgagggcggcaccataagcttttttaacacaaacgaccaatccttaatttacacgctgcttacatgtcaatttgaggggctgctgcgaccctatattcagcacgctatgtacgacgaagaaaagggcacgcccattttcatttgtcccgtgtcctggggttag

SEQ ID NO: 180998 - DNA, 1809 bp, synthetic construct
  misc_feature 1..1809: note = Description of Artificial Sequence: Synthetic coding sequence
  source 1..1809: mol_type = other DNA
atgcacagcaaggtgaccatcatctgcatccggttcctgttctggttcctgcttctctgcatgctcatcgggaagtcccatactgaggatgatatcattatagccaccaagaatggcaaggtccgagggatgaatttgaccgtctttggaggaacagtaacagccttcctgggcattccctacgcccagccacctcttggaaggctgcgcttcaagaagccccagtcactgactaagtggagcgatatatggaacgctactaaatacgcaaacagctgctgccagaatatcgatcagtcgtttcccggctttcacggcagtgaaatgtggaatccgaacaccgacttgagcgaggactgcttgtatctgaacgtgtggattccggccccaaaacctaaaaacgccacggtgctgatctggatctacggcgggggtttccagacaggaacttcctctctccatgtttatgatggcaagttcttagcgcgcgtcgagcgagtgatagtggtcagtatgaattatagggtgggtgcactgggtttcctggcccttccaggcaaccctgaggcccccggaaatatgggtctatttgatcaacagctggctctgcagtgggtgcagaaaaatatcgccgcctttggcggaaatcctaaatcggtcacgctattcggcgaatctgcgggcgctgccagcgtaagtctgcatctgctctcacctgggagccatagcctctttacccgggctattcttcagtccggatcttttaacgcgccatgggccgtgacctccctctatgaagcccggaatcggactctaaacctggccaagcttaccgggtgcagcagggaaaacgagacagagatcattaagtgccttaggaataaggacccccaagagatcctcttgaatgaggcatttgtcgtgccttatggtacccccctcagtgtcaacttcggcccaactgttgatggcgactttctgacagatatgcccgacatattgttggagctgggccagttcaaaaaaacacagattctagttggcgtaaacaaagacgaggggaccgctttcctggtatatggagcgccaggtttctctaaagacaataatagtattatcacccggaaagaatttcaagaaggtctcaagatattctttccgggagtcagtgaatttgggaaggagtccatactctttcactatacggattgggttgatgaccagcgtcccgagaattatagagaagccctgggcgatgtcgtgggcgattataactttatttgccccgctctggaatttaccaagaagttcagcgaatggggaaacaatgccttcttttactattttgaacaccgaagtagcaagctgccatggcctgaatggatgggggtcatgcacggctacgaaattgagttcgttttcggcttgcccctggagagacgtgataactacactaaggcagaggagattctatcgagatccattgtgaaacgctgggcaaatttcgccaaatacggcaaccctaatgaaactcagaataatagcacctcatggcccgtgttcaaatcaactgaacagaaatatctcactcttaatacagagtccactcggattatgaccaaactaagagcccagcagtgccgtttctggacgtccttctttcccaaggtgcttgagatgacgggaaacatcgacgaggcagagtgggagtggaaggctggttttcaccggtggaataactacatgatggactggaaaaatcagttcaacgactacacatccaagaaagaatcttgtgttggactgtag

SEQ ID NO: 180999 - DNA, 399 bp, synthetic construct
  misc_feature 1..399: note = Description of Artificial Sequence: Synthetic coding sequence
  source 1..399: mol_type = other DNA
gccgtgcagttcaccggctggagcagcagctgcatcctgcacttcccagaggtcctgcacgactttcactcacttcagaccctgccgtcacttctccagcgcattggaaacccaaacgagacacagaacaactccacgtcctggcccgtttttaagtctactgagcagaagtatttaacactcaacacagagtccacccgcatcatgacaaaactgagggcacagcagtgccgattctggacatcctttttcccgaaggtgctggagatgacaggaaatattgacgaggccgagtgggagtggaaggcgggatttcaccggtggaataattatatgatggactggaagaaccaattcaacgactataccagcaaaaaggaatcttgtgttggactgtag

SEQ ID NO: 181000 - DNA, 195 bp, synthetic construct
  misc_feature 1..195: note = Description of Artificial Sequence: Synthetic coding sequence
  source 1..195: mol_type = other DNA
atgaccaagctgcgggcccagcagtgccggttctggaccagcttcttccccaaggtactcgaaatgacaggaaacatcgacgaagcggagtgggagtggaaagcaggctttcacaggtggaacaactacatgatggactggaagaaccagtttaatgattacactagtaaaaaagagtcttgcgtcgggctgtag

SEQ ID NO: 181001 - DNA, 1431 bp, synthetic construct
  misc_feature 1..1431: note = Description of Artificial Sequence: Synthetic coding sequence
  source 1..1431: mol_type = other DNA
atggccagccggatcggcctgcggatgcagctgatgcgggagcaggcccagcaggaggaacaacgcgagaggatgcaacagcaggctgttatgcactatatgcaacagcagcagcagcagcagcagcagcaactgggagggcctccgactccagccataaacacacccgtgcacttccagagtcctcctccagttccgggggaggtgctcaaggtacagtcctacctcgagaatccaacctcctaccatttgcaacagtcgcaacaccagaaagtccgagaatacctgtcggaaacctacggaaataagttcgcagcccatatcagcccggcccagggcagccccaagccacctcccgctgcttcccctggagtgcgagctggtcatgtgctatcatcgagcgctgggaattccgctcctaactcccccatggctatgctgcacatcggcagcaacccggaaagggaactcgatgatgtcatcgataacatcatgaggctggatgacgtactaggatatataaaccctgagatgcagatgcccaatacactgccactgtctagcagtcacctgaacgtgtactcgtccgacccccaggtgaccgcttctttggtcggcgtcactagctcttcatgtccagctgacctgactcagaagcgcgagcttacagatgctgaaagtcgggccctcgccaaagaaagacagaagaaggacaatcacaatctgatcgaaagacgtagacgcttcaatattaacgatcgaattaaggagctggggatgctcatcccaaaagctaacgatctcgatgtgaggtggaataagggaactattttaaaagcttccgtggactatatccggcgcatgcagaaggatcttcagaaaagccgtgagctggagaaccattcccggcggcttgagatgacaaataaacagttatggctgcgcatacaggagctggaaatgcaggctcgggtccatggcttgcctaccaccagcccttcgggcatgaatatggctgaactggcccagcaggtcgtgaaacaggaacttccgagtgaggaagggccaggggaagcgctgatgctgggcgctgaggttcctgatccagagcctctgccggctctgcccccccaggctcctctgccgttgcccacccaaccgccaagcccgtttcaccatttagattttagccacagcctgagtttcgggggcagagaagatgaagggccacctggataccctgagcccttagcaccagggcacggcagcccctttccgtccttgagcaaaaaagacctggacctgatgcttctagacgattccctgttgccactcgcaagcgatccactgctgagcacgatgagtccggaagcaagtaaagcgagctccagaaggtctagcttttccatggaggagggcgacgtcctgtag

SEQ ID NO: 181002 - DNA, 426 bp, synthetic construct
  misc_feature 1..426: note = Description of Artificial Sequence: Synthetic coding sequence
  source 1..426: mol_type = other DNA
atggccggcgaggagatcaacgaggactaccccgtggagatccacgagtacttaagtgcttttgaaaatagcattggcgctgtggatgaaatgctgaagactatgatgtctgtgagtcgcaacgagctcctgcagaagctggatcctctcgagcaggccaaagtggatctggtttccgcctacactctgaattctatgttctgggtgtatttggctacacagggcgtgaatcccaaggaacatcctgtcaagcaggaattggagcgcattagagtctatatgaatagagtcaaggagataacagacaagaagaaggctggaaagctggatcgaggggccgctagtaggtttgtgaagaacgccctgtgggagcctaaatctaagaacgcaagtaaggtagccaacaagggcaagagcaaatcttag

SEQ ID NO: 181003 - DNA, 543 bp, synthetic construct
  misc_feature 1..543: note = Description of Artificial Sequence: Synthetic coding sequence
  source 1..543: mol_type = other DNA
atgcccagccccagcgtgagcaccagcgccgccagcgtgctggagggcgtatgtggaagggccagaagtacctaccggactcccgaagagggcgaggaacaaagttggagtgcaatcatggctggggaagagatcaatgaggactatccagtcgaaatccacgaatatttgagtgctttcgagaacagcataggcgcagtggacgagatgctcaagaccatgatgtcagtctcaaggaacgaactgttgcagaagctcgatccacttgagcaggctaaggttgatcttgtctctgcctatactttaaatagcatgttctgggtctaccttgccacacagggggttaacccgaaagagcaccctgttaaacaggagctcgagcgtatccgggtgtacatgaatagagtgaaggagatcaccgacaaaaagaaagccggaaaactggatcggggcgctgcctctcgttttgtaaaaaatgccctctgggagccaaaatccaaaaacgcctctaaagtggccaacaagggcaaaagcaaaagctag

SEQ ID NO: 181004 - DNA, 426 bp, synthetic construct
  misc_feature 1..426: note = Description of Artificial Sequence: Synthetic coding sequence
  source 1..426: mol_type = other DNA
atggccggcgaggagatcaacgaggactaccccgtggagatccacgagtatctgtccgccttcgaaaactctataggagcagtcgacgagatgctgaaaacgatgatgtccgtaagtagaaacgagctcctccaaaagctcgaccctctggaacaggctaaggtagacctggtgtctgcatatacccttaattccatgttctgggtgtatctggctacccaaggcgtcaatcccaaggagcatccggtgaagcaggaactcgagcggattagggtctatatgaatcgggtcaaagagattacagacaaaaaaaaggcgggcaaattggacagaggagccgccagcaggttcgtgaaaaatgccttgtgggagccgaagtccaaaaatgcgtctaaagtcgctaacaaaggtaaaagcaagagttag

SEQ ID NO: 181005 - DNA, 426 bp, synthetic construct
  misc_feature 1..426: note = Description of Artificial Sequence: Synthetic coding sequence
  source 1..426: mol_type = other DNA
atggccggcgaggagatcaacgaggactaccccgtggagatccacgaatatctgagtgcattcgaaaactcaattggagctgtggacgagatgctaaagaccatgatgagtgtttctcggaatgagctgcttcagaaactggatcccttggaacaggccaaagtggacctggtctcagcctatactctcaactcgatgttctgggtgtatttagcgacacaaggcgtcaaccctaaggaacaccccgtgaagcaggaactcgagagaatcagagtctacatgaacagggtcaaagagattaccgataaaaagaaagccggaaagctggaccgaggcgccgccagcaggtttgttaaaaacgccctttgggagcccaaaagcaaaaatgcctccaaagtcgcaaacaaggggaaaagcaaatcttag

SEQ ID NO: 181006 - DNA, 957 bp, synthetic construct
  misc_feature 1..957: note = Description of Artificial Sequence: Synthetic coding sequence
  source 1..957: mol_type = other DNA
atgctgagcgagagcagcagcttcctgaagggcgtgatgctgggcagcatcttttgcgccttaattacaatgctgggccacataagaattggccacggaaatcggatgcatcaccacgagcaccaccacctccaggcccccaacaaagaggatattcttaagattagcgaggacgagaggatggaattgagcaagagcttcagggtgtattgcattattctagtgaagcctaaagacgtgtctctgtgggctgccgttaaggagacatggacaaagcattgtgataaggccgaatttttctcctccgagaatgtcaaggtgttcgagagtattaatatggataccaatgacatgtggcttatgatgagaaaggcgtataaatatgcttttgacaaatatcgcgaccagtataattggtttttcctagcccgccctaccacctttgccatcatcgagaatctgaagtatttcctgcttaaaaaggatccttctcaacccttctaccttggacacacaatcaagtccggcgacctggagtacgtcgggatggagggcggcatagtgctctccgtcgagtccatgaaaaggctgaactccctcctcaatatccccgaaaagtgtccagagcaaggcggtatgatctggaaaatctctgaggataagcagcttgctgtgtgcctgaaatacgccggggtgtttgcagagaatgccgaagacgcagatggcaaggacgtgttcaataccaagtctgttggcctttctatcaaagaggcaatgacgtatcacccgaaccaagtggttgaaggatgttgctctgatatggcggtcacctttaacggactcacacccaaccagatgcacgtcatgatgtatggagtctatcgcctccgagcgttcggtcacatcttcaacgatgccctggtgttcctccctcctaacggcagtgataatgattag

SEQ ID NO: 181007 - DNA, 957 bp, synthetic construct
  misc_feature 1..957: note = Description of Artificial Sequence: Synthetic coding sequence
  source 1..957: mol_type = other DNA
atgctgagcgagagcagcagcttcctgaagggcgtgatgctgggctctatattttgcgctctgattaccatgctggggcacatccgcatcggtcatggaaatagaatgcaccatcacgagcatcaccacttacaggcccctaacaaagaagatatattaaagatcagtgaggatgaacgcatggaactgagcaagtcctttcgggtttactgcatcatcctggtcaagcctaaagatgtctctctgtgggccgctgtcaaagaaacgtggactaaacactgtgataaggccgaatttttttcatccgaaaacgttaaagtgttcgaatcaattaacatggacactaatgacatgtggctcatgatgcggaaggcctataagtacgcctttgataaataccgcgaccaatataactggtttttcctggcccgccctaccacctttgcgatcattgagaacctgaaatactttcttctgaaaaaggacccttcccagccgttctatctcggtcatacaattaagtcaggtgatttggaatacgtaggaatggagggcggaatcgttctctcagtggagagtatgaagagattgaactctctgctgaatatccccgaaaaatgtcccgagcagggtggaatgatctggaagatctcagaagataaacaactggcagtctgcctgaaatacgccggagtctttgccgaaaacgccgaggatgccgacggaaaggacgttttcaacactaagtcagtaggcctttctattaaggaggcaatgacctatcacccaaatcaggttgtagaaggatgttgcagcgatatggcagtcactttcaatggcttgactcctaatcaaatgcatgttatgatgtacggcgtttatcgtctgagggcgttcggtcatatttttaatgatgcgctggtgtttctgccacccaatggttccgacaatgattag

SEQ ID NO: 181008 - DNA, 732 bp, synthetic construct
  misc_feature 1..732: note = Description of Artificial Sequence: Synthetic coding sequence
  source 1..732: mol_type = other DNA
atgcggcccctgctggtgctgctgctgctgggcctggccgccggctcccctccactggatgataataagattccgtctctatgccccggacatccaggtctgcctgggacccctggccaccacggcagccagggattacccggaagggacggacgcgacggtcgggacggagcgccgggggctcccggtgagaaaggcgaaggagggcggcctggcctgcccggcccccgtggagatccgggcccaagaggcgaagctggtcctgctggccccaccgggccggctggagagtgtagcgtgcccccgcgttctgcctttagtgccaaacgctccgaatctcgagtgcctcctcccagtgatgccccattgccatttgatcgtgttctagtcaatgagcagggacactatgatgcagtcacaggaaagttcacatgccaggtgccaggcgtctactatttcgctgtgcatgctaccgtgtaccgcgcttccctccagttcgatctcgtgaaaaacggcgagtccatcgctagcttttttcagttctttggtggatggccaaagcccgcatcgctgtctggtggcgctatggtgcggctggagccggaagaccaagtctgggtgcaggtaggtgtgggcgattatattggcatatacgcatcaataaaaacagactccactttcagtggctttctggtttattcagactggcattcaagccctgttttcgcatag

SEQ ID NO: 181009 - DNA, 732 bp, synthetic construct
  misc_feature 1..732: note = Description of Artificial Sequence: Synthetic coding sequence
  source 1..732: mol_type = other DNA
atgcggcccctgctggtgctgctgctgctgggcctggccgccggctctccccctctggacgacaacaaaatcccgtcgctgtgcccgggacacccgggactgccaggtacacccggtcatcacggcagtcagggcttgccaggtcgggacgggcgagacggcagagatggcgcaccaggcgcaccaggtgagaagggagaaggcggtcggcctgggctgccgggaccaaggggcgaccctggtcctagaggagaggcgggccccgcgggccccaccgggccagctggagagtgtagcgtgccgcctcggtcagccttttcagcaaagcggagtgaatccagagtgccccctccctctgatgctccactgccattcgatcgggtacttgtgaacgagcagggacattatgatgcggtcaccgggaaattcacatgccaagttcccggcgtgtactacttcgcagttcacgctacagtatatcgggcgagtctgcagttcgacctcgtgaaaaacggcgagtccatcgcctcattcttccagttcttcggtgggtggccaaaaccggcatccctgagcggtggcgccatggtgaggctggaaccggaggatcaagtctgggtgcaggtgggcgttggagattatattgggatttacgcctcaatcaaaacagactctacgttctccggcttcctggtttactcagactggcattccagcccggtgttcgcgtag

SEQ ID NO: 181010 - DNA, 759 bp, synthetic construct
  misc_feature 1..759: note = Description of Artificial Sequence: Synthetic coding sequence
  source 1..759: mol_type = other DNA
atggccgcccccgccctgctgctgctggccctgctgctgcccgtgggtgcctggccaggcctgccccggcggccgtgtgtgcactgctgccgcccggcttggccccccggtccctatgcccgcgtaagcgatagggacttgtggcgcggcgacctgtggcgaggcctcccacgcgtccgtccaactattgacatagagatcctgaagggggagaagggcgaggcaggggtgcgcggaagggctggccgctcagggaaagaaggtccccctggggccagaggcctgcagggcagacgcggacagaagggacaggtaggtccaccgggagcggcgtgcagaagagcctatgccgccttcagcgtcggaaggcgagagggactgcatagcagtgatcactttcaggccgtgccatttgataccgaactggttaacctcgatggggccttcgacctggccgcagggcggtttctctgtaccgtccccggggtctatttcctgagtctgaatgtccatacctggaattacaaagaaacatatctgcacattatgctgaacagacgtccggccgcagtcctatatgcgcaaccatctgagagatctgttatgcaggcccagagcttgatgctcctcttggccgccggagacgctgtgtgggtgcgtatgtttcaaagggatcgcgacaacgcaatttacggcgagcacggggacctgtacataactttttcagggcatctggtaaaaccagcggctgagctgtag

SEQ ID NO: 181011 - DNA, 1002 bp, synthetic construct
  misc_feature 1..1002: note = Description of Artificial Sequence: Synthetic coding sequence
  source 1..1002: mol_type = other DNA
atgcggatctggtggctgctgctggccatcgagatctgcaccggcaatatcaactcccaggacacttgccgacaaggacatcctgggattcccgggaaccccggccataacggcctgcctggacgggacggtcgagacggcgccaagggcgacaagggagatgcgggcgagcctggtcggcctggctcccccggaaaagacggaacaagtggggaaaaaggcgagagaggggcagacgggaaggttgaggcaaaaggtatcaagggagaccagggctctcgcggttcgcccggtaaacatggcccaaagggcctcgctggtccaatgggggagaaaggtttaagaggggaaactggcccccaaggccagaaagggaataagggggatgtgggaccaaccggccctgaaggcccccgtggaaatattggtccccttggccccactggactgccggggcccatgggcccaatagggaagccaggccctaaaggcgaggctggaccgaccggtccgcaaggcgagccgggcgtacgcggcattcgaggatggaaaggcgacagaggtgagaaagggaagataggcgagactctggtgctgcctaagagcgcatttaccgttggtctgacggtgctgagcaagtttccctctagcgacatgcccatcaagtttgataagattctgtataatgagttcaatcattacgatactgccgcaggtaaattcacctgccacatcgctggtgtgtactatttcacctaccacattaccgtattcagtcgtaacgttcaggtgtccctggttaagaacggagtcaagatcctgcataccaaagatgcctacatgtcctccgaggaccaggcgtctgggggaatagtgttgcaactcaaattaggcgacgaggtttggttgcaagtcaccgggggcgaaagattcaatggccttttcgctgacgaagacgatgataccaccttcactgggttcctcttattctcctctccgtag

SEQ ID NO: 181012 - DNA, 1002 bp, synthetic construct
  misc_feature 1..1002: note = Description of Artificial Sequence: Synthetic coding sequence
  source 1..1002: mol_type = other DNA
atgcggatctggtggctgctgctggccatcgagatctgcaccggcaacattaactcccaggacacctgtcgacaaggccacccgggcattcccggtaatcctgggcacaacggcctgcccggcagagacggtcgtgatggagccaagggagacaagggggatgctggcgagcccggtcggcctggatccccagggaaagatggcacctcaggtgaaaagggcgaaaggggcgccgatgggaaagttgaggccaaaggcatcaaaggtgaccaggggagtaggggaagccccggtaagcacgggcctaagggattggcgggtcccatgggggaaaagggccttaggggcgagaccggtccccagggccagaagggaaacaagggggatgtcggacccaccggccccgaagggccgcgcggtaacatcggacccctgggcccgaccgggctcccaggccctatgggacccattggaaagccaggaccaaagggggaggctggaccaactggtccccagggagaacctggcgtgcgaggtatccggggatggaagggcgaccgtggagaaaagggaaagataggagagacattggtgctccccaagtctgcgttcacagtcggtctcacggtactttccaagtttccttctagcgacatgcccattaagttcgataaaatactgtacaatgaatttaaccactatgatacagctgccggcaagttcacctgtcatattgcgggcgtctattacttcacataccatataacggtattttctaggaacgtgcaggtatccttggtgaagaatggtgtaaaaatcctacatactaaggatgcatacatgtcctcagaggaccaggcctcaggcggtattgtcctccagctcaagctgggcgacgaagtctggctgcaagtcaccggtggcgaacgtttcaacggactctttgcagacgaagatgatgataccacttttactgggttcctcctgtttagctctccttag

SEQ ID NO: 181013 - DNA, 300 bp, synthetic construct
  misc_feature 1..300: note = Description of Artificial Sequence: Synthetic coding sequence
  source 1..300: mol_type = other DNA
atgcggatctggtggctgctgctggccatcgagatctgcaccggcaatattaattcacaggacacctgtcgccagggacatcctggtatccctggtaaccctgggcacaacggccttcccgggagagacggaagagatggcgctaagggtgacaaaggcgacgccggtgaacccggttgccccggcagccccggaaaggatggcacaagtggggaaaaaggcgaacggggggctgatggcaaagtcgaggctaaaggaatcaagggtatgttcagatgtctctggagcaaaacagagtag

SEQ ID NO: 181014 - DNA, 1002 bp, synthetic construct
  misc_feature 1..1002: note = Description of Artificial Sequence: Synthetic coding sequence
  source 1..1002: mol_type = other DNA
atgcggatctggtggctgctgctggccatcgagatctgcaccggcaacatcaattcacaggacacatgtaggcaaggccacccgggcataccggggaaccccggccataatggtctccccggtagggacggtagagacggcgccaaaggcgacaaaggcgatgccggtgagccaggatgtcctggctcgcctggaaaagatgggacctccggcgagaagggtgagcggggagctgacggtaaggtggaggccaagggaatcaaaggggaccagggctcccggggcagcccggggaagcacgggcccaaaggactcgctggtcctatgggcgaaaaaggactgcggggcgagacaggaccacagggacagaagggcaataagggcgacgtggggcctacaggccccgagggtccccgggggaatatcggcccgctcggtcccactgggcttccgggcccaatgggcccaatcggcaaacctgggcccaagggagaggccggacccaccgggccacagggcgagccaggcgttcgcggtatcaggggctggaaaggagataggggtgagaagggtaaaattggagaaaccctggtgttgccaaaaagtgcttttacggtgggtcttacagtgttaagtaagttcccgtcctcagatgtcccgattaaatttgacaaaatcttgtataacgaattcaaccactacgataccgctgttggaaaattcacttgtcatatcgccggcgtgtattatttcacctatcatataaccgtgttctcgcggaatgttcaggtttccctcgtcaagaatggcgtgaagatcctgcacacacgggacgcttacgtttctagcgaggaccaggcatcaggctccatcgtgctccagctaaaactaggggacgagatgtggcttcaggttaccgggggcgagcgctttaatggtctgtttgcagacgaggacgacgatactacatttactggctttctactgttttcatcccagtag

SEQ ID NO: 181015 - DNA, 1002 bp, synthetic construct
  misc_feature 1..1002: note = Description of Artificial Sequence: Synthetic coding sequence
  source 1..1002: mol_type = other DNA
atgcggatctggtggctgctgctggccatcgagatctgcaccggcaatatcaactcgcaggatacctgcaggcaaggacacccggggatccctggaaatcctggccacaatggactccctggacgagacgggagggacggggccaagggggataagggggacgctggggagcccggctgccctggctcccccggaaaggatgggacttcaggcgagaagggtgagcggggcgccgacggaaaggtggaagccaaaggcatcaaaggggaccaggggagcaggggatcacccgggaagcatggccctaaggggctggctggtcccatgggggaaaaaggcctccggggcgagaccggaccccagggccagaagggcaacaaaggcgacgtggggccgaccggcccagagggtccccggggcaacatcggtcccctcggaccaaccggattaccagggcctatgggccctattggtaaacctggccccaagggcgaggctggtccaacaggcccccaaggcgagcccggggtgcgaggaatccgaggctggaagggtgatagaggggaaaagggaaagatcggcgaaacacttgtactgcctaagtctgcgttcactgtggggctgactgtgctgtccaagtttccttctagcgatgtcccaattaagttcgataaaatcctttataatgaatttaatcattatgacacagcagtggggaagttcacatgccatattgccggggtgtactattttacttatcacattacagtgttcagcagaaatgtgcaggtatctctggtcaagaacggcgtaaaaattctccacacacgggacgcctatgtaagcagtgaagatcaggctagtggatctatagtgcttcagctgaagctgggcgatgaaatgtggctgcaggttacagggggtgagcgcttcaatggtctgtttgcggacgaagacgacgatacgactttcactggttttctgctgtttagttcccaatag

SEQ ID NO: 181016 - DNA, 150 bp, synthetic construct
  misc_feature 1..150: note = Description of Artificial Sequence: Synthetic coding sequence
  source 1..150: mol_type = other DNA
gtgggccccaccggccccgagggcccccggggcaacatcggccccctcggtcctaccggattacctgggcccatggggccaatcggaaagcctggccccaagggagaggccggcccgacaggcccccaagtttttccgttttgcatctag

SEQ ID NO: 181017 - DNA, 1110 bp, synthetic construct
  misc_feature 1..1110: note = Description of Artificial Sequence: Synthetic coding sequence
  source 1..1110: mol_type = other DNA
atgtggtgcctggagcggctgcggctgggccccgagtgcctgcggcgaagtggggactggctgctcccgggccgagcccgaggcgccaagtcaagaaccactgccgcatgcgctaacgtcctaaccccggacagaatccctgaattttgtatacccccaagactcatgccaaggctggccctggcggcactgaggaactcatgggtggaggaagcgggtatggacgaaggcgcaggccggaccgattgggatccacggtcacaggccgccctgtccctgccccatctccctagagtgcggacggcttacggtttctgtgctctgctcgagagcccacacactaggcgcaaagaaagcctgctgctgggtggccccccggcgcctaggcctagggctcatacttatggaggaggcggaggcccggacgcactactgggtacactgcgagtgccacgcgctccggggccggccacaccagccgcacccggatgccctaggccgccgcaggacgcactggctcgccgacccagagggtgcaggttactgagagtgcccgatgggctgctgtcacgggccctgcgtgccggaagaagcagacggttgactcgtgtaagatccgtgtcatccggaaacgaggacaaggaacgacgagctggctcccagtccccagcacgcgccccctccacttcacctccttcttcccgcgtcccgtttcctgaacggctcgaagctgaggggaccgtggccctgggcagagccggagacgccctccgcctggctgcagagtactgtccagggactggccgcctgcgcttgcgactactgagggcagagagtccagcaggtggagcccctggcccccgggctgtgtcctgtaggctgtcacttgtgcttcgtccacccggcacagcgcttcgccagtgcagcaccgtggtcggcagatctcgaaaggctagcttcgatcaagatttttgttttgacggtctgagcgaggacgaggtacgacgcctggccgtccgcgtgaaagcacgcgatgaaggtagaggccgcgagcggggaagactgctgggacagggcgagctgagcctcggcgctctgctgctcttgtag

SEQ ID NO: 181018 - DNA, 1095 bp, synthetic construct
  misc_feature 1..1095: note = Description of Artificial Sequence: Synthetic coding sequence
  source 1..1095: mol_type = other DNA
atgcggctgctggagaagctgtgcagcagcgccgccggcagcagcgcccctaagccagctttcgccaaggttttaacacctaacagaatcccagagttctgcattccacctaggctccccgcgccttgcactctggagtctcctattagagctgccgctgtgcctcgaaggtgtgccgcggagtccgacctgtggccccgagctgccgatgaagacgcagggagaacagactgggacccacgctctcaagccgcgctcagcctgccccacttaccacgagtgaggaccacttatgggttctgcgccctgctggagtccccccatacaaggagaaaggaatccctgctgctgggagggcctcctgcaccacgaccccgggcacattcctgtggtgggggtggagggcccgacgcgccactgggcaccctgtgtggtccccgaggtcccgggcccgctacccccgctgctcccggtggccctaggcttccgcaggatgctctggctgctggccctcggagatgtagactactgcgtgtgcccgacggacttctgtcacgggcgctcagagctggtcgctcaagacgccttgcgagggtgcgttctgtgtcctcaggtaatgaagacgaagaaagacgagctggctccgaaagccccgctcgagctcctagcagcagtcctctgagcagtagagcacctctgcctgaacgcctggaggctaaaggaaccgtggctcttggtagggcgggcgacgcgttgagactcgccgctgaatactgtcctggtacccgcagactcagactgcgattgctccgggctgagtcgctctttggcggggccccaggcccacgtgctgtgagatgtagattatccctggttctcagaccccccggcaccgcccgttggcagtgttccgctgtcgttgggaggagtcgcaaggctagttttgatcaggatttctgctttgacggcctcagcgaggatgaggtgaggaggctcgccgtgagggttaaagcacgggatgagggcaggggacgggatagagggaggctgctgggccagggcgagctctctctaggggcccttctgctgctgtag

SEQ ID NO: 181019 - DNA, 1266 bp, synthetic construct
  misc_feature 1..1266: note = Description of Artificial Sequence: Synthetic coding sequence
  source 1..1266: mol_type = other DNA
atgcggaagaccaacatgtggttcctggagcggctgcggggcagcggcgagaatggggcggctagaggagtgggatccgaagcaggggacaaagcctctaaaggtcccttgtactcgaatgtgctgacccccgataaaattccagacttttttatcccaccgaaactgccttcgggacctgcagaaggtgagggccaagcagctctgggtccctctacaagtgagcagaatttggccagtgcggcgcctcgccagacccccaggtctccaaggctccctgctaaactggctgctgaaagcaagagcctactcaaggccgctacacgacatgtaatccaaattgaaagcgcggaggattggttgagtgaggaagctaccgacgcagaccctcaggctcaaggtgccatgagcctgccctcagtgcctaaggcccaaacgagctacggatttgctatgctagccgagagtcctcacacacggcgtaaagagtcccttttccatagtgagcacggggctctggcacaagtgggctctcccggggccgggaggcgcagagcagccgccaaagccaatggaggcgatggaggtccgcgcgaggcgggtggggcattaatgagccccgggaggtatttctcaggcggcgagtccgacacaggatcttctgccgaatcgtcacccttcggatctccgctgctgtcccgttctgtaagcctcctgaagggctttgctcaggattcacaagccaaggttagtcaactacgacactccgtcggtcggcacggaagtctctcggctgacgacagtacgccggatgcctccccaggtagcaggaggcgactgaccaggagagcccccccagagccaggacctgagagtgggcaggcgagaggagaacataccgtgcacgtggggccgcgggggagcgttcggctgttagcagaatacgaggctggccaggcacggctcagagtgcacctgctcgcggccgagggtctctacgaccggttgtgtgacgcccgcagtatcaactgctgcgtgggcctgtgcctcgtacctggaaagttacagaagcaaaggtccacaatcgtgaagaacagtaggaggccagtgtttaatgaggatttcttcttcgatggcttggggccggcctcggttcggaaattagcccttagaatcaaagtggtgaacaagggctccagccttaagcgggataccttgttaggtgaaaaagagctgcccctgacgtccctactacctttcttatag

SEQ ID NO: 181020 - DNA, 3945 bp, synthetic construct
  misc_feature 1..3945: note = Description of Artificial Sequence: Synthetic coding sequence
  source 1..3945: mol_type = other DNA
atgctggaccccagcagcagcgaggaggagagcgacgagatcgtggaagaagagtctggtaaagaggttctgggcagcgcaccatccggcgcaagactgagcccgtcaaggacatctgaaggatcggctggctccgctggtctgggggggggcggcgctggagcaggcgccggtgtgggtgcaggtggcgggggtggatccggcgcttcaagcgggggcggggccgggggactgcagcctagctctcgcgccggtggcgggcgcccctcatcaccctccccaagcgtcgtgtccgaaaaggagaaagaggaactggagcggctccagaaggaggaggaagagcgcaagaagcggcttcaactttacgtctttgtgatgcgctgcatcgcctaccccttcaacgctaagcagcccaccgatatggccaggcgccagcagaagatttcaaagcagcagctgcagaccgtcaaggacaggtttcaggccttccttaacggcgagactcagataatggccgacgaggcctttatgaatgctgtacagtcctactacgaagtcttcctcaagtcagaccgggtggctcggatggtgcaaagcggcggatgtagcgcgaatgattccagagaagtcttcaagaagcacattgagaagagggtcagaagtctaccagagatagatggtctgtccaaggaaaccgttctgagctcgtggatggccaaattcgacgccatttaccgtggtgaagaagacccacggaagcagcaggcccgcatgacagcctctgcagcaagtgaattaattctgagcaaagagcagctgtacgagatgttccagaatatactggggataaaaaaattcgagcatcagttgctgtataatgcatgtcaacttgacaatcccgacgagcaagcggcccaaatccgtagagaactggacggacgccttcagatggcggaccagatcgcccgcgagaggaaattccccaaatttgtaagcaaagaaatggagaatatgtatatcgaggaactcaaaagctccgtcaaccttctaatggccaatttggaatcaatgcccgtgtccaaagggggggaattcaaattgcagaaactcaagcgtagccacaatgcgtccattattgacatgggcgaggagtccgaaaatcagctgagcaaatcagatgtggtgctgtctttcagcctcgaggtagtgatcatggaagtccaggggctcaaatctctggcccccaatcgaatcgtttactgcactatggaagttgaaggcggtgagaagctgcagaccgatcaggccgaagcatctaagccgacttggggcacacagggcgactttagtacaacgcacgcacttcctgcagtgaaggttaaactattcacggagtcaactggagtccttgccttggaagacaaggagttgggtcgagtcattctccatcctactcctaactccccaaaacagtcagagtggcataaaatgacagtgagcaaaaattgtccagaccaggacctgaaaatcaagctggctgtcaggatggacaagccacaaaatatgaagcactcagggtacctgtgggccatcggcaaaaacgtatggaagcgctggaagaagcggttctttgtgctggtgcaggtctctcagtacacattcgctatgtgttcgtaccgggagaaaaaagcagaacctcaggagctcttacagcttgatggttataccgtagactacaccgacccgcagcccggcttagaaggcggccgcgctttctttaacgccgtcaaggaaggggacacagtaatcttcgcctccgacgacgaacaagacaggattctgtgggtccaggctatgtacagagccaccgggcagtcccataagcccgttccgccaacacaggtccagaagctcaatgcaaaggggggcaacgttccccaactggatgctccaatcagccaattctacgcagaccgtgctcagaaacacggcatggatgagttcatttcaagtaatccatgcaattttgaccacgcatccttatttgaaatggtacaaagactgactttggatcaccggctcaatgactcctacagctgtcttggatggttcagcccggggcaggtctttgtcctggatgagtactgcgcccgcaatggcgttagagggtgccaccgccacctgtgttacctgagagacctactggagcgtgccgaaaacggagcgatgattgacccaaccctgctgcactactcctttgccttttgcgcctcacacgttcacgggaatcgccccgatggtatagggacagtgaccgttgaagagaaagaacgattcgaggagatcaaagagcggttacgggtgctgcttgaaaaccagatcacacactttcgatattgctttccattcggtagacccgagggggccttaaaagcaactctatcactcttagagagagtgttgatgaaagacattgtgacaccagtccctcaagaagaggtgaagactgtgatcaggaagtgccttgagcaggctgcgctcgtcaattatagcagactgtctgaatacgccaagatagagggcaaaaagcgtgagatgtatgagcatcctgtgttctgtctcgctagccaagttatggatctgactatccagaatgtcggccgactcatcacacctgcaaaaaagctagaagacacgatccgcctcgccgaactggttatagaagtgctgcaacagaatgaggaacaccacgcagaggcattcgcatggtggtccgacctgatggtagagcacgccgagacattcctgtcattgtttgcagtcgatatggatgccgctttggaggtccaacctcctgacacttgggattcctttcccctcttccagctcctgaacgactttctccgcaccgattacaacctgtgcaacggtaagttccataagcacctccaggacctgttcgcaccactggtggtgcgctacgtggacctcatggaatctagcatcgctcagagcatccatagggggttcgagcgcgaatcatgggaaccagtcaataatggttcgggtacctctgaggacctattttggaagctcgacgccttgcagacttttattagagacctgcactggcctgaagaagagttcgggaaacacctggagcagaggcttaagttgatggcaagtgacatgatcgaaagctgcgtgaaaaggaccaggatcgcctttgaagtcaaactccagaaaacctcccggagcacggacttccgtgtgcctcagtccatctgtaccatgtttaatgttatggtagatgctaaggcgcagagcacgaagctgtgttcgatggaaatgggccaagagcaccagtaccactcgaagatcgacgagctcatcgaagagactgtgaaggaaatgataaccttgttagttgctaagtttgtgactatactggaaggcgttctggccaaattgtcgcgatatgacgaaggtaccctcttcagttctttcctctcttttaccgttaaggcggctagcaaatacgtggatgttcccaagcctgggatggatgtcgctgacgcctatgtgaccttcgtgagacactcacaagacgtgttgagggacaaggtcaacgaggagatgtacattgaaagattatttgaccagtggtacaatagttcaatgaacgtgatctgcacgtggttaactgacagaatggatctacaacttcatatctaccagttgaaaacactgattcgtatggtcaaaaaaacataccgagactttcgactgcagggtgtcctagacagtacccttaattccaagacttatgagacaattagaaataggctcacggttgaggaagccactgctagtgtgtctgagggagggggcttacaaggcatttcgatgaaggacagtgatgaggaggacgaggaagacgactag

SEQ ID NO: 181021 - DNA, 3825 bp, synthetic construct
  misc_feature 1..3825: note = Description of Artificial Sequence: Synthetic coding sequence
  source 1..3825: mol_type = other DNA
atgctggaccccagcagcagcgaggaggagagcgacgagatcgtggaagaagaatcaggcaaggaggtcttaggcagcgctccttccggagccagattgagtccctcacggactagcgaagggagcgcaggctctgccggcctcggcggagggggcgccggggctggagcgggcgtaggcgctggcggcggaggcggatcaggcgcctcatctggcggcggagctggcggacttcagccctcaagccgggccggcgggggaaggccttcatcgccaagcccctcagtggtcagcgagaaagagaaggaggaactagagcggctgcagaaggaagaggaggagcgcaagaagagactccagctgtacgtgttcgttatgcggtgtatagcttatccatttaacgcaaagcagccaacggatatggcacgaaggcagcagaagattagcaaacagcagctgcagaccgttaaggatcgcttccaggctttcctgaatggagagacacaaataatggcggatgaggcctttatgaacgccgtccaatcatactacgaggtctttctgaaatccgacagggttgctcgaatggtccagtcaggcggctgttcagccaacgacagccgagaggtcttcaagaaacacattgagaagcgtgtcaggtccctgcctgagattgatgggcttagcaaggagacagtcctgagctcatggatggcaaaatttgacgccatctataggggggaagaggatcctcggaagcagcaagcccggatgaccgcttctgccgcatctgagctcatactgtcaaaggaacagctgtacgaaatgtttcagaatatcctgggaatcaaaaagttcgagcatcagctgctttataatgcctgccaactggacaatccagatgaacaggcagctcaaattcggagggagctcgatggaaggctgcagatggcagaccagattgcacgggagcgaaagtttccgaagtttgtaagcaaagaaatggagaacatgtacatcgaggaactcaagtcctctgtgaatctcctgatggccaacttggagtccatgccggtgtcaaaagggggcgaatttaaattacaaaaactgaaaagatcccataacgcaagtataatcgacatgggcgaggagtccgagaatcagctgtccaaatcagacgtggtgctctctttcagcctggaggtggttatcatggaagtccaggggttaaagagtctggcccccaatcgaattgtttactgcactatggaagtcgaaggaggtgaaaaattgcagacagatcaggctgaggcttcgaagccaacctgggggacacagggcgatttctccactactcatgcactcccagccgttaaggtgaagctctttactgaatccactggcgtgctcgctctcgaggataaggagctaggcagggtgatcttgcaccccacccccaattcacccaagcagtctgaatggcacaagatgacggtgtcaaaaaattgccctgatcaggacttgaaaattaagctggctgtccgtatggataaacctcagaacatgaaacattccgggtacctttgggcgatcggaaaaaatgtctggaaacggtggaagaagcgcttttttgtgcttgtgcaggtgtcacagtacacattcgctatgtgctcttatagggagaaaaaggccgaacctcaagaacttctgcagttggacggatatactgtggactacactgacccgcaaccagggttagagggcgggagggctttttttaacgcggttaaagagggtgacacagtgatttttgcaagcgacgacgagcaggaccgcattctgtgggttcaggctatgtatcgagcaacaggacagtctcacaaaccagtgcccccaacgcaggtgcagaagctaaacgcaaaggggggaaacgtgcctcagctcgacgcccccatcagccaattctatgcagatagagcacagaagcatggtatggacgaattcattagcagcaatccctgcaattttgaccacgcctcattatttgagatgggatggttcagccctgggcaggtgttcgttctcgacgagtactgcgctcgaaacggggtaagaggatgccaccgtcatctgtgttaccttcgggacctgttagagcgtgcggaaaatggcgcgatgatcgacccaacactgctccattacagcttcgccttttgcgcgtcacacgttcatggaaaccgccctgacgggattggaaccgttaccgtcgaggaaaaagaaagattcgaggaaataaaggaacggctgcgcgtgttgctggagaaccagataactcactttcgttactgttttccctttggccgaccggagggagccctgaaagcaaccctgagcctcctcgaaagagtgctcatgaaagatatcgttacccctgtcccgcaggaggaggtgaagaccgttattcggaaatgcctggagcaggctgcgctcgtcaactatagtaggcttagcgaatacgccaaaatcgaggagaacgtgggacggctaatcaccccggcaaaaaaactggaggacactattaggctggctgagctcgttatcgaagtattgcagcagaatgaggaacatcatgcagaagcgtttgcatggtggagtgacttgatggtcgagcatgccgagacatttctcagtctgtttgctgttgacatggacgcagcattggaggtgcagcccccagacacctgggatagtttcccattgttccaactgctaaatgattttttgagaactgattacaatttgtgcaatggaaagtttcataaacacctacaggatctatttgctccactcgtggtccgatatgttgacctcatggaaagctccatcgcccagagtatccacaggggatttgagcgggagagctgggagcccgttaataatggcagcggcaccagcgaggacctcttctggaaattagacgcactgcagacctttatccgcgatctgcactggcccgaagaggagtttggcaagcatctggagcagcgactgaaacttatggcttccgatatgatcgaatcttgtgttaaacggactcgaattgcatttgaggtgaaactccagaaaacttcacgttcaacagattttagggtacctcagtctatctgtacaatgttcaatgtcatggtcgatgctaaagcacaaagtacaaaactgtgttcaatggaaatgggtcaggagcaccaatatcacagcaaaatcgacgaattgattgaagagaccgttaaggagatgattacccttttggtggccaagttcgtaaccattttagaaggggttctcgctaagctgtcacgatacgatgagggcacactcttttctagctttctgtccttcactgtgaaagcagcaagcaagtacgtggatgttcctaagccagggatggatgtggccgacgcctatgtcacctttgtccgccatagccaggacgtcctcagagacaaggtcaatgaagagatgtacatagagcgactgtttgatcagtggtacaattcatccatgaatgtgatctgcacctggctgaccgacagaatggacttgcagctgcacatctaccagttaaagacactgattcgcatggtcaaaaagacttatagagatttcaggcttcaaggagtgcttgactcaactcttaattccaagacatacgaaactatccggaataggctcacggtggaagaggcaaccgcctctgtgtctgaaggcggtggcttacaggggattagcatgaaggacagcgatgaagaagacgaagaggacgactag

SEQ ID NO: 181022 - DNA, 4080 bp, synthetic construct
  misc_feature 1..4080: note = Description of Artificial Sequence: Synthetic coding sequence
  source 1..4080: mol_type = other DNA
atgctggaccccagcagcagcgaggaggagagcgacgagatcgtggaggaagagtctggaaaggaagttctggggagcgcaccttccggtgcaaggttgtcccccagtcggacctctgaagggagcgcgggcagtgctggacttggaggaggcggtgctggagcaggcgccggggtcggggcaggcggaggtggcggcagcggcgcgtcctccggcggaggtgccggcgggctgcagccatccagtcgtgcaggcgggggtcgcccttccagcccgtctccgtcggtggtgagtgagaaagaaaaagaagaattagaacgcctgcaaaaagaggaggaggaaagaaagaaacgcttgcaactgtatgtgtttgtaatgagatgtatcgcatatccctttaatgcaaagcaacccacggacatggctcgaaggcagcaaaagatttccaagcagcaactccagacagtcaaggacaggttccaagccttcctgaacggggagactcagataatggccgacgaagcttttatgaacgccgtgcagtcctactacgaagtattccttaagtctgatagggtcgcaaggatggtccagagcgggggctgttccgcaaatgacagcagagaggtgttcaaaaagcacatcgaaaaaagagttcggagcctccccgagattgatgggctctcaaaggaaaccgttctgtcttcttggatggcgaagttcgacgcgatttataggggcgaagaggatcctagaaagcagcaggcgcgaatgacggcatctgccgcgtccgagctcatcctgagcaaagaacagctctacgaaatgttccagaatattctcggtatcaaaaaatttgagcatcaattattatacaatgcctgtcaactcgataacccagacgagcaagctgctcagatacggcgagagcttgatggacgattgcagatggctgaccaaatcgcgagggagcgtaagttcccgaagtttgtgtccaaagaaatggaaaacatgtatatcgaggaattgaagtcttccgtcaacctgctaatggccaacctagagagtatgcccgtgagcaagggaggtgagttcaagctccagaagctgaagcgcagtcacaacgctagcataatcgacatgggcgaggagtcagagaaccagctctccaaatctgatgtcgtgctgtctttttccctagaggtcgttatcatggaggtgcaagggctcaagtctttagctcctaaccggatcgtttactgtaccatggaggtggaaggaggagaaaaactccaaactgatcaggcagaggctagcaagccaacatggggaacccagggggacttcagcacaacccatgcgttgccggctgtcaaagtgaagctcttcacagagtccacgggcgttctggccctcgaagacaaggaactgggtcgtgtgattttgcaccctactcccaactcaccaaagcaaagcgaatggcacaaaatgacagtgagcaagaattgtccagaccaggatctcaagatcaaactggcagtgaggatggataaaccccagaacatgaaacactccggatacctgtgggctattggtaagaatgtctggaagagatggaagaaacggttttttgttcttgtccaggtgtctcagtacacattcgcgatgtgctcatatcgcgaaaagaaggcagaacctcaggaactgttacagctggatgggtatacagtggattatacagatcctcagcctggcctggaagggggccgagccttttttaatgctgtgaaagagggcgacactgttatctttgcttcagatgacgagcaagatagaatactgtgggtgcaggcaatgtatcgggctacagggcagagccataaaccggtacccccaacccaagtgcagaaactaaacgctaaaggcggaaatgtgcctcagctggacgctccgataagtcagttctacgcagatcgggcgcaaaagcacggcatggacgagttcatctcttcaaacccttgcaattttgaccacgcctcccttttcgagatggtacaacgcctgacgttagaccatcggctgaacgactcatactcgtgcctaggatggtttagtcccgggcaggtcttcgttcttgatgagtactgtgcgcggaacggagtcagggggtgccaccgacatctgtgttatctgcgggacttactcgaacgcgctgagaatggcgcaatgatcgatccgaccctgttacattactccttcgccttctgcgccagtcatgtccacggtaaccgcccagacggcatagggaccgtgactgtcgaggaaaaggaacgcttcgaggagatcaaagagaggctgcgcgtgctgctggaaaatcagattacccactttagatattgttttcccttcggccgacccgaaggagccctcaaagccaccctttcgctccttgagcgcgttctcatgaaggatattgttacccctgtgcctcaggaggaggtcaagacagtaataagaaaatgtctggaacaggcagctctagtgaattatagtcgcttgtccgagtatgccaagatcgaggctaactcatgtaccacggaaaacgtcggacgcctgattacaccagcgaaaaaactggaagacaccatccggttagcggagcttgtaatcgaggtgctgcagcagaacgaggagcaccacgccgaacctcacgttgataagggcgaagcatttgcctggtggtccgatctcatggtagaacatgcagaaacatttctgtctttgtttgcagtggatatggacgccgctctcgaagtgcagcctcccgacacatgggattctttcccactgtttcaactcctgaacgattttctcaggactgattacaatttgtgtaatggtaaattccataagcacctgcaggatctgtttgctcccttggtcgtacgttacgtggatctcatggagagtagtatcgctcaatccatacatcgcggatttgaacgagagtcctgggaacctgttaaaagcttaactagtaatctgcccaatgttaacttgccaaacgtgaacctccccaaagtgcctaacctacctgtgaacattccgttagggatcccccagatgcccacgttttctgccccttcctggatggcagccatttatgatgctgacaacgggagcggtacctccgaggatttattctggaagttggatgcactgcagacttttatcagagaccttcactggccagaagaggagttcggaaagcacctggaacagagactaaaactcatggccagcgatatgatcgaatcttgtgtcaaacgtactagaattgcatttgaagtaaagttacaaaaaacttcgcggtccaccgattttagggtgccacagagcatttgcacaatgttcaatgtaatggtcgacgccaaagcccaaagcacgaagctctgtagtatggagatggggcaggaaaaatataagaaaatgcgacaccaatatcacagtaaaatcgatgaacttatagaagaaactgttaaggaaatgattacgcttctggtagcaaagtttgtcacaatcctggagggagtgctagctaaactctctcggtatgatgaagggaccctgttctctagttttctcagctttacagtgaaagccgcatcgaaatacgttgatgtgcccaagccagggatggatgttgccgatgcttatgtgacatttgtgcgccattcccaagatgtattacgggacaaagtgaacgaagagatgtacatcgagaggttattcgaccagtggtacaactccagcatgaacgtgatttgcacatggctgaccgatagaatggacctccagctccacatctaccagcttaagaccttaattcgtatggtgaaaaaaacatatcgtgattttcgactgcagggagttctagactcaaccctcaactcgaaaacttacgaaaccatcagaaatcgactaactgtcgaagaagccaccgcctctgtaagcgagggcggaggtcttcaaggcatatcaatgaaagactccgacgaggaggatgaggaagacgattag

SEQ ID NO: 181023 - DNA, 4062 bp, synthetic construct
  misc_feature 1..4062: note = Description of Artificial Sequence: Synthetic coding sequence
  source 1..4062: mol_type = other DNA
atgctggaccccagcagcagcgaggaggagagcgacgagatcgtggaggaggaatccggaaaggaggtgctggggtcagccccttccggagctagactctcgcctagcagaacttccgaagggtccgctgggagtgccgggctcggcgggggcggggcaggggcaggagcgggagtgggcgctggaggtggcggaggatcaggggccagtagcggcggtggggctgggggtctgcaacccagttcaagggccggaggtggccgcccgagtagtccttctccctcggttgtgagcgagaaagaaaaggaggagctggagaggctgcaaaaggaggaggaggaacggaaaaaacgcctccagctgtatgtgtttgtaatgagatgcattgcctaccctttcaatgccaaacagccaaccgacatggcaaggaggcagcaaaagatctccaagcaacaacttcagaccgtaaaggaccgctttcaggcctttcttaatggtgagacccagatcatggcagacgaagcctttatgaacgctgtgcagagttattatgaagtgttcctgaaaagcgacagggtggcacgcatggtgcagtccggcggatgcagtgcgaatgattctagggaggtgtttaagaagcacatcgaaaaaagggtgcgtagcctccctgagatcgacggattgagtaaggagaccgtgctctccagctggatggcaaaattcgacgccatttatagaggtgaagaggatccaagaaaacagcaggctcggatgacagcttcagcagcctcggagctgatcttatctaaagaacagctgtatgagatgtttcagaatattctggggattaagaaattcgaacatcagttgttgtacaatgcctgtcagcttgataaccccgatgaacaggcagcccaaatcagacgcgaactggatggccggctgcagatggcggatcagatcgctcgggaaagaaagttcccgaagttcgtgtcaaaggaaatggagaatatgtatatcgaggagctaaagtcctcagttaacctcctaatggctaatcttgaaagcatgcccgttagtaaaggaggcgaattcaagttacagaaactgaaaagatctcacaatgccagcatcatagatatgggcgaagagagcgagaatcagctgtctaagtcagacgtcgttctctcattcagcctggaagtcgtcatcatggaggtgcaggggcttaagtcactggctcctaatagaatcgtctactgtactatggaagtggagggcggagaaaagctccagaccgaccaagcggaggcaagcaagcctacttggggcacacagggtgacttcagtacaacccacgcccttcccgccgtgaaagtcaaactttttacggaaagtacaggcgttttggctctggaggacaaggagcttggtcgggtgatcctacatccgacaccaaatagccccaagcaaagcgagtggcacaagatgaccgtgtccaagaattgcccggaccaggatctcaagattaaacttgccgtccgcatggataagccacaaaatatgaaacattccgggtatctgtgggcaatagggaaaaacgtatggaaacggtggaagaagcggtttttcgtactagtgcaggtctcccaatacacattcgctatgtgctcttacagagagaagaaagccgaacctcaagaactcttacagctggatggctataccgtcgattacacagatccacaacccgggctggagggaggcagagcatttttcaacgccgtcaaggagggagacactgttatcttcgcctccgatgacgagcaggacagaatcctgtgggttcaggcgatgtatcgggccaccggccagagccacaagcccgtcccacctacccaggtgcagaagcttaacgcaaaaggtggcaacgtaccacaattagacgccccgattagtcagttttatgctgaccgtgcacaaaaacacggtatggacgaatttattagttccaacccctgcaattttgaccacgcttctctcttcgaaatggtgcagcggctgacgttggaccaccggctgaatgattcctactcctgtctgggatggttctcacctgggcaggtctttgtcttggacgaatattgcgcacgcaacggagtgcgaggatgccatagacacctctgttatttgcgagacctactagagcgcgctgagaatggcgctatgatcgatcccactctactgcattattcatttgccttctgcgcctcacacgtccatgggaaccgacccgatggcatcggcacagtgaccgtggaggagaaagagagatttgaagagattaaggagcgtctccgggtccttctggagaaccagattacccatttccgctactgtttccccttcggcaggccagagggtgctctaaaggccactctctcactgcttgaacgcgttttgatgaaagacattgtcacccctgttccccaggaggaagtgaagacagtaattaggaagtgcctggagcaggccgccctggttaactactcaagacttagcgagtacgcgaaaattgaagagaatcagaaggatgccgagaatgtgggcagactgatcacccctgccaaaaagctggaagacaccatccgcttggccgaactggtgattgaagtattgcagcagaatgaggaacaccatgctgaaccgcacgtggacaagggagaggccttcgcatggtggtctgatctcatggtggagcatgccgaaacctttctgagcctgttcgccgtggacatggacgcagcccttgaggtgcaaccgccggatacatgggatagctttcctttgtttcaattactgaatgactttctgagaacggactacaatttatgcaacggcaaatttcacaagcatcttcaggatctttttgcccctttggtcgtaaggtacgttgacctgatggaatccagcatcgcccagtctatacatcggggattcgaacgagagtcatgggaacctgtgaaaagcctgacttccaatctgcccaatgtgaacttacccaacgtgaacttacccaaggtgcctaacttgccagtgaatatccctctggggattccacagatgccaaccttctcggcaccttcatggatggccgctatctacgatgcggataatggcagtggaacatcagaggatctgttctggaaacttgatgcgctgcagacatttattagggacctgcattggccagaagaggagttcggcaagcatctggagcagcgtctgaaactgatggcatctgatatgatcgagtcctgcgtaaaacgcactaggatcgccttcgaggtcaagctgcaaaaaactagccgaagtacagattttagagtgccccaatccatctgtacaatgtttaatgtcatggtggatgctaaggctcagtctacaaaactatgcagcatggaaatgggacaggagcaccagtaccactccaaaatcgacgagctgatagaggaaactgtgaaagaaatgatcactctgttggtggcgaaattcgtgactatcctggagggagtgctggctaagctgtccaggtatgatgagggcacattattttcgtctttcctttccttcacagtgaaggccgctagcaagtatgtagatgtgcccaaaccaggtatggatgtggctgacgcctacgtgacctttgtccgccacagtcaagatgtgctgcgcgataaggtcaatgaggaaatgtacatcgagcgcctgttcgaccagtggtacaacagtagcatgaacgtgatctgtacttggctcaccgatcgaatggacctgcagttacacatttatcaattaaaaacactgatacggatggtgaagaaaacttatagggatttccgcttgcaaggtgtcctggacagtacgctcaattctaagacatacgagacgattcgaaatcgtctaacagttgaagaggcgaccgcaagtgtgagtgaaggaggggggcttcagggcattagcatgaaggactctgacgaagaggatgaagaggacgattag

SEQ ID NO: 181024 - DNA, 1038 bp, synthetic construct
  misc_feature 1..1038: note = Description of Artificial Sequence: Synthetic coding sequence
  source 1..1038: mol_type = other DNA
tgactgcccaacgtgaacctgcccaacgtgaacctgcccaaggtgcccaacctcccagtgaacattcccctggggattccccagatgcccactttctcagccccatcctggatggccgccatttacgatgccgacaatggcagtgggacgagtgaagatttgttctggaaactcgacgcccttcagacatttattagagacctgcattggcccgaagaggagtttggcaagcacctggagcagagattaaaacttatggcatcagacatgattgagagctgtgttaagcgtaccaggatagccttcgaagtgaagttacagaaaacaagtcggagcaccgactttcgagtcccacagtctatatgtacaatgttcaatgtgatggtggatgcaaaggcccaaagcacaaagttgtgtagcatggagatgggccaggaattcgctaaaatgtggcaccagtaccattcaaagatcgacgaactcattgaagagactgtcaaggaaatgatcacgctgctcgtggcaaaatttgtgactattttagaaggtgtgctggctaagctctcccgttacgacgaagggactctgttcagttcatttctctcgtttacagtaaaggcagccagtaagtacgtagacgtaccaaaaccaggcatggatgttgctgatgcctacgtcactttcgtacggcatagccaggacgtcctgcgagataaagtaaatgaggaaatgtatattgagcggctctttgaccagtggtacaatagcagcatgaatgttatctgcacatggttgacagatcggatggaccttcagctgcacatctaccagctcaaaactctgatacgaatggttaagaaaacctaccgcgactttaggctgcaaggcgtgcttgacagtactctgaattccaagacctacgagactatacgtaaccggctcacagtggaagaagccacagcgtccgtgtctgagggcggggggctacaggggatcagtatgaaagatagtgatgaggaggacgaggaggatgactag

SEQ ID NO: 181025 - DNA, 3768 bp, synthetic construct
  misc_feature 1..3768: note = Description of Artificial Sequence: Synthetic coding sequence
  source 1..3768: mol_type = other DNA
atgctggaccccagcagcagcgaggaggagagcgacgagggcctggaagaagagtcgagggacgtgctggtagctgctggttcttcccaaagagctcctccagccccgacacgggaagggaggagagatgcccctggcagggcagggggcggcggcgctgctcgcagcgtgtccccctctccctctgtgctgtccgaagggcgggatgaaccccagcgtcagcttgacgacgagcaggagagaaggatccggcttcaactgtatgttttcgtcgttcggtgtattgcttatccattcaacgccaagcagccaaccgatatggccagaagacagcagaaactcaacaaacagcagctacagctcctcaaggagaggtttcaggcctttctgaatggtgagacccagattgtggcagacgaggccttctgcaatgccgtcaggagctactatgaagtgttcttgaagtccgatagggtggctcgcatggtacagagtggtggctgctctgctaacgatttcagggaagtctttaagaagaacatcgaaaagcgagtgcggagtttacccgaaatcgatggattgtccaaggagacagtgctgtcatcctggatcgccaagtacgacgcgatttacaggggcgaggaggatttgtgcaagcagccaaacagaatggccctgagcgcagtgagtgagcttatccttagcaaagaacagctgtacgagatgtttcagcagatcctaggaatcaagaagctggaacaccagctcctctataatgcctgtcaactggacaacgccgacgagcaggccgctcaaatccgtagggagctcgacggccggttgcaactagccgacaaaatggctaaagagagaaagttccccaagtttatcgccaaagatatggagaacatgtatattgaggaactcaggtccagcgtcaatctgctgatggctaatctggagagtctccctgtgagcaaggggggccctgagttcaaattacaaaaactgaaacggtcccaaaattccgcatttctggacattggtgatgaaaacgagattcagctgagtaagtctgacgttgttctcagcttcacgcttgagatcgttattatggaggtgcaggggctgaaaagcgttgctcctaatcggattgtttactgcacaatggaagtggagggagaaaagctgcagacagaccaagccgaggcctcacgtccacagtgggggacacaaggggactttacaaccactcacccaagacccgttgttaaggtgaagctgttcacggaatctaccggcgtgctcgcattggaagacaaggagttaggacgggtcatcctctaccccacatcaaacagctcaaaaagcgccgaattgcacaggatggtggtccccaaaaacagccaggactccgatctgaaaataaaactcgctgtgagaatggacaagccggcccacatgaaacacagcggatatctgtacgcactaggccagaaggtttggaagcgatggaaaaaacggtattttgtgttggtacaagtgtcccaatacaccttcgctatgtgctcttatagagagaaaaagtctgaaccgcaggagctgatgcaattagaagggtacactgttgattacaccgacccccacccaggactgcaagggggatgcatgttttttaacgccgttaaggaaggagacaccgttatcttcgcctctgatgacgagcaggacagaattctatgggtccaagctatgtaccgggcaacggggcaaagctacaagcccgttccggcaatccagacgcagaagctcaaccccaaaggcggaacactgcacgcagacgcccagctttacgctgataggtttcagaaacacgggatggatgaattcatttccgccaatccttgtaagcttgatcatgcctttttattcaggattctgcaacgccagactttggaccatcgtctgaacgactcttacagctgcctgggttggttttccccgggacaggtttttgtgctagacgaatactgtgctaggtatggagttagaggctgccaccggcacctatgttacctcgctgagctcatggaacacagcgagaatggagccgtcatcgatccaacccttctccactactcatttgcattttgcgcaagtcatgtgcacggaaaccggcctgatggtattgggacagttagcgtggaggagaaggaaaggtttgaagagattaaagaaaggctttcttcccttttagaaaatcagatcagtcacttccgctattgctttccatttggaagaccggagggcgcccttaaggccactttatctctcttggagagggtcttgatgaaggacatcgccacgccaatccctgccgaggaagtgaagaaggtggtgagaaaatgtctcgaaaaagccgccctcattaactacacccgtctaaccgagtacgctaagatcgaagaaaccatgaatcaagcaagccctgctagaaaactggaggaaatcctgcatttggccgaactttgtatagaggtgctgcaacagaatgaagagcatcacgccgaagcctttgcttggtggcctgatctgctcgcagaacatgctgaaaaattctgggctctatttacagttgacatggacacagccttagaagcgcaacctcaggacagctgggattcgttcccactctttcaactcctcaacaactttctaagaaatgacactctgctttgtaatggaaaattccacaagcacctgcaagagattttcgtgccactggtggtgcggtacgtcgacctcatggagtcctccattgcccaatcaatacatcgcggattcgagcaggagacttggcagcccgtgaacaatggatccgcaacgagtgaggaccttttttggaagttagacgcgcttcagatgttcgtctttgatctccactggcccgaacaggagtttgcccatcacttagagcaaagactgaagctcatggcaagcgatatgctcgaggcttgcgttaagcgcacgaggaccgccttcgaactgaaactgcagaaggcaagtaagactaccgatctccggattccagcctcagtgtgtacaatgttcaatgtgctggtggatgcaaagaagcagtcgacaaagctgtgtgccctggacggcggccaagaggtgtgcagaatctttcagcagtatcatagtaagatcgatgacctgatagacaactccgttaaagagattatttcactgctggtgagtaaatttgtctcggtgcttgagggagtgctcagcaaactgagccgctacgacgaaggcacttttttttcatctattctttcctttaccgtcaaagccgctgctaaatatgtggatgtccccaaaccaggcatggatttggcagacacttatataatgttcgttagacaaaatcaggacatcttgcgcgaaaaggtaaatgaggaaatgtacattgagaagctatttgaccagtggtactcctcctctatgaaagttatatgcgtctggctgactgacaggctagatctccagctacacatttatcagctgaaaaccctaataaagatcgttaagaagacttatcgcgattttcggctacagggtgtgttggagggtaccctcaacagcaaaacatacgataccgtccatcgacgtttaactgttgaagaggcaacagcaagtgttagcgagggaggtggcctgcagggaataaccatgaaggactcggatgaggaggaggagggctag

SEQ ID NO: 181026 - DNA, 3885 bp, synthetic construct
  misc_feature 1..3885: note = Description of Artificial Sequence: Synthetic coding sequence
  source 1..3885: mol_type = other DNA
atgctggaccccagcagcagcgaggaggagagcgacgagggcctggaagaggagagccgggatgtgttagtggccgcgggatcctctcagcgggcacctccagctccgaccagggagggaaggcgggacgctccaggccgggcaggtggcggcggtgcagcacggtcagtgagtccctctccatccgtattgagcgaggggagagacgagcctcagcggcagctcgacgacgaacaagaacgccgaattcgtctccaactttatgtgtttgtggtccgctgcatcgcttacccttttaacgctaaacagccgacagatatggccagacgtcagcagaagcttaacaagcagcagttgcaactgcttaaggagagatttcaggcctttttgaatggggagacccagatcgtggcagacgaagcattctgtaacgccgtacgctcctactatgaggtcttcctcaagtcagacagggttgccagaatggtgcagagcggtggttgcagcgccaacgactttcgggaggtgtttaagaaaaatattgagaaacgcgtgaggtctctaccagagatcgacgggctaagtaaggaaacagtgctcagcagttggattgcaaaatacgacgcaatatatcggggggaggaggacctctgcaagcagccgaatcgaatggcgcttagtgctgttagcgaactgatcctgtcaaaggagcaactgtacgaaatgtttcagcagatcctgggtattaaaaaacttgagcaccagttgttgtataacgcctgccagctggacaacgccgatgagcaggcagcacaaatccggcgtgagctagacggacggctacagctcgccgacaaaatggccaaggaaagaaagttccccaagttcatagccaaggatatggaaaacatgtatatcgaggagctaagaagctcagtgaacttgctgatggcaaacttagaaagtctgcctgtgagcaaaggaggcccagagttcaaactgcagaaactgaaaaggtcacagaactctgcttttctggacataggggatgagaacgaaatacaactctccaaaagcgacgtggtccttagttttaccctggagattgtcataatggaggtacagggcctgaaatccgtggcccctaatcgcattgtgtactgtacaatggaggtagaaggcgaaaagctgcagaccgatcaagccgaagccagtaggccccagtgggggacccaaggggactttacaaccactcaccctcgacccgtggtaaaggttaagctgtttacggaaagcaccggggtgctggcgttagaggataaagaactcggacgtgttattctctatcctacgagcaatagcagcaagtctgctgagttacacaggatggtcgtccctaagaactcccaggatagcgatctgaaaattaagctggccgtgagaatggacaagccagcgcacatgaaacattctgggtacctatatgccttgggccagaaggtgtggaagcggtggaaaaagagatattttgtgctggttcaagtgagccagtatactttcgccatgtgttcatacagggagaagaaatccgagccacaagaactgatgcagttagagggctatactgtagattataccgatcctcaccctgggcttcaaggcggatgcatgttcttcaacgccgtgaaagagggggataccgtgatcttcgcctctgacgatgagcaagaccggattctttgggttcaggctatgtaccgggccacagggcagagctacaagccggtccccgccatacagacccagaagctgaaccccaaaggcgggactttgcacgcagacgctcagctttcagaatttactgacgcagatcgcttccaaaagcatggcatggacgagttcatctccgctaacccttgtaaacttgatcatgcttttttattcaggatcctccagcgacagacgctcgatcatagattgaacgacagttactcctgtttgggctggttcagtcccgggcaagtgttcgttttggacgagtactgtgctcgctacggcgtaagagggtgccacagacacctgtgctacctggcggaattgatggagcactctgagaatggcgctgtcattgacccgacgctgctgcattactcattcgctttttgcgcctcccacgtgcacggtaaccggcccgatggaatcggtactgtgtccgtggaggagaaggagcgctttgaggagattaaagagcgactctcttccctcctagagaaccagatcagtcatttccgatattgctttcctttcggcagacccgagggcgccctgaaagccaccctaagccttctggaacgggtactgatgaaagatatcgccacacccattcccgcggaggaggtgaaaaaggtcgtacgcaagtgcttggaaaaggctgccctcatcaactatacccgtttaaccgaatacgcaaagatcgaggagactatgaaccaggcgagtcctgccaggaaattggaggagatcctccatctcgcagagctgtgtatcgaggtgttacagcagaatgaggagcaccatgcagaggctttcgcatggtggcctgatttgttagccgaacacgcagagaaattctgggcattgttcaccgtggacatggataccgccctggaggcacagccccaagatagctgggacagttttcccctatttcaattactgaataattttctgagaaatgatactctgctatgcaacgggaagttccataaacacctccaggaaatctttgtgccactggtggtacgctacgttgatcttatggagtcatctatcgcgcagtcaatccatagagggttcgagcaggagacatggcagcctgttaaaaacatcgcaaatagtctgccaaacgtcgctttacccaaggtcccctctttgcccctgaacttacctcaaattcccaatattagcaccgcttcttggatgccttctctctacgaaagtactaacggatccgcaacgtctgaggatttgttttggaagttggatgctctacagatgttcgtatttgatctccactggccagaacaagagttcgcacatcacctcgagcagcggctaaaacttatggcctcggacatgctcgaggcctgcgtgaagaggacccggactgccttcgaactgaagctccagaaagcgagcaagacgactgacctgagaataccagcaagcgtctgcacgatgtttaatgtgcttgtcgatgcaaagaagcagtcaactaagctatgcgccttggatggcggacaggagcagcagtaccatagcaaaatcgacgatctcatagacaatagtgtgaaggaaattatttccctcctagtgtcaaaattcgtgtcagtcttggagggcgtactgtctaaactaagccgctacgatgagggaacatttttctctagcatcttaagcttcacagtaaaggccgccgccaagtatgtggacgtgcccaagccaggaatggatcttgccgatacctacattatgtttgtgcgtcagaaccaggatatcttgcgcgagaaggtaaacgaagagatgtatattgaaaaactattcgaccaatggtacagcagtagtatgaaagtgatctgtgtatggctgaccgaccggctggatctccagctacatatctatcagctgaaaaccttgatcaaaatcgttaaaaagacctatagggacttcagactccaaggggttctcgaaggcactcttaatagcaaaacttacgatacagtgcaccggaggctcactgtggaagaggcaaccgcgtcagtctcagagggcggcgggctgcagggaattacgatgaaggattccgacgaagaagaggagggctag

SEQ ID NO: 181027 - DNA, 1410 bp, synthetic construct
  misc_feature 1..1410: note = Description of Artificial Sequence: Synthetic coding sequence
  source 1..1410: mol_type = other DNA
atgaaccaggccagccccgcccggaagctggaggagatcctgcaccttgctgagctctgtattgaggtgctccaacagaatgaggagcaccacgcggaactgaggcacgccttcgcctggtggcctgacctcctggcagagcatgcagagaagttttgggcgctgttcacagttgacatggatactgccttggaggctcagcctcaggattcatgggactcttttcccctcttccaactgctgaataatttcctgaggaacgatacactactgtgcaacggaaagttccacaaacacttgcaggagatcttcgttccactcgtggtacggtatgtcgatctgatggaaagctccattgctcagtctatccacaggggatttgaacaggaaacctggcagccggtcaagaatattgccaactccttaccgaacgtagctctgcccaaagttcctagtctgcctctgaatctgcctcagattcccaatatcagcacagcttcatggatgccatctttgtatgaaagcactaatggtagtgccacttcagaggatctgttttggaagctggatgcccttcagatgttcgtatttgatcttcattggccggagcaggagttcgcccaccacctggaacagagactgaaactcatggccagtgatatgctcgaagcctgcgtcaaaagaacccggaccgcttttgaactgaagttgcagaaagcctccaagactacagatttgaggatccctgctagcgtgtgcactatgtttaatgtactcgttgatgctaaaaaacagtctacaaagctgtgcgcactggacggcggacaggagcagcagtaccacagcaagatcgacgacctgatagacaactctgtgaaggaaataatcagcttgcttgtgtccaaattcgtttccgtgctggaaggcgtgcttagcaagttgagcaggtatgatgagggtaccttcttctctagcatactctcttttaccgtaaaagcagcagccaaatacgttgatgtgcccaaaccaggcatggatcttgcagatacttatattatgttcgttcgacagaaccaagatattttacgtgaaaaagtgaacgaagagatgtatattgaaaaactctttgaccaatggtacagttcttcgatgaaggttatctgtgtgtggttaactgacaggctggatctgcagctgcatatctaccagctcaaaacgttgataaagatcgtgaagaaaacttacagagactttcgcctgcaaggcgtcttagaaggcacactgaactcaaaaacctacgacacggttcaccgcaggttgacagttgaggaagcaacagcatctgtgtcagagggcggaggcctgcagggtatcaccatgaaagactcagacgaagaggaggaaggctag

SEQ ID NO: 181028 - DNA, 2700 bp, synthetic construct
  misc_feature 1..2700: note = Description of Artificial Sequence: Synthetic coding sequence
  source 1..2700: mol_type = other DNA
tgagagatccagctgagcaagagcgacgtggtgctgagcttcaccctcgaaatcgtgattatggaggtgcaggggctcaagtctgtggctcccaatcggatcgtgtattgtaccatggaggtggagggggaaaaattgcaaactgatcaggccgaggctagccggcctcagtggggaactcagggcgacttcacaactacgcatcctcgacccgttgtaaaagtgaaactgttcaccgagtctacaggggtgctggccttagaagacaaggagttaggacgtgtcatcctgtatcccacatccaacagtagcaagagcgcagaacttcatcgtatggttgtccccaaaaactcgcaagactcggatctgaaaattaagctggccgttcgaatggataagccagcccacatgaaacattctgggtatctgtatgcattggggcagaaggtttggaagagatggaagaagaggtatttcgttctcgttcaggtgagccaatacacgtttgcaatgtgctcttacagagagaaaaaatccgagccacaggagttgatgcagctggagggttacaccgtagattacacagacccgcaccctggccttcaggggggttgcatgttctttaacgccgtaaaagaaggcgatacggtgatcttcgctagtgacgacgaacaggataggattttgtgggttcaagcgatgtatcgggcaaccggacaatcctataagcccgtgcctgcgatccaaactcaaaagcttaacccaaagggaggcacactccacgctgatgcacagctatatgccgaccgatttcaaaagcacggcatggacgaattcatttcagctaacccttgcaagttggatcacgcctttctgtttcggatcctacagcgccaaactctggaccatcgcctgaacgattcctactcatgcttgggatggtttagtcctgggcaggtgtttgtcctggacgagtattgcgcaaggtatggggtcagggggtgtcatcgccacttatgttacctcgccgaattgatggaacactccgagaatggtgctgtaatcgatccaacgcttctacattattcctttgccttttgcgcatctcatgtccacggtaataggcctgatgggatcggcactgtgtcggttgaggagaaggaacggtttgaggagattaaagaaagactcagctcactcctggagaatcaaattagccacttccgttactgtttccccttcgggagacctgagggagcacttaaggctaccttgtccttactcgaacgagtattaatgaaagacattgcgacacctatcccagcggaagaagtgaaaaaagttgtgcgaaagtgtttggagaaggcagccctgataaattataccagactcacagaatacgctaaaatcgaggagactatgaatcaggcgagccctgctcgaaaactggaggaaattctccacctcgccgaactgtgtatcgaagtactgcagcaaaacgaagagcaccatgctgaggcttttgcttggtggcccgacctgctggctgaacacgctgagaagttttgggctttgttcacagtggacatggatacagccctggaagcacagccacaggattcttgggactcattcccactctttcaactgttgaacaatttcctcagaaacgatacgttgttgtgcaatggaaaattccacaagcacttgcaggaaattttcgtgccactggtcgtacggtatgtggatttaatggaatcaagtattgcacaatctatccacaggggttttgaacaggagacctggcaacctgtcaataatggctctgctaccagtgaggacctgttctggaagctggacgcactgcagatgttcgtattcgacctgcattggccggaacaagagttcgctcaccacctggaacagcgccttaagctcatggcatccgatatgctggaggcttgcgtcaagcgaacaagaacagctttcgaactcaagctgcagaaggcctctaagaccaccgatctaaggatccctgcttccgtttgtacaatgttcaatgtgctcgttgatgcaaaaaaacaaagcacaaagttatgcgctctcgatggtggacaggaacagcagtaccactccaagatcgatgacctgatagacaacagcgtcaaggagatcatctctctgctagtcagtaaattcgtgtctgtgcttgagggcgttctgagcaagctctcacgatacgacgagggtaccttcttctcttcgatcctgagcttcacagtaaaggctgccgccaagtatgtggacgtgccaaaacccggcatggatctggccgatacctacatcatgtttgttcgacaaaatcaagacattctgcgcgagaaggtgaatgaagaaatgtatattgagaagctgtttgatcagtggtattcttcttctatgaaggtaatttgcgtgtggttgacggataggctggatctgcaattgcacatttaccaactgaagaccctgattaaaatcgtgaaaaaaacctacagggatttccgacttcaaggggtgctcgaaggcacgctgaatagcaaaacctatgatactgttcatcggcgcctaactgtagaggaagcaacagctagcgtcagtgagggcggcggattgcagggaataacaatgaaagactctgacgaagaggaagagggatag

SEQ ID NO: 181029 - DNA, 3768 bp, synthetic construct
  misc_feature 1..3768: note = Description of Artificial Sequence: Synthetic coding sequence
  source 1..3768: mol_type = other DNA
atgctggaccccagcagcagcgaggaggagagcgacgagggcctggaggaggagagcagggacgtgcttgtcgctgcaggctcctcgcagagagcccctcctgcccccacgcgtgagggccggcgggacgccccgggaagggccggtggaggcggcgcggcgaggtccgtgtcaccctcaccaagtgttctgtctgaaggccgggacgaacctcaaaggcaattagatgatgagcaggaaaggcggataaggctccagttatatgtcttcgtggttcggtgcattgcctatccattcaacgccaagcagccgacagacatggcccgcaggcagcagaagctaaataagcagcagcttcaactgctgaaagaaaggttccaagcttttttaaacggggaaacccaaatcgtcgccgacgaggcattttgcaatgccgtgaggagttactacgaggtgttcttaaagtctgaccgagtagcaagaatggttcagagtggcggctgctccgccaatgatttccgggaagtgttcaagaagaatatcgagaaaagagtgaggagccttcccgaaattgacggcttaagcaaagagacagtactgtcttcatggatcgctaagtatgatgccatatatcgtggagaagaggatctctgcaagcaaccaaaccgcatggcgctttcagccgtgagcgaactgattctgagcaaggagcaactttatgagatgttccaacagattcttgggatcaagaaattggagcatcagctgctttataatgcatgccagctggataatgcagacgagcaggccgctcagatccgcagggagttggatggccggttgcagctcgccgacaaaatggccaaagagaggaaatttccaaaattcattgccaaagacatggaaaacatgtatattgaagagctccgcagctccgtgaacctactgatggcaaatctggagtctcttcccgtaagtaagggcggtcctgaattcaaacttcaaaaactcaagagatctcagaactccgctttcctggacattggtgatgagaacgagatccagctgtcaaaaagcgacgtggtcctgtcgttcacgctcgaaatcgtaattatggaggtgcaggggctgaaatccgttgcacccaatcgaatcgtctactgcactatggaagtggagggggagaagctccagacagaccaggcggaggcctcaaggccacagtggggaacacagggcgattttaccaccacccacccacggcccgtggtgaaagtaaaactcttcactgagtcaacgggcgttctcgcccttgaagacaaagaacttggccgcgtgattctgtaccctacctctaattcaagtaaatcagcggagctgcaccgtatggtcgtgccaaaaaacagccaggacagcgatttaaagatcaaactcgcagtgcggatggataagcccgcccatatgaaacactccggttacctctacgctctgggacaaaaagtgtggaaacgatggaagaagaggtattttgtgctcgtccaggtgtcccagtacaccttcgcaatgtgctcttacagggagaagaaatcagaaccacaggagctaatgcagctcgagggctatacagtagattataccgacccgcaccctggtctgcagggcggctgcatgttcttcaatgccgtcaaagagggcgacactgtgatatttgcctccgacgacgaacaggaccgtattttatgggtccaggctatgtatcgcgcgactgggcagtcttacaagcctgtgcccgccatccagacccagaaattaaacccaaagggaggaactctgcacgccgacgcacaactgtacgccgatcgctttcagaagcacggcatggacgagtttatcagtgccaatccctgcaaacttgaccacgcctttttatttagaattctgcagagacagactctcgatcatagactgaatgacagctatagctgcctggggtggttcagcccggggcaagtgtttgtactggatgaatactgcgcccgctacggggtgcgcggttgtcacaggcatttgtgttatcttgctgagctgatggagcattccgagaatggggcagtcattgatcccacgctcctacactacagctttgctttctgcgcctcccacgtgcatgggaacagacccgacggtatcggaaccgtttcagtggaggaaaaggagcgcttcgaggagattaaggagcggctgagctctctgctcgaaaatcagataagtcacttccgctactgtttcccctttggacgccccgagggggctttgaaggccaccctgagccttctggagagggtgttaatgaaagatatcgctacacccattcctgccgaggaagtgaaaaaggtcgtaagaaagtgtctggaaaaggcagctttaataaactataccagactgactgagtatgctaagatagaggaaactatgaatcaagcgtcccccgctaggaaactcgaggagatactgcacttagctgaactgtgtattgaagtgttgcagcaaaatgaggagcatcatgctgaagcctttgcttggtggcccgaccttttggccgaacatgccgaaaaattctgggcgttattcaccgtggatatggataccgcccttgaagctcagcctcaggattcctgggatagttttccgctcttccaactcctgaacaatttcctgcggaatgacaccctgctttgcaatgggaaattccataaacacctgcaggagatctttgtgccattggtggtgagatacgttgatctcatggagtcgtccatagctcagagcatccacaggggttttgagcaggagacctggcagcctgttaataatgggtctgcaacgtccgaggacctcttctggaagcttgacgcacttcagatgttcgttttcgacttacattggcccgaacaggagtttgctcatcatttagagcagcgtctgaaactcatggctagcgatatgctagaggcctgtgtgaagcggacaaggacggccttcgaactgaagctacagaaagcctcaaagacaactgatctgcgaatacctgcttcagtctgcacaatgttcaacgtacttgtggacgctaagaagcagtctacaaagctgtgtgccctggacgggggccaggaattcggttctcagtggcaacagtaccacagcaagatcgatgatctgattgacaactcagtgaaagaaattatcagtctgctcgtctccaagtttgtgtctgtcctggagggggtattgtctaagctgagcaggtatgatgagggaacttttttctcctcaatattatccttcacggtgaaggccgctgccaaatacgtcgacgttccaaagccaggaatggatctggccgatacctatattatgttcgtgcgacagaatcaggatatcctgagagaaaaggtgaacgaggagatgtacattgaaaagctctttgaccaatggtactccagtagcatgaaagtcatctgtgtgtggttgactgatcgactggaccttcagcttcacatctaccagctcaagacgctcataaagattgtgaagaagacataccgcgactttcgcttgcaaggggttctggaagggacccttaacagcaaaacgtacgataccgttcacagaagactgactgttgaggaagccacagcaagtgtgagtgaggggggcggactccaggggataactatgaaggactccgacgaagaggaagaaggttag

SEQ ID NO: 181030 - DNA, 3906 bp, synthetic construct
  misc_feature 1..3906: note = Description of Artificial Sequence: Synthetic coding sequence
  source 1..3906: mol_type = other DNA
atgctggaccccagcagcagcgaggaggagagcgacgagggcctggaggaagaatcgagggatgtcttggtggctgccggttcctcacagagggcgccaccagcacctacaagagagggacgccgggacgccccaggccgtgctggagggggcggcgctgcccgctccgtgtctccctccccaagtgtcctgtcagaagggagagacgagcctcagagacagttggacgatgagcaagagcgtcgcatccgcctacagctttacgtgttcgtggtgcggtgcatcgcctatcccttcaatgccaaacaaccaaccgacatggccagaagacaacagaaactgaataagcaacagctccagctgttgaaggaaagatttcaggcattcctcaacggcgaaacacagatcgtggccgatgaagccttttgtaatgccgtgcgctcatattacgaggtatttttgaagagcgacagggtggcccgcatggtgcaatctggtggttgttctgccaacgatttcagagaggtctttaaaaaaaatatcgagaaacgtgtgcggagtctgcccgaaattgatggcctctcaaaagagaccgtgctgtccagttggatcgctaagtacgatgccatttacagaggggaggaagatctgtgcaaacagccaaaccgtatggcccttagtgctgtgagcgaacttatactctcaaaggagcagctttacgaaatgttccagcagatcttagggatcaagaagctggagcatcagcttctttataacgcgtgtcagctggataacgctgacgaacaggctgcacagattcgccgcgaattggatggcagattacagctggccgacaagatggccaaagaacgcaagttccctaaatttatagccaaagatatggagaacatgtacattgaggaactgcggagcagcgtcaacctcctgatggcaaatctggagagcctcccagtgtctaaggggggccctgagttcaagctgcaaaaattgaaacgcagtcagaatagtgccttcttggatatcggagacgaaaacgagatccagctctcaaaatctgacgtcgtgctgtcattcacgttagaaatcgtgatcatggaagtccagggcctgaaaagtgtcgcaccaaatcgcattgtgtattgtactatggaagtcgaaggagagaaactgcaaaccgaccaggctgaggccagtcggccacagtggggaacccagggggatttcacgaccacgcacccgagacctgtcgtgaaagtgaagctgtttacggaatccaccggagtgctcgccctcgaagataaggaactcggtcgggttattctgtacccgacatccaacagctccaagagcgccgaattgcacaggatggtcgtgccaaagaattcacaggattccgatctgaaaatcaaactcgccgtgcgcatggataagccagcacatatgaaacattccggctacctctacgcactgggccagaaggtgtggaagcgatggaagaagcgctacttcgtactggtgcaagtgagtcagtatacctttgcaatgtgtagctatcgtgagaagaaatccgaaccacaggagcttatgcagctggagggctacacagtggactacacagatccacacccaggtctgcagggcggatgcatgtttttcaatgctgtcaaggaaggagatacagtcatatttgcaagtgatgatgagcaagatcgcattctgtgggtgcaggcaatgtacagagctactggccagtcgtataaaccagtgcccgcaattcagacccagaagctgaaccccaaagggggcacccttcatgcagacgcccaactcagcgagttcactgacgcagaccggttccagaaacatggtatggatgagtttataagtgcaaatccatgtaaactggatcacgcattcctctttagaatcctccaacgacagaccctcgatcacaggctgaatgactcctattcgtgccttggctggttctcacctggtcaggtgtttgtgctcgatgagtactgtgccagatacggcgtacggggctgccacaggcatctgtgctatctagcagaactgatggagcactcggaaaatggcgccgttatcgacccgactttgttgcattactcgttcgcgttctgcgcctctcatgtgcacgggaacaggcctgacggcatcggtacagtctcagtggaggagaaagaacggtttgaggagattaaagagaggctgtcgtccttgctggaaaaccagatttcacatttccgctattgctttccctttgggcggccagagggagccctcaaagccaccctgtcactcctcgaaagggtgctgatgaaggacatcgctactccaatacccgctgaagaggtcaagaaggttgtgcgcaaatgcctagaaaaggccgccctcatcaactacacgcgcctcacggagtacgcaaaaattgaaggacccgccgagaaggagactgaaaccatgaaccaggccagccctgctcggaaattagaggaaatattgcatttggcggaactgtgtattgaagtgctgcagcaaaatgaggagcaccacgcagaggcattcgcatggtggcccgatttacttgcagagcacgccgagaaattctgggctcttttcaccgtggacatggatactgctttagaggctcagccccaagacagctgggattctttcccactctttcagctcctgaacaattttttaagaaacgataccctactctgcaacgggaaattccataaacatctacaggagatatttgtgcccctggtggtgaggtatgtggatttgatggagagctccattgctcagtcaattcacagaggattcgagcaagagacttggcaacctgtaaagaacattgccaacagcctgcccaacgtggcacttccgaaggtgcctagtctcccccttaacctgccccaaataccaaacatcagtaccgcgagctggatgcccagcctctacgagagcaccaacggcagtgccacctcagaagacttgttttggaagctagacgcactgcaaatgttcgtgtttgaccttcattggcctgagcaggaatttgcccatcaccttgagcaacggttgaaattaatggccagcgatatgctcgaagcatgcgtgaagagaacgcgaactgcattcgagctgaaactacagaaagcctctaagaccacagatcttcgcataccagccagtgtttgcaccatgttcaacgtcctggtggacgcaaagaagcagtccactaaactgtgcgcactggatggcggacaggagcaacagtatcactctaaaattgacgatctgatcgataactccgttaaagaaatcatctcgttactggtcagtaaattcgtctccgtcttggaaggtgtgctatccaagctgtcccgatatgatgaaggaactttttttagcagtattctgtcctttacagtgaaagcggccgcgaagtacgtggacgtccccaagcccggcatggacttggccgatacctacatcatgttcgttagacagaaccaggacatcctgagggagaaagtgaatgaggaaatgtatattgagaagttgtttgaccagtggtattcttcatcaatgaaggtgatttgcgtgtggctgaccgaccgcctcgatctgcagctgcacatttaccaactgaaaactttaatcaaaatcgtcaagaaaacttatcgcgactttcgtctgcaaggcgttctggaaggtaccctgaattcgaagacttatgatacagtccatagacgattgaccgtggaggaagccacggcctctgtgtcagaaggaggaggccttcaggggatcaccatgaaggacagcgatgaagaggaggaaggatag

SEQ ID NO: 181031 - DNA, 3891 bp, synthetic construct
  misc_feature 1..3891: note = Description of Artificial Sequence: Synthetic coding sequence
  source 1..3891: mol_type = other DNA
atgctggaccccagcagcagcgaggaggagagcgacgagggcctggaggaagagtcccgggacgtgttggtggcggccgggagcagccagagagcaccaccggctcctacacgcgaggggcggcgcgacgcccctggacgggccggtggcggtggggctgcacgatcggttagcccgtctccatcagtgttaagcgagggcagggatgagcctcagcggcagcttgatgacgaacaggaaaggagaattcggctgcaactatacgtgttcgtggtcagatgtatagcctaccccttcaacgccaagcagcccacggacatggctcgaagacagcagaaactgaataagcagcagctgcaactgctgaaagagagatttcaggcattcctgaatggagaaactcagattgtcgccgacgaggcattttgcaacgctgttcggtcctattacgaggtgttccttaaaagtgaccgggtagcccgtatggtccagagcggcgggtgcagtgccaacgactttagggaagtgtttaagaagaacatcgagaaaagagttagatccttgcctgagatcgatggcctgagtaaagagactgtactgtccagttggatcgccaagtatgacgccatttaccgcggagaggaggatttatgcaaacagcctaacaggatggccctgagcgctgtttccgaactcatcctatctaaagagcaactgtatgaaatgttccagcagatcctgggaataaagaagcttgaacaccagctcctctataatgcgtgtcagttggacaacgccgacgagcaggccgcccagatccggagggaactcgatggacggcttcagctagccgataaaatggcaaaggagcgaaagtttcctaaattcatagctaaagatatggaaaacatgtacatcgaagaacttcgctcctctgtaaacttattaatggcaaacctggagagcctccccgtatcaaagggtgggcccgaattcaaactgcagaagctgaaacgatcccaaaattccgctttcctggatattggtgacgaaaacgaaattcagctgagcaagtccgatgtcgtgctcagcttcaccctggagatagtcattatggaggtccaaggccttaagtccgtagcgcccaaccggatcgtgtattgcacgatggaggtggagggtgagaaactgcagacggaccaggccgaggcaagccggccacagtgggggactcagggtgatttcacaaccactcatcctcgacctgtcgtgaaggtgaaactcttcactgagtcaacaggtgttcttgccctggaggataaagagttagggcgtgtcatactgtaccccacctctaatagcagtaagtccgcagaactgcacaggatggtcgtgccaaagaattctcaggattcagatctcaagatcaagcttgcagtgcgcatggataaaccagcgcatatgaaacactctggttacctgtatgccctcgggcagaaagtgtggaaacggtggaagaaacgatatttcgtactagtgcaggtaagtcaatacacctttgctatgtgctcgtaccgggagaagaagagcgagcctcaagagctgatgcagctggaaggctacacagttgactacaccgatcctcacccagggctgcagggaggctgtatgttttttaatgccgtgaaggaaggcgacaccgttattttcgcctctgatgacgaacaggacagaatcctgtgggtacaggcgatgtatagagccacaggtcagagctacaaacctgtgcctgccatacagactcagaaacttaatcccaaggggggtacccttcatgcggacgcacagctaagtggaaaggatgcagacagattccaaaagcacggcatggacgagttcatctcagccaatccctgcaagctggatcacgcctttctgtttaggatcctccagaggcaaacgctggatcatcgcctgaacgactcatacagttgtttgggatggttttccccaggacaggtgtttgtgcttgatgaatattgcgccaggtatggtgtgcggggttgccacagacacctgtgctacctggcagagcttatggagcacagcgagaacggcgcagtgatcgatcccacactactgcactacagctttgccttttgcgcctcgcatgtgcacgggaaccgccccgacgggatcggtacggtctccgtcgaggagaaggagcgcttcgaagagattaaagaaagacttagttccctgctagaaaaccagatctctcactttaggtactgcttccctttcgggcgtccggaaggagccctgaaagctacactgtccctgttggagagagtcctgatgaaggatattgctacacccatccctgcagaagaagtgaaaaaggtggtgcgcaaatgtctggagaaagcagctctgattaattacacccggctaactgagtacgccaagattgaggaaacaatgaatcaagcctcacctgccaggaagctggaagagattttgcacctggccgaactgtgtattgaagtgttgcaacaaaacgaggaacaccatgcagaaggaagggaggcatttgcatggtggccggacctcctggcggagcatgctgaaaaattctgggctctgttcaccgtggatatggacacagccctggaggcgcagccccaggatagttgggactcttttcctttgttccagctgttgaacaactttctccgcaatgacacgctgttgtgcaacggtaaattccataaacatttgcaagaaatctttgttccactggttgtgcgctatgttgacttgatggagtcctctatcgctcaatccatccaccgtggcttcgaacaggaaacctggcagcctgtcaaaaacattgcgaattctctaccgaatgtggcccttcccaaggtgccttccttgcccctcaacttgccccagattccaaacatctccactgcaagctggatgcccagcctgtacgaatcgaccaacggaagtgctacttccgaagacctcttctggaaacttgacgctctccaaatgttcgtgtttgaccttcactggcccgaacaggagttcgcccatcatctggaacagaggttgaagctgatggcgtctgacatgctcgaggcttgcgtcaagcgcacacgcactgcattcgaacttaaactgcaaaaagcatcaaagactacggacttgcgcatcccggcttcagtgtgtacaatgtttaatgtcttggtcgacgccaagaagcagagcactaaattgtgcgctctcgatgggggtcaagaacagcagtaccatagcaagatcgatgatctcattgacaacagtgtcaaagagataatttctctactagtcagcaaattcgtgtcagtgcttgagggagtgttgagcaagctctcccggtacgacgaaggaacatttttctcatcgattttgtcctttacagtcaaagctgctgccaaatatgtggacgtacccaagcctgggatggatctggcggatacttatattatgtttgtcagacagaaccaggatattctgagggagaaggtcaacgaggaaatgtacatagagaagctgtttgatcagtggtactcatcatccatgaaggtaatctgcgtgtggctgactgaccgcctggacttgcagctgcacatctatcagctgaagactctaatcaagatcgtaaagaaaacttaccgcgatttcaggttgcagggggtccttgagggaaccttgaactctaagacctacgatacagtccataggagactgacggtcgaggaagctaccgccagtgtttcagagggaggagggctccaagggattaccatgaaggactccgatgaggaggaagagggctag

SEQ ID NO: 181032 - DNA, 1473 bp, synthetic construct
  misc_feature 1..1473: note = Description of Artificial Sequence: Synthetic coding sequence
  source 1..1473: mol_type = other DNA
tgatacacccggctgaccgagtacgccaagatcgagggccccgccgagaaggaaactgaaacgatgaatcaagcctcgcctgctcgaaagctggaggagatcctacatctggcagaactgtgtatcgaagtgctccagcagaatgaagaacatcatgccgaaggcagagaagcgttcgcctggtggcccgacctgctggctgaacacgccgagaagttctgggctttattcaccgtcgatatggacactgctctcgaagcccagccacaggatagttgggactccttccccctttttcaactcctcaataacttcctgaggaacgataccctgttgtgtaacggcaagtttcataaacaccttcaggagatcttcgtccctttggtggtgcggtacgtagatctgatggaatcaagcatagctcagtctatccatcgcggattcgaacaggagacctggcagcccgttaagaacatcgctaactcattaccgaatgtagccctgcctaaagtgccctcgcttccactgaatttgccgcagatcccaaacatcagcactgcgtcctggatgccgtctctgtacgagtcgactaacgggagcgcgacttcggaggacctcttttggaaattggacgcccttcagatgttcgtttttgatctccactggcccgagcaagagtttgcccatcacctggagcagcggctcaagctcatggcctctgacatgctggaggcatgcgttaaaaggactcgaaccgctttcgagctgaagctccaaaaagcgtccaaaactactgacttacgaatcccagccagtgtgtgcacaatgttcaatgttctggtcgacgcaaaaaagcaaagtactaaactttgcgctttagatggaggccaggagcagcagtaccatagcaaaatcgacgatctgattgacaattccgtcaaagagattatcagcctcctcgtcagtaaattcgtgtcagtgctggaaggggtgctgtccaagctgtccagatacgacgagggtacgtttttttcatcaattctgtcatttacagtaaaagccgccgcaaagtacgtggatgtacctaagcccggtatggacttagcagacacctacatcatgttcgtgcggcaaaatcaagacatcttgcgcgaaaaggtgaatgaggagatgtacattgaaaaattatttgaccaatggtatagtagctcaatgaaggtgatctgtgtttggctgaccgataggctggacctgcagctccatatttaccagcttaaaacgcttattaagatcgtaaagaaaacgtaccgcgactttagattacaaggggttttggaggggactctaaatagcaagacatacgacacggtgcaccgaaggctgaccgtcgaagaggccacagccagtgtctcagagggggggggtctccagggcatcactatgaaggattcggacgaggaagaggaggggtag

SEQ ID NO: 181033 - DNA, 3669 bp, synthetic construct
  misc_feature 1..3669: note = Description of Artificial Sequence: Synthetic coding sequence
  source 1..3669: mol_type = other DNA
atgctggaccccagcagcagcgaggaggagagcgacgagggcctggaggaggagtcccgcgatgtgctggtggccgccggatcgtcccagagagcaccccctgcgcctaccagggagggacagctcgatgacgagcaggagcgccgaatacggctccagctgtacgtgttcgtggtccggtgtatagcctatccttttaatgctaaacagcccacagacatggccaggcgacaacagaagctgaacaagcagcagcttcagttgctcaaagaaagattccaggcctttctcaacggtgagacgcagattgtggcagacgaggcgttctgcaacgccgtgagatcctattacgaggtcttcttgaagagcgacagggtggcacgtatggtgcagtccggaggctgcagcgctaacgactttagagaggtgttcaaaaagaacatcgagaagagagtccggtcactgcccgagatcgatggactttccaaagaaaccgtgctgtcttcctggattgcaaaatacgatgcgatctataggggggaggaggacttatgcaaacagccaaaccggatggccctctctgctgtctcagagctgattttatctaaggagcagctctacgagatgttccagcagatcctaggcataaaaaagctcgagcatcaacttttgtacaatgcctgtcaattagacaacgctgacgaacaggccgcgcagatccgacgcgagcttgatgggcggttgcagctggccgacaagatggccaaagagaggaagttcccaaagttcatagcgaaggacatggagaacatgtacatcgaggagttacgctcatcggtcaacctcctcatggcgaatctcgagagccttcccgtatccaagggaggccctgagttcaagctgcagaagttaaagcggtcacagaattccgccttcctggatatcggggacgaaaacgagattcagctatctaagagtgacgttgtgctgtccttcacattggagatcgtgatcatggaagtgcaaggactgaagtctgtggcacctaacaggatagtttactgtactatggaagtagagggggagaaacttcagacagaccaagccgaagcgtctcggccacaatggggcactcagggggattttaccaccactcacccccgtccagtcgtgaaggtcaaattgttcactgagagcaccggtgtgctagctctcgaagacaaagagctcggccgggtgattttataccctacttccaacagcagcaagagcgcggagctgcaccgaatggtggtgcctaagaactcccaggattctgacctaaagatcaaattggcggtcaggatggataaaccggctcacatgaagcattcaggctacctttatgccctgggacagaaggtttggaagaggtggaaaaagcgctacttcgtcttggtgcaggtctcccagtataccttcgctatgtgtagttaccgcgaaaagaaatccgaacctcaggaattaatgcagctggaggggtacactgttgattacaccgacccccatcccggcttgcagggcggatgtatgttctttaacgccgtgaaggagggtgacacggtgatctttgcaagcgacgacgagcaggacaggatcctctgggtccaagccatgtacagggccactggccagagttacaaacctgtaccagccattcaaacacagaagcttaatcccaaaggaggcaccctccatgctgatgcccagctgtacgccgacagattccagaaacacggaatggacgagttcatctccgcgaacccttgtaaattagatcacgcctttctgttccgcattctccaaagacaaaccttagatcaccgtcttaacgatagctacagctgtttggggtggttttcacccggccaagttttcgtgctagacgagtattgcgctcgatacggtgttagggggtgccaccgacacctgtgctacttggccgagcttatggagcattccgagaatggcgcagttatcgatccaactctgctgcactattcatttgccttctgcgcgtctcatgtgcacggaaatcgcccagatgggattgggactgttagtgtggaagaaaaggaacggttcgaggaaattaaggagagactatcctccctgttggagaaccagatctcccacttccggtattgttttccattcggccgacccgaaggggcgcttaaagctaccctgtctctcctcgaacgggtgctcatgaaagatatcgctaccccgatccccgcggaggaagtgaagaaggttgttcggaagtgcctcgaaaaggctgcactcattaattatacccgtttgactgagtacgctaagatcgaggagactatgaaccaggcaagtcccgcacggaaattggaggagattctccaccttgccgagctgtgcattgaggtgcttcagcagaacgaggagcaccacgcggaggctttcgcctggtggcctgatctgctcgcagaacatgcagaaaaattttgggccctattcaccgtggacatggatactgccttagaggctcagccacaggacagctgggactctttccccctgttccagctgctcaataattttttacggaatgacacactactatgcaatggcaagtttcacaaacatctgcaggagatatttgtgcccctcgtcgttaggtacgtggacttgatggaatccagtattgctcaatctatccaccgtggttttgagcaagaaacatggcagcctgtgaataatggctccgccacatcggaagacctcttttggaagctcgatgccctgcagatgttcgttttcgatctccattggcccgagcaggagttcgcccaccatctggaacaacgcctgaaattgatggcaagtgacatgctggaggcgtgtgtgaagcgcacccgcaccgcttttgagttaaagctccagaaggctagcaagaccacagatctgaggatcccagcttccgtgtgcactatgttcaacgtcctggtggatgccaagaagcagtccaccaaactgtgcgccctggacggcggacaggagttcggctctcagtggcagcaataccacagtaagattgatgatctaatcgacaacagcgtgaaagagatcattagtctgctggtctcgaagtttgtgtcagtgctagaaggagtgctgagcaaactgtcacgctacgatgaaggaacctttttcagcagcatactgagttttactgtcaaggcagctgcaaagtatgtggacgtgcctaagccgggaatggatctggcagacacgtatatcatgtttgtgcgccagaaccaggacatcctcagagagaaagtgaatgaagaaatgtacatcgagaaactcttcgaccagtggtattcatccagcatgaaagtgatttgcgtgtggttgaccgaccgacttgatctgcagctccacatttatcagctcaaaacattaattaaaatcgtcaagaagacctacagagacttccggcttcagggcgtcctggaggggacactgaattcaaaaacatacgacacagtacaccgtcgcctaacagtagaggaggcaaccgctagcgtgagcgagggcggcgggcttcaaggcattacaatgaaagactccgatgaagaggaagagggatag

SEQ ID NO: 181034 - DNA, 2367 bp, synthetic construct
  misc_feature 1..2367: note = Description of Artificial Sequence: Synthetic coding sequence
  source 1..2367: mol_type = other DNA
atgaccatccaccagttcctgctgctgttcctgttctgggtgtgcctgccccatttctgtagtcctgaaatcatgtttagaagaacaccagtgccccaacagagaattctgagcagtcgggtgccacgtagcgacggtaaaatactgcacaggcaaaagaggggatggatgtggaaccagttttttttgctggaagaatataccgggagcgattaccaatatgttggcaaactccattctgatcaggataaaggtgatgggagcctgaagtatatcctctccggggatggggctggaacgctgttcatcatagacgaaaagacgggcgacattcatgcgactcggcgcatagacagggaagagaaagctttctacacattaagagcccaggccataaataggaggaccctcaggcccgtagagcctgagtccgagttcgtgatcaagattcacgacatcaacgacaacgagcctacctttcccgaagagatttacactgccagcgtgccagagatgagcgtggtagggaccagcgttgtgcaagtgactgctactgatgctgatgatccgtcctacggaaacagtgcccgcgtgatttacagcatccttcagggccagccttacttttctgttgagcctgagacggggatcattcgtactgctctccctaacatgaatcgagagaaccgggagcaataccaggttgtgatccaggccaaggatatggggggacagatgggtgggctgtcaggaacgaccacggttaatattacgctcaccgatgtgaatgataatcccccccgcttccctcagaacacaatccaccttcgggtgctcgaaagcagccctgtgggcaccgctatcggctccgtgaaggctactgatgcagatacaggaaaaaatgcagaagtggaatatcggattatcgacggtgatggtactgacatgttcgacattgtgacagagaaggatacacaggagggaataataacagtgaagaagcctctcgattacgagtcaaggcgcctgtacaccctgaaggtggaggccgagaacacccacgtcgaccctagattttactacctgggtccattcaaagacactacgattgttaagatctcgatcgaagacgtggatgagccaccggttttcagccgcagcagctatttgttcgaggtgcacgaggatattgaggtgggtacaattatcggcacggtgatggccagggaccctgatagcattagcagcccaatacggttcagcctggaccgacataccgatctggatagaatttttaatatacactcgggcaatggcagcttatacaccagcaagcccctggatcgcgaattaagccagtggcataacctaactgtcatcgcggcagaaattaataatccgaaagagactactagagtagcagtcttcgtgcgcatcttagacgtcaacgacaacgccccacagtttgctgtattctatgacacctttgtctgtgaaaacgctcgacctgggcaactcatccagacgatctcagccgtggacaaagatgatcctttaggagggcagaagtttttcttcagtctcgctgccgtgaatccgaattttactgtgcaggataatgaagacaacacggcgaggattcttactcgcaaaaatgggtttaatagacacgaaataagcacttacctgttgcctgtagtaatctcggataatgactaccctatccagagttcgacaggtaccctgaccatacgcgtgtgtgcttgtgacagtcagggcaatatgcaatcctgctccgcagaggccctcctgctgcctgctgggttaagtacaggtgcactgatcgcaattttgctgtgtataataatactgctggttattgttgtgctgttcgctgcgctgaaaagacaaaggaaaaaagaaccattaattcttagcaaggaggacatccgagataatatagtgtcttacaatgacgagggggggggagaggaagatacacaggcattcgatattggaacactccgcaacccggccgccatcgaggaaaaaaaactaagacgcgacatcatccctgaaaccctgtttattccccgacggacccctaccgccccagacaatacagatgtgcgcgacttcatcaacgaaagactcaaggaacatgacctcgatccaaccgctcctccttatgattccctggcaacatacgcctatgagggaaacgactccattgctgagtctctgagctcattggaatcaggaactacagaaggcgaccagaattatgattacctccgcgaatggggccctcgatttaataaactcgccgaaatgtacggaggaggcgagtccgataaggactcatag

SEQ ID NO: 181035 - DNA, 2385 bp, synthetic construct
  misc_feature 1..2385: note = Description of Artificial Sequence: Synthetic coding sequence
  source 1..2385: mol_type = other DNA
atgctgacccggaactgcctgagcctgctgctgtgggtgctgttcgatgggggtctcttaacgcccctgcaaccgcagcctcagcagacactggctacagaacctagggaaaacgtcattcacctccccgggcagaggagccacttccagcgggtcaagcgcgggtgggtctggaatcagttctttgtgctagaggaatatgtcggatccgaaccacagtacgtcggcaagttgcactctgatttagacaagggcgaagggaccgtgaagtacacactctccggcgacggggccggaactgtctttactattgacgagacaaccggcgacattcacgccatccgcagcctagatcgggaggagaagcccttctacaccttgcgagcgcaggcggtggacattgaaactcgcaaacccctggagcctgagtcggagtttattatcaaggttcaggacatcaacgataatgagcctaaatttctcgatggtccttacgtagcaacagtgcctgagatgagtcctgtcggcgcatacgttctccaggtgaaagccacagatgccgatgaccccacgtatgggaattctgcacgtgtcgtatacagcattctgcagggacagccatatttctccatagaccctaagaccggcgtgatcaggactgccctcccaaacatggacagggaagttaaagagcagtaccaagtccttatccaggctaaagatatgggcggacagctggggggcctagctggcacaaccatcgtgaacattacacttactgacgtaaacgataaccccccacgttttcccaagagtatcttccatttgaaggttccagaatctagcccaataggctccgctatcggcagaatccgtgcggtggatccggacttcggccaaaatgcagagatcgagtacaatatcgtgcctggggacggaggtaatctgttcgacatcgtcacggacgaagacacacaggagggggtcatcaaacttaagaagccgctcgattttgagacaaaaaaggcctatacattcaaggtcgaggcctccaacctgcatctcgaccatcgattccatagtgccggcccatttaaagacacagcgaccgtgaaaatctccgtgttggacgttgacgaaccacctgtgttctcaaagccactctacacgatggaggtctacgaggacacccctgtcggaactatcattggcgctgtgactgcccaagacctggatgtgggtagctctgccgtgcggtactttatagattggaaaagtgatggcgattcctattttacaatcgatggcaacgaaggcaccattgcaacaaatgaattgctggatagggaatcgaccgcccaatacaatttctccattatcgcgtctaaagtctcaaaccccctcctgaccagtaaagtgaacatactgataaatgtactcgacgttaatgaatttcctccagaaattagtgtcccttatgagacagcggtgtgcgaaaacgctaaacccggccagatcatacagatcgtgtcagcagctgaccgcgatctgtctcccgctggtcagcagtttagctttcggctgtcccccgaagctgctatcaaaccaaactttacagtcagggattttcgtaataatacagccgggatcgagactcgcaggaatggctacagccgacgccaacaggagctctacttccttcccgttgtaattgaggattcatcctaccctgtgcaaagctcaacaaacaccatgacaattcgtgtgtgccgctgtgactctgacggaacaatccttagctgcaatgtcgaagcgattttcttacctgttggcctgtccaccggcgcactaattgccattctgctgtgcattgtgatcctgctggcgatagtggtcctgtacgtagcgctccgaagacagaaaaagaaagatactttgatgacaagtaaagaggacattcgtgacaatgttatacactatgacgatgagggaggcggcgaagaggacacacaagcattcgacataggagcccttaggaaccctaaagtaattgaagagaataaaatccgacgcgacatcaaaccagattccttgtgcctgcccagacagcggcccccaatggaagataacacagacatccgcgacttcatacatcaacgtttgcaagagaatgatgtggaccctacagcccccccatatgatagcctagcaacatatgcttatgaggggtcagggagtgttgccgagtccttgtcctcgatcgactccctgacgaccgaagccgaccaagactatgactacctgaccgattggggaccaagatttaaggttctggccgatatgtttggggaggaagagagctacaacccagataaggtcacctag

SEQ ID NO: 181036 - DNA, 2385 bp, synthetic construct
  misc_feature 1..2385: note = Description of Artificial Sequence: Synthetic coding sequence
  source 1..2385: mol_type = other DNA
atgctgacccggaactgcctgagcctgctgctgtgggtgctgttcgacggagggttgcttacccctctacaaccccaaccgcagcagacactggccactgagccgcgggagaacgtgatccacttgcctgggcagagaagccactttcagcgcgtgaagcgtgggtgggtgtggaaccaatttttcgtactcgaagagtacgtgggcagtgaaccccagtacgttggtaaactgcatagcgacttggacaagggcgaggggaccgttaaatatactctttccggggacggcgccggtacggtatttactatagacgaaaccacgggggacatccacgcaatccgctccttggaccgggaagaaaagccattttacaccttgagagctcaggcagtggacatcgagacacggaagcctctggagcccgagtccgaatttatcattaaagtccaagacattaacgataacgagcctaagttccttgatggcccctacgtggcaactgtccctgagatgtcgcctgttggagcctacgtcctccaggtaaaggccacagatgctgatgatcctacctacggcaatagcgctcgcgtggtctatagcattttgcaggggcagccctacttttctatcgaccctaagaccggtgtcatccggaccgcactgccgaacatggacagggaagtgaaggaacagtaccaggtgttgatccaggcgaaagatatgggcgggcagctcggaggtctggctggcacaaccatcgtgaacattacgttaaccgacgtgaacgacaaccccccccgattccctaagtctattttccatctgaaagtgcccgaatcttcccctattggatccgccattggccggatccgagctgttgatcctgattttggccaaaatgccgaaattgagtataatatcgtgccaggggatgggggtaacctgtttgacatcgtgacagatgaggatacacaggaaggagttattaagttgaaaaagcctttggactttgaaacaaaaaaagcctacacgtttaaggtagaagcatccaacctccacctggaccacagattccacagcgccggacccttcaaagatactgcaaccgtgaagatttccgtgctcgacgtggatgagccgcctgtgttttcgaagccactgtacaccatggaagtgtatgaggacactccagtggggacaattatcggggcggtgactgcccaggatctagacgtgggaagcagcgccgtaaggtattttatcgattggaaatctgatggagactcctactttacaattgatggtaatgaaggcaccattgccaccaacgagctgctggatcgtgaaagcactgcgcagtacaacttctctatcattgccagtaaggtgagcaacccattactgacatccaaggtaaacatcttaatcaatgttctggatgtgaatgaatttccacccgaaatatccgtaccttacgaaactgcagtatgtgagaatgctaagcccggacagatcatacagatagtcagcgccgccgatcgcgacctgtcccccgccgggcagcagttctcattccgcctatcccctgaggcagccatcaagccaaacttcaccgtgcgggacttccggaacaatacggccgggatagagacacggagaaacggttacagtaggaggcagcaggaactttatttcctcccagtcgtaatagaagattcgtcctaccctgtccagagctctacaaatactatgacgatccgggtgtgtagatgtgactccgatggaacaatcctgtcttgtaacgttgaagccatctttctaccagttggcctgtccacaggagcccttatcgccatcctgctctgtatcgtcatactgctcgccatcgtggtgctgtacgttgccttgcggagacagaagaagaaggatacactgatgaccagcaaagaggatatacgcgataatgtaatacattatgacgacgagggcggaggcgaggaggacacgcaagctttcgatattggagcactgagaaacccaaaagtgattgaggaaaacaagattcggcgcgacatcaaacccgacagtttatgcctgcctagacagagaccacctatggaggataatactgatatccgtgatttcattcatcaaaggttgcaggagaatgatgtggatcccacggccccaccttacgattctttagccacatacgcatacgaaggatcaggatccgtggctgagtcactcagctccatcgatagtcttacaactgaagccgaccaggattacgattatttgacagactggggaccccgttttaaagtgcttgccgatatgttcggcgaggaagaaagttacaatccggacaaagtgacttag

SEQ ID NO: 181037 - DNA, 2265 bp, synthetic construct
  misc_feature 1..2265: note = Description of Artificial Sequence: Synthetic coding sequence
  source 1..2265: mol_type = other DNA
atgctgacccggaactgcctgagcctgctgctgtgggtgctgttcgatggcgggctactgactcctctgcagccgcagccacagcagacccttgcaaccgaacctagggaaaacgtcatccacctaccgggccaaaggagtcattttcagcgggtgaaaagggggtgggtctggaaccagttttttgtattggaagaatacgtcgggtctgagccccagtacgtcgggaaactgcattccgacctggacaagggagaaggcacagtcaaatacactttatcgggagacggggcaggcactgtcttcaccatagatgagaccaccggcgacatacatgcaatccggagtctggaccgtgaggaaaagcctttttacacgctacgggctcaggccgttgatattgaaactcggaagccactagaaccggaatcagagttcattatcaaagtgcaggatattaatgataacgaacccaagtttctggacggtccttatgtcgcaactgtgccagagatgtcccccgtgggggtgatccgaaccgctctgccaaatatggatagagaggtcaaagaacagtaccaggtcctgattcaagcgaaggatatgggaggacaactgggtggactggcgggtaccaccatcgtcaatataaccctcacagatgtgaacgataatccaccacggttcccaaagagcatcttccatctcaaagttcctgaaagttctcctattggctccgcaattggccgaatccgggcggtcgatccggactttgggcagaatgccgagattgaatacaacatcgtgccaggggacggtggaaacctgttcgatatcgtgacggacgaggatacccaagaaggtgtgatcaaactaaaaaaacctctagactttgaaacaaaaaaagcttatactttcaaggtggaggcatccaacttgcatctggatcatagattccacagcgcagggcctttcaaggacaccgcgaccgtaaagatctccgtgctggatgtagacgagcccccagtgttctctaagccactttacactatggaagtgtacgaagacacgcccgtggggacaatcattggtgcagttaccgctcaggatctagacgtgggttcctccgccgtccggtattttatcgattggaagagcgatggagactcctatttcaccatcgatggtaacgaagggaccatcgcgaccaatgagctactcgacagagagagcaccgcccagtacaacttttctatcattgctagtaaagttagtaatcccctcctcacatcaaaggtgaatatcctgatcaacgtgcttgacgttaacgaatttcctccagaaatatcagtgccatatgagacagcagtgtgcgagaacgcaaaaccgggtcaaattattcagattgtgagcgctgccgatagagatctgagtcccgcaggccagcaattcagcttccgactgtctccagaggccgctatcaagcctaacttcaccgtccgggatttccggaataacacagcagggatagaaaccaggcgtaacggctactccagacgtcagcaggaactgtactttctgcccgtggtaatcgaggactcatcctatcccgtacagtcatcaaccaacacaatgacaatccgagtctgcaggtgcgattctgacgggactattctgtcgtgcaatgtggaggctattttcctgccagttgggctgtctaccggagctttgattgctattcttctgtgtatcgtgattcttctggccattgtggtgctctacgtggcacttcggaggcaaaaaaaaaaggacaccctcatgaccagcaaggaggacattcgcgacaacgtaattcactacgacgacgagggcggcggagaggaagatacccaggctttcgatataggcgctctgcgaaacccgaaggttatcgaggagaacaaaatacggcgagacattaagccagatagtctctgtctcccacgccagcgaccacctatggaggataacacagacattcgggacttcatccatcagcggctccaggagaacgatgtcgatcccaccgctccaccttacgattcgctggccacttacgcatacgaggggtccgggtccgtcgcagaatcattaagttcgatcgattctctcaccactgaggccgaccaagattacgactaccttactgactggggtcctcggtttaaagtgcttgcagatatgtttggtgaagaggagtcctataaccccgacaaggtaacctag

SEQ ID NO: 181038 - DNA, 2445 bp, synthetic construct
  misc_feature 1..2445: note = Description of Artificial Sequence: Synthetic coding sequence
  source 1..2445: mol_type = other DNA
atggacgccgccttcctgctggtgctgggcctgctggcccagagcttatgcctctccctaggagttcccggctggcgcagacccactaccctttatccgtggcgacgcgcaccagcactgtcgcgcgtcagaagggcctgggtgatccctccgatctcagtgagcgagaaccataaaagacttccttatcccctggtccagattaaaagcgacaagcagcaattaggctcagtgatttattcaattcagggcccaggggtcgacgaagaacctcgcggagtcttcagcattgacaaattcacaggcaaggtgtttctcaatgcgatgcttgaccgagaaaaaaccgaccgcttccgcctgagggctttcgctctcgatcttggaggctcgacgctggaggatccaacggacctggagatagttgtcgtcgaccagaatgacaacagacctgccttcttacaggaggcctttaccgggagggtactagaaggtgctgttcctggcacatatgtgacacgcgccgaagctaccgacgccgatgaccccgagacggacaacgcggccctccgcttcagcatccttcagcagggatcccctgagctcttcagtattgacgagctgacaggggaaattagaaccgtacaggtgggcctcgacagggaggtagtggccgtttacaatctaactcttcaggtggctgatatgtccggggatggcttaacagccactgctagcgctataataaccctggacgatattaacgataatgcacctgagtttaccagagatgaattcttcatggaggcgattgaagcagtgtccggggtggatgtggggagactcgaagtcgaggatagagacctgccaggctcacctaactgggtagcacgtttcactatacttgagggcgatcccgacggccagtttacaatacggacagaccccaagactaacgaaggagtcctttccattgtgaaggccctggactacgagtcttgtgaacattacgaattgaaagtctcggtgcagaacgaggctcccctgcaggcagctgctctgcgggcagaacggggacaagccaaggtcagagtacacgtgcaggacacgaacgagcctcctgtattccaggagaaccccctgcgcaccagtttagccgaaggcgccccccccgggacactggtcgcgacattttctgctagagaccccgataccgagcaattacagagactctcttattccaaggactatgacccggaagactggctgcaggtggatgctgcaacagggcgaattcagactcagcatgtcctgagtccggcgtctccatttttaaaggggggatggtatagagccattgttctggcccaagacgatgcaagccagcctcgtaccgcaaccggcacattgtctattgaaattctggaggtaaatgaccacgctcccgtcctggctccgccccccccaggaagcctgtgctctgagccacaccagggtcccggattactgctcggggcgaccgatgaggatctgcccccacatggggcaccttttcattttcagttgtcgccccgtctgcccgaattgggtaggaattggtcactgtcacaagtgaatgtcagtcatgcaaggttgcggcctcggcaccaagttcccgagggcctgcaccgtctgtctctgttgctgagagattccggccaaccaccccagcaacgcgaacagcctttgaacgtgaccgtttgtcgctgcggcaaggatggcgtgtgtctgcctggcgccgctgccctgttagccggtggtaccggactttctctgggggcccttgtaattgtcctggcgagcgccttactgctgctggtgctggtgctgctggtggcactgcgagctcgattttggaagcaatcccgcggcaagggccttctgcacggccctcaggacgatctcagagacaatgtgctgaattatgatgaacagggaggcggggaagaagaccaggatgcctatgacattagccaactacggcatcctaccgccctatctctccctctgggccccccaccattaagacgggatgctccccaaggaaggctccatccccagccacccagagtcctccctacaagccctctcgatatagcagatttcatcaatgatggactggaggccgcagacagtgatcctagcgttcccccatacgataccgctcttatttacgattatgagggagacggctcagttgccgggacgttgagttccattctgtcctcccagggcgatgaagatcaggactatgactacctgcgtgactggggccctagattcgcacggctcgcagatatgtacggacatccatgcgggctagaatatggggctcgctgggatcaccaggcgagagaaggcctgtcgccaggtgccctgctcccgcgccatagggggagaacggcatag

SEQ ID NO: 181039 - DNA, 2373 bp, synthetic construct
  misc_feature 1..2373: note = Description of Artificial Sequence: Synthetic coding sequence
  source 1..2373: mol_type = other DNA
atggtgcccgcctggctgtggctgctgtgcgtgagcgtgccccaggcactgcccaaggcccagcctgccgaattatcggtcgaagtcccggaaaactacgggggcaatttcccgctatacctgactaaactgccactccccagagaaggagcggagggccagatcgtattgtcgggagactccggcaaagcgaccgagggaccatttgcaatggaccccgactccggttttcttttagtgactcgtgcgctggatcgtgaagagcaggctgagtatcagttgcaggtgactcttgaaatgcaggacggacatgtcctgtggggaccacagcctgtgctggtgcacgtcaaagatgaaaacgaccaagttccccacttcagccaggccatttaccgggcgagattaagtcgtgggacccggccgggtattccttttctgtttctggaagcttccgatcgcgatgaaccaggtacggctaacagcgatctgcgtttccacatcctaagccaggccccagcccaacccagtccagacatgttccaactggagccccgcctgggcgctttagccctcagtcccaagggtagtacttctctggaccacgcacttgagcgtacttaccaactactcgtgcaagtgaaggatatgggcgaccaggcctccggtcatcaagcgacagcaaccgttgaggtgagcatcatcgaaagcacatgggtttccctggaacctattcacctggctgagaatcttaaggtcctctatccacatcatatggcgcaggtgcattggagtggtggcgacgtgcactaccatctagaaagccacccgcccggcccgttcgaggtgaatgcggaagggaacctatacgtgacaagggagttagatcgagaggctcaggcagagtacctccttcaggtgcgggcccaaaatagccatggcgaggactacgctgcccctctcgagttacatgtgctggtgatggacgagaatgacaatgttcctatttgtcccccaagagatccaaccgtctcaatccctgagttgtcaccaccgggaaccgaagtcacccggctttcagcagaggatgcagacgctcccgggagtccgaatagtcatgttgtctaccagctcttaagtccggagcccgaagatggcgtggagggcagggcctttcaggttgaccctacctcaggatcagtcacgcttggcgtgttacctctgcgcgcaggtcagaacattcttctgctcgttttggctatggacctggcgggagccgaaggagggtttagcagcacctgcgaagtcgaggttgctgtcacagacattaatgatcatgcccctgagttcatcactagccagatcggccccatttctttgccagaggatgtagagcccggaaccctagttgctatgctcactgcaatcgacgccgacctcgagcctgcttttcgactaatggactttgccattgagcggggtgatacggaggggacttttggccttgactgggaaccagacagcggacatgtcagactgcgcttatgcaagaacctgagttatgaggccgctccgtcacacgaggtcgtcgtggtcgtgcaatcagttgccaagctcgtaggaccagggccaggccccggagccaccgccacagttaccgtcctcgtagaaagggtcatgcccccccctaaacttgatcaagagagttacgaggcttccgtaccaatatccgcaccagcaggctcctttctgctgaccatacaaccgtccgatcccatctctagaacactacgatttagccttgtcaacgacagtgaggggtggctttgcattgaaaagttcagtggcgaagtgcacaccgcccaaagtttacagggggcccagcccggagacacctacacagtccttgtcgaggcccaggacaccgatcatggcctcatcgtcagtgggccaagcaaagaccctgacctggctagcggccacggtccttactcctttaccctggggccaaaccccaccgtccagcgggattggcgcctgcagacattaaacgggagccacgcatacctgactttggcgttacattgggtcgagccccgagagcatatcatccctgtcgtcgtttcccataacgcccagatgtggcagttattagttagagttatagtgtgcagatgcaatgttgagggccagtgcatgcggaaggttggccgcatgaaaggcatgccaactaaactcagtgctgtcggcattctcgttggaaccctggttgctatcggtatctttctgatcctaatatttactcattggaccatgagcaggaaaaaggaccccgaccaacccgcagattcagtcccactcaaggcgaccgtctag

SEQ ID NO: 181040 - DNA, 2199 bp, synthetic construct
  misc_feature 1..2199: note = Description of Artificial Sequence: Synthetic coding sequence
  source 1..2199: mol_type = other DNA
atggtgcccgcctggctgtggctgctgtgcgtgagcgtgccccaggctctgcccaaagctcagcctgcagagctgtctgtggaggtccctgaaaattatgggggcaacttccccctttatctcaccaagttgccacttccacgggaaggcgcagagggccaaatagtgttaagtggcgattctggcaaagccacagagggaccattcgcgatggatcctgactctggctttctgctggtaacacgcgccctggatagggaggagcaggctgaatatcagcttcaggtgactttagagatgcaggacggccacgttttatgggggccacaacccgtgctagtgcatgtcaaggatgaaaatgaccaagcatccggacaccaggcgaccgccaccgtggaagtctccattatagagtctacgtgggtttcgttagagccgatccacctggctgagaacctcaaagtactctacccccaccatatggcccaggttcactggagtgggggtgacgtgcactaccacctcgagtcacacccacctggaccctttgaagttaatgctgaagggaatctgtacgtcactcgggagctcgacagggaagcccaggccgaatacctcctccaagtgcgggcccagaattctcacggcgaggattacgctgcacctctcgagttgcatgtcctcgtgatggatgagaatgataatgtcccaatatgcccgccaagggatcctaccgtcagcatccctgagttgtcgccgccgggaacagaggtgacacgcctgtccgcggaggacgccgacgcccccggatcacctaactcacacgtcgtatatcagttactctccccagagccagaggatggggttgaagggcgagcatttcaggtagatcctacctcgggaagtgtgactctcggcgtgctgcctcttagagcaggccagaacattctgctgttggtgcttgcaatggacttggccggcgccgagggcgggttttcctccacatgcgaagtggaagtcgccgtgacggacattaatgatcatgcccccgaattcatcacaagtcagattggccccattagcctgcccgaggacgtcgagcctgggactctggtggcgatgctaactgcaatagacgctgatttggagcccgccttcagattaatggatttcgccatcgagaggggtgacaccgagggcacgttcggcctggactgggagcccgattccgggcatgtgaggctgaggctgtgtaaaaacctaagttatgaagctgctccctcccacgaggtcgtcgttgttgtacaatcagttgcaaaacttgtcgggcctggaccggggcctggagcaaccgccacagtgacggttttagttgagcgggtgatgccaccacccaaactggaccaagagtcctatgaagcaagcgtgcctatttctgctcccgccggaagtttcctcttgacaattcagccatctgatccgatctcacggacattgcggttctccctggtaaacgatagcgagggctggctttgcatcgaaaaattctccggggaagttcatactgcccagtcattacaaggggcccaacctggagatacatataccgtgctggtggaggctcaggataccgacgaaccccgtctgagcgccagcgcccctctggtcatccatttcctgaaggctcccccagctcctgccttaactctggctcctgtcccaagccagtacctctgtacaccgagacaagaccatgggcttatcgtgtccggcccctccaaggatcctgacctcgcctccggacacggaccctattctttcaccctgggccctaatccaacggtgcagcgcgactggaggttgcagacattgaacggcagccatgcttacctgacgctcgctctgcattgggtggagccacgggaacacattatcccagtagtcgtgtctcacaatgcccaaatgtggcagctgctagtcagggtaatcgtgtgcaggtgcaacgttgaagggcagtgtatgcgtaaggtgggacggatgaaaggtatgcccaccaaactgtcagctgtgggtatcctagtgggaaccctggtggccattgggatctttctgatccttatcttcacacattggacaatgtcaagaaaaaaggatcccgatcagcctgctgacagcgttcccctcaaagcgacagtttag

SEQ ID NO: 181041 - DNA, 2490 bp, synthetic construct
  misc_feature 1..2490: note = Description of Artificial Sequence: Synthetic coding sequence
  source 1..2490: mol_type = other DNA
atggtgcccgcctggctgtggctgctgtgcgtgagcgtgccccaggcgctaccgaaggcccagccggcagaactatctgtagaggttccggagaattatggtggcaattttccactttatctcacaaagctaccattaccacgagagggtgctgaaggtcagattgtactatcaggcgatagcggaaaagccaccgaggggccctttgccatggatccggacagtggctttctgttggtcacccgggccctagaccgtgaggagcaagctgagtaccagcttcaggttacactcgagatgcaggacggtcatgtcctgtgggggccacagcccgttctggtacatgtgaaggacgaaaacgaccaagtccctcacttcagccaggccatctaccgcgctaggctaagtcgtggtacaagaccgggcatcccattcttatttctcgaggcatctgatcgcgacgagccaggcacagcgaatagcgatctgagatttcatattctgtcgcaggctcccgcccagccctctcccgatatgtttcagctagaacccaggttaggcgctttggcattatcccccaaagggagcacctccctggatcacgccctcgagaggacctatcagcttctggtacaagtaaaagatatgggagatcaagcctctgggcatcaggccacagccacagtggaggtgtctatcatagagtccacttgggtgtcactggaaccgatccatctggccgaaaatctgaaggtgctgtacccccaccacatggcacaagttcattggtcagggggggatgtacattaccatctcgagagccatcctccaggtccttttgaagtgaacgctgaaggcaacctgtatgtgacgagggagttggacagagaagcgcaggctgaatatctgttgcaggtccgggctcaaaatagccatggagaagactacgcagcacccctggaactgcacgtccttgtgatggatgaaaatgataatgtacctatctgccctccccgtgaccccactgtcagcattcctgagctctcccccccaggaacggaggtcacacggctctcggccgaggacgccgacgcacccggctctcctaactcccatgtggtctaccaactactttcgcctgagccagaggatggtgtggagggacgcgcattccaggtggatccaacaagtgggagcgtaactctgggagtgcttccactgcgggcaggccaaaacatactgctgctggtgctggcaatggacctggccggtgcggagggaggtttttctagcacttgcgaagtagaagtcgctgtgaccgatatcaatgaccatgctcccgaatttatcacaagccagatcggtccgattagtttgcccgaggatgtggaacctgggaccctggtagccatgcttaccgccattgacgccgatttggagcctgccttccggctgatggacttcgcgatcgaacggggagataccgaaggcacctttggtctagactgggagcctgactcaggtcacgtgcgcctccgcttatgcaagaacttgagttacgaggccgcaccttcccatgaggttgtggttgttgttcagagcgttgccaaactcgttggacccgggccgggccctggggctaccgccacagttaccgtgctcgtcgagcgggttatgccacccccgaagctagaccaggaatcgtacgaggcaagtgtgccaataagtgcaccggctggttcttttctgctgactatccaaccttcagacccgatctcacgtaccctccgcttctcactggttaacgatagcgaaggctggctgtgtatcgaaaagttctcaggtgaggtgcatactgcgcaatccttgcagggggcccagccaggggatacatacaccgtgctcgtcgaggctcaggacaccgatgaaccaaggctgagcgcgtccgctcctttggtgatccatttcctcaaagccccaccagctccagccctaaccttggcccccgtgccttcccagtatctgtgcaccccgaggcaggatcatggcctgattgtgtcaggacctagcaaggatcctgacttggccagcggacacgggccttacagcttcaccctgggccccaatcccaccgtgcagagggactggaggctccagactctgaacggcagtcacgcttacctgacccttgcccttcattgggtggaaccaagggaacacatcattccagtggtcgtttcccataatgcccaaatgtggcagctgttggtgagggttatcgtctgtagatgtaatgtggaaggacagtgcatgagaaaggtgggccgtatgaaaggcatgccaacaaagttaagcgcggttggaattctggttgggactctcgtggccatcggcatctttttgatccttatttttactcattggaccatgagccgaaaaaaagatcccgatcagcccgcagatagcgttcctcttaaagccaccgtgtag

SEQ ID NO: 181042 - DNA, 2424 bp, synthetic construct
  misc_feature 1..2424: note = Description of Artificial Sequence: Synthetic coding sequence
  source 1..2424: mol_type = other DNA
atggtgcccgcctggctgtggctgctgtgcgtgagcgtgccccaggccctgccaaaagcccagccagctgaactctcagtggaagtgcccgaaaactacggagggaacttccctttgtaccttaccaagttgcccttacctagagagggagcagagggccagattgtgctatcaggtgattctggtaaagcaaccgaaggtcctttcgccatggatcctgactctggatttttactggtaactcgagccctggaccgtgaagagcaggccgagtaccagctgcaggtaacactggagatgcaggacggacatgtgctgtggggtccgcagcccgttctggtgcacgtgaaggacgagaacgaccaggtgccccatttctcccaagcaatctatagggctagattgtccaggggtaccaggcctggtatccctttcttatttcttgaggctagtgaccgggatgaaccaggaactgccaattctgacttacgattccatatcttgtctcaggcccctgcccagccttcgccggatatgtttcagcttgaacctcggctgggagctctggccctttccccaaagggttctacctctctggaccacgctctagaaaggacttaccagctcctggtgcaggtgaaagacatgggcgatcaggcctccggacaccaggccacagcaaccgtagaggtgagcatcatcgaatctacctgggtctccctagaacccattcacttggcagagaatttaaaagtcctgtaccctcaccacatggcgcaggtccattggtcaggaggggatgtgcactaccaccttgaatcccatcccccaggaccatttgaggtgaacgctgaaggcaacctttatgtgacgcgtgaactggacagagaggcacaagctgagtatctgctacaagtccgcgcgcagaatagtcacggagaggattacgccgcacccctcgaactgcacgtgctggtaatggatgaaaatgacaacgtgccaatttgcccccctagagatcccacggtgtctattcctgagctgagtccgccaggcactgaagtgacaaggctctctgctgaggacgccgacgcccccggcagtcccaacagccatgtggtgtaccagctcttatcccctgagccggaggacggagttgagggcagggcattccaagttgatcctacctccggctccgtgacactgggggtgttgcccctgcgtgcaggccagaacatcttactccttgtgctggcgatggatctcgctggggctgagggaggtttctcaagcacctgtgaggtggaggttgctgtgactgatattaacgaccacgctccggaatttatcacatctcagatcggtccaatcagtttgcctgaggacgtggaacccggcactcttgtcgctatgcttacagctattgacgcagatttggagccagcctttaggctgatggactttgccatagagaggggtgacactgaggggacgtttggactcgattgggagccagacagcggccacgtgcgtctgcgcctatgtaaaaatttgtcctacgaagccgctccatcccacgaagtagttgttgtcgttcaaagcgtcgcaaagttagtgggtccaggcccgggccccggagccactgccaccgtgaccgtcctcgtggagcgagtgatgcccccccccaagttagaccaagagagctatgaagcgagcgtacctatctcagccccggccggcagctttctcctgaccatccagccgtctgatcccatctcacgtactttgcggtttagcctcgttaatgatagtgagggttggctctgcatcgagaagttcagcggcgaggtgcatacagcccaatccttacagggagcgcaaccaggcgacacctataccgtgctggtggaggcacaggacaccgccctgacgttggctcctgtaccaagtcagtatttgtgtaccccaaggcaggaccacggactcattgtctcaggccccagcaaagacccagacctcgctagtgggcatgggccgtattcattcaccctgggccccaacccgacggttcagagagactggcgactacagacgctgaatggaagccatgcttatctgactctcgccctacactgggtggagccacgggaacacattattccagtcgtcgtttcccataatgcccagatgtggcagctgctggtcagggtgattgtatgccggtgcaacgttgaggggcaatgcatgaggaaagtgggccgaatgaagggcatgcccacaaaactcagcgccgtgggcatcctagtggggactttggtcgcaatcggaatcttcctcatactcatctttacccattggacaatgtcacgtaaaaaagatcctgatcaaccagctgacagtgtacccctcaaggcgactgtttag

SEQ ID NO: 181043 - DNA, 2382 bp, synthetic construct
  misc_feature 1..2382: note = Description of Artificial Sequence: Synthetic coding sequence
  source 1..2382: mol_type = other DNA
atggtgcccgcctggctgtggctgctgtgcgtgagcgtgccccaggcactgcccaaggctcagccagcggaactgtccgtggaggtgcctgaaaattacggcgggaattttcccctgtacctcactaagttaccactgcctagagagggtgctgagggccagattgtcctgtcaggcgagcaggccgaaatgcaggacggacacgtgctctggggaccacagccagtgctggtacacgtcaaggacgagaatgaccaagtcccgcacttcagccaggcaatctatagagccagactgtcccggggcacgcgtcctggtatccccttcttgttcttagaagcctctgacagggacgaaccaggcacagcaaactcagatcttcggtttcatatcttgtcccaggccccagcacagccctccccggatatgtttcagctggagcctcgactcggcgctctggccctttccccgaaaggaagcacctccctggaccatgcccttgagcggacatatcagcttcttgtgcaagtgaaggacatgggggatcaggctagtggacatcaggccaccgcgactgtggaagtctcgattattgaaagtacctgggtttctcttgagcctatccacttagctgaaaacctcaaggttctatatccacatcatatggcacaggtccattggtctgggggtgacgtacattaccatctggaaagccacccccctgggccatttgaagtaaacgcggagggcaatctatatgtgaccagagaactggatcgggaagcccaagcagaatacttgcttcaggtgcgcgcccagaattctcacggcgaagattacgctgctcctttggagttgcacgtccttgtaatggacgaaaatgacaacgtcccgatctgccccccgcgggaccccacagtctccatccccgagctttccccccccggaactgaggttactaggttatccgccgaggatgccgatgcgccgggctcaccaaatagccatgttgtctaccagctcttgagccccgagcccgaagacggagtagaggggagagccttccaagtggaccctacgagcggttcggtgactctgggagttctgcccctacgagcaggccaaaatattctgttgctggtgctcgccatggatcttgccggggccgagggcggcttttcaagcacgtgcgaagtagaagtcgccgtgactgacatcaacgatcatgctcccgaattcatcacatcccagatagggccaatcagcctgcccgaggacgtggagcctgggaccttagtggcaatgttaacggccatcgatgcagatctcgaacctgcttttcgcttaatggactttgccatcgaaaggggtgatacagagggaactttcggcctggactgggaacctgattcaggccacgtccgcctgcgcctgtgcaaaaaccttagctacgaggcagctccaagtcatgaggtggtggtagtggtgcagtcggtggccaagcttgtgggacccggacctggtccaggcgccacggccactgtcacggtgttggtcgagcgcgttatgccccctccgaaactcgaccaggaaagttatgaggcaagcgtccctatttccgccccagccggctcgttcctgctgaccattcaaccttcggaccctatctccagaactctgcgattcagccttgtcaatgattctgaggggtggctgtgcatcgaaaagttcagcggagaggtacatacggctcagtctctgcagggtgcacaacccggggacacctatacagtgttggtggaagctcaagacactgatgagccaaggctcagcgcatctgccccccttgtgattcactttctaaaggcaccacccgctcctgctctcactcttgcaccagtcccaagccaatatctctgcactcctcgccaggatcacggattaatcgtgtcagggccaagcaaggatcccgatctcgcgtccggacacgggccgtactcgtttaccctgggtcctaatccaacagttcagcgggactggaggctgcagactctgaacggcagccacgcgtacctaactctcgccctccattgggtggaacctagagagcatatcattccagtggttgtgagccataacgcccagatgtggcagctactggtgagggtgatcgtttgccgatgtaatgtggagggacagtgtatgcggaaggtcggaagaatgaagggcatgccaacaaagcttagtgccgtggggatcttagtcgggactttggtggcaattgggatctttttgatccttatcttcacacactggaccatgagcaggaagaaagaccccgaccaaccagccgactccgtgccgctgaaggcgacggtatag

SEQ ID NO: 181044 - DNA, 2499 bp, synthetic construct
  misc_feature 1..2499: note = Description of Artificial Sequence: Synthetic coding sequence
  source 1..2499: mol_type = other DNA
atgatcctgcaggcccacctgcacagcctgtgcctgctgatgctgtatttagctactggctatggccaagaaggtaaattctcaggtccattgaaaccgatgaccttctctatatatgaggggcaggaaccctcccagattatttttcagtttaaggctaaccccccggcagtgacctttgagctaacaggcgaaacggacaacatctttgttattgaaagggaagggttgctttactataacagggcattggacagagaaacacgaagcacccacaacctccaggtcgcggcgttagatgctaatggtataattgtggaagggccagtgcccattacaatcaaggtgaaagacatcaatgacaacaggccaacttttctgcagtccaaatacgagggatccgtgcggcagaactcacgcccgggcaagccgttcctgtatgtgaatgcgaccgatctggatgatccagccactcctaatggccaactttattatcaaatcgtgatccagttgcccatgatcaataacgtgatgtatttccaaatcaataataaaactggagctatttccctgacgcgcgaaggaagccaagagttgaaccccgccaaaaatccatcctataacctggtcattagtgtgaaggatatgggtggtcagtccgagaattcatttagtgatactaccagtgtggatatcattgtgaccgaaaatatctggaaagcccctaaacccgtggaaatggtcgagaattcaactgacccacatcctatcaagatcacccaggttaggtggaacgacccgggtgcccaatattctctcgttgataaagaaaaactcccccggttccctttttccatcgatcaggaaggcgacatctacgtgacacagcctctggaccgcgaagaaaaggatgcatacgtattctacgctgttgctaaggacgaatacgggaagcccctgtcatacccactggaaatccacgttaaggttaaagacataaatgacaatccgccgacctgccccagtccagtcactgtgtttgaagtgcaagagaacgaaagattaggtaattctattggcactctgaccgcccatgaccgtgatgaggaaaacaccgctaactcatttctcaactacaggatagtcgaacagacacccaaattgccaatggatggactgtttttgattcaaacctacgcaggaatgctgcagttggcaaagcagagtttgaagaaacaagacactccccaatacaacctgactatagaggtctccgataaggatttcaagactctgtgtttcgtccaaattaatgtcattgatatcaatgaccagatccctatttttgagaaatcagactacggtaatctgacattagccgaggacacaaacattggttcaacaatcctgacaatccaggctaccgatgctgatgaacctttcaccgggtcctctaaaattttataccatataatcaaaggtgattcagaggggcgccttggcgtggataccgatcctcataccaacaccgggtacgtaattataaagaaacctctcgactttgagacagcagccgtatctaacatcgtctttaaggctgagaaccctgagccgctggtgtttggcgtcaagtataatgccagttctttcgctaagtttacactgatagtcacagacgttaatgaggctccacagttcagtcaacacgtatttcaggccaaggtgagcgaagacgtggcgataggaactaaggtgggaaacgttacagcgaaggaccccgagggactggatatatcttattcacttagaggagacactcgcggatggcttaagatcgaccacgtgactggtgagatcttcagtgtcgctcccctggacagggaagccgggtccccctatagggtccaggttgttgccacagaagtggggggatcatccttgtcctctgttagtgagtttcatctgattctgatggatgtgaacgacaaccccccaagacttgctaaagactatacgggacttttcttttgccacccactgtctgcccctggatccctgatattcgaagccaccgacgatgaccagcatctgtttcgaggcccccactttacgttttctctgggcagcggtagcctccagaacgactgggaggttagtaaaattaatggcactcatgcgaggctatcaactcggcacactgaatttgaggagagggagtatgttgtgctgatcaggattaatgatgggggtcgcccgccactggagggaattgtgtcactcccagtaaccttttgctcctgtgtagagggctcgtgcttccggccagcaggccaccaaaccggcattcccacagttggcatggctgttggtattctgctgacaacattgctggttatcggaattatcctcgcagtggtcttcatccggatcaagaaggataaagggaaagacaacgttgagtccgcccaggcctctgaagtcaagccattacgaagttag

SEQ ID NO: 181045 - DNA, 2499 bp, synthetic construct
  misc_feature 1..2499: note = Description of Artificial Sequence: Synthetic coding sequence
  source 1..2499: mol_type = other DNA
atgatcctgcaggcccacctgcacagcctgtgcctgctgatgctgtacctggctacaggctatgggcaggaagggaagttcagtgggccactgaagcctatgacttttagcatttatgagggccaggagccaagtcagattattttccaattcaaagcaaaccccccagctgtgactttcgagctcactggggagaccgacaatatcttcgtgattgaacgggagggtttgctctattacaaccgcgcccttgatcgcgagacacggagcacccacaaccttcaggtggcagccctcgatgccaatggcatcatcgtggagggtcctgtgcccataacgataaaggtgaaagatattaacgacaatcggccgacatttctgcagtccaagtacgaggggagcgtcaggcagaactcacgtcccggaaagccttttctctacgtcaacgccacggatcttgatgatccggcgacgcccaacgggcagctctattaccagatcgtgatacagcttccgatgatcaataacgttatgtacttccagattaataacaaaacaggagctatcagtcttacccgggaaggaagtcaggagctgaaccccgctaagaaccccagttataatttagtcatctcggtgaaggacatgggcggccagagtgaaaactccttctccgacaccacatccgtagacataatagtgaccgaaaatatatggaaggctcccaagccggtggagatggtcgagaattccactgatccccaccccatcaagattacgcaggttaggtggaacgatcccggtgcacagtacagtctagtggacaaggaaaagctgccacgattccccttcagcatcgatcaggaaggagacatctatgtaacacagcccctggaccgggaggagaaggacgcatacgtattctatgctgtcgcaaaagacgagtacggcaagccactctcatatccgttggagatccatgtgaaagtgaaggacattaatgacaatcctccgacttgcccctctccagtcaccgtattcgaggtacaggaaaatgaacgtctggggaacagcattggcactctcacggcccatgaccgtgacgaggaaaataccgcaaactcgtttttgaattaccggatcgtcgagcagactcccaagctgccgatggacggccttttcctgattcagacatacgccgggatgctccaattagctaagcaaagcctaaagaaacaggatactccccaatataacctaacaattgaggtttccgacaaagatttcaagacgctgtgcttcgtgcaaattaacgtgatagatattaacgaccagattcctatcttcgagaaaagtgattacggcaatctcaccctggcggaagacacaaacatcgggtccactatactaaccatccaggcaacagatgccgacgaacccttcacgggaagctctaagatactctatcatatcatcaagggcgatagtgagggccgcctgggcgtcgacacagatccacacacaaacaccgggtatgtcatcattaaaaaacctttagactttgaaaccgccgccgtgtcaaacatagtgtttaaagcagaaaaccccgaaccgttagtgtttggggtcaagtacaatgcctccagctttgccaaatttaccctgatagtcacggacgttaacgaggcaccccagttcagtcaacacgtgttccaggccaaagtatcagaggatgtggcgattggaacaaaggtggggaatgttaccgcaaaagaccctgaggggctcgacatctcttacagcctgcgcggggacacaaggggttggcttaaaatcgatcacgttacaggtgaaattttctctgtggctcccctagatcgtgaggccgggagcccatatcgagtacaggtagtggccacagaggtgggagggagctctctttcatctgtgagtgagttccatctgattttgatggatgtaaatgataaccctcccagattggccaaggactatactggcctgttcttttgccatccgctgtctgcgccaggcagccttattttcgaggcaaccgatgacgatcagcacttatttagggggcctcactttacgttcagccttgggagcggatctttgcaaaacgattgggaggttagcaagattaatggcacacatgcccggctgagcactaggcataccgagttcgaagagagggagtacgtggtgcttatccgcataaacgatggtggacggccccctctggaaggaattgtgtcgcttcctgtgacgttttgcagttgcgtcgaaggctcctgctttcggcctgcaggccaccagactggaattcccactgtcggtatggcggtggggattttgttaactacccttctcgtcattggtattatcttggcagtcgtatttatcagaataaagaaggacaagggcaaagataacgtggagtctgcccaagcatcggaagtgaaacccctccgttcctag

SEQ ID NO: 181046 - DNA, 444 bp, synthetic construct
  misc_feature 1..444: note = Description of Artificial Sequence: Synthetic coding sequence
  source 1..444: mol_type = other DNA
atgatcctgcaggcccacctgcacagcctgtgcctgctgatgctgtatcttgcaactggatatggccaagaggggaaattcagtgggcctctgaaaccgatgactttctctatctacgaaggccaggagcccagtcagataatttttcagtttaaagcaaacccccccgcggtgacgttcgagctgacaggagagacagataacatattcgttatcgagagagagggccttctgtactataatcgtgctctggatagagagacacgcagcactcacaatcttcaggtagcagccctggacgccaatgggatcattgtggaagggcctgtgccgattaccatcaaggtgaaagacattaacgataatcgacctacattcctgcagtcaaaatatgagggctctgtaagacagaattctcgccccggcaaacctttcctctactag

SEQ ID NO: 181047 - DNA, 2373 bp, synthetic construct
  misc_feature 1..2373: note = Description of Artificial Sequence: Synthetic coding sequence
  source 1..2373: mol_type = other DNA
atgaagatcaccagcaccagctgcatctgccccgtgctggtgtgcctctgtttcgtccagaggtgttatggcacggcacatcacagctctatcaaagtcatgcgcaaccagactaaacacatcgagggcgagaccgaggttcatcatcggcccaagcgggggtgggtatggaaccagttcttcgttctcgaggagcacatgggtcccgacccccagtacgtgggcaaattgcatagtaactctgacaagggggatggcagcgtcaagtacatcctgacaggggagggagcaggaaccatctttatcatagatgatactacaggcgacatacacagtacaaagagtttggaccgagagcagaaaacccactatgtactgcacgcccaggctatagacaggaggacaaataaaccactcgaacccgagtccgagtttattatcaaggtacaagacataaacgacaatgccccaaagttcactgacggcccgtatatcgtaaccgtgcctgaaatgagcgacatgggtacatcagtgttgcaagtcacagccactgacgccgatgatcccacatatggcaactcagccagagttgtctattccattctccaaggacagccatacttctccgtggaccccaagactggggtgattcggaccgctctacataacatggaccgcgaggccagagaacactattctgttgttatccaggccaaggacatggccggccaagtgggtgggctgtccgggtcaactaccgtcaacatcacgcttaccgacgttaatgacaatccccctaggtttccccagaaacactatcaattgtatgtccctgagtccgcacaggtggggtcggccgtaggcaaaatcaaagcaaacgacgccgacacgggcagtaatgccgatatgacatacagcattattaatggcgatggtatgggcattttctccatctcaaccgacaaagagactcgcgaaggtatcttatcattgaagaagcctctcaattacgagaaaaagaagagttacactctcaatatcgagggggccaatacgcatttggatttccggttttcccacctggggccattcaaggacgccacgatgctgaaaatcatagtgggcgacgtggacgagcctcctttgttctccatgccatcctacctcatggaagtttatgaaaatgccaagattgggacagtggtgggcacagtgcttgcccaggacccagactcaacgaacagcttggttcgctattttataaactacaacgtggaagatgaccgtttcttcaacatcgacgctaacaccggcaccattcgcacaaccaaagtattagacagagaagaaaccccttggtacaacatcaccgtgaccgcttctgagattgacaacccagatctgttaagccacgtgacagttggcatccgcgttttggatgtgaacgataaccctccagaacttgcaagagagtatgatatcattgtgtgtgagaactccaaacccggtcaggtcattcatacaatatctgccacagacaaagatgacttcgctaacgggccacgttttaatttcttcttggatgaacgcttgcctgtgaaccctaatttcactctcaaagacaatgaagataacaccgccagcatcctgaccagacggcggcggttctctcggacagttcaagacgtgtattatttgcctattatgatttccgacggaggaatcccatctctgtctagcagctctacattgacgatccgggtctgtgcgtgcgagcgggacggtcgagtcagaacctgtcacgcagaggcattcctgtcaagcgctggcttaagcaccggagccctgatcgcaatcctgctgtgcgttcttatcctactggccatagtggtcttgtttataacgctccggcggtctaagaaagaacctctgatcataagtgaagaagacgtaagagagaacgtggtgacatacgatgatgagggcggaggcgaggaggacaccgaggctttcgatataaccgcattgcggaatccctccgcagcagaggaactgaagtacagaagggacattcgtccggaagttaaactgacccccaggcaccagacttcaagtacactcgagtccatcgatgtccaggagttcatcaaacagcgcctcgccgaggccgatctggatccatcagtacctccttacgattcactccagacatacgcctacgagggccagaggtctgaggcagggtctatctcttctctcgacagtgccaccacgcagagcgatcaggactaccactatctcggcgattggggacctgagttcaaaaagctggctgaactatatggcgagattgaatctgagaggaccacctag

SEQ ID NO: 181048 - DNA, 2373 bp, synthetic construct
  misc_feature 1..2373: note = Description of Artificial Sequence: Synthetic coding sequence
  source 1..2373: mol_type = other DNA
atgaagatcaccagcaccagctgcatctgccccgtgctggtgtgcctctgcttcgtgcagaggtgttatggcaccgcccatcactcttcgatcaaggttatgagaaatcagacaaagcatatagagggcgaaactgaagtgcaccaccgccctaagcggggctgggtgtggaaccagttctttgttctagaagaacacatgggtcccgacccacagtacgtggggaaattgcattctaattccgataagggagacggcagtgtgaagtacattctgacgggtgaaggcgcgggcaccatcttcatcatcgatgatactaccggtgatatacacagtactaaatctctcgaccgcgaacagaaaacgcattacgttctgcacgcccaggcgatagaccgccgcactaataaaccacttgagcctgagagtgagtttatcattaaagttcaggacatcaatgacaacgctccaaagttcactgatgggccatacatcgtcacagtccccgagatgtctgacatgggcacctcagttctgcaagtgacagccaccgacgcagatgatcccacttacggaaacagcgcccgtgtggtctatagcatccttcaaggacagccctacttcagcgtagatcctaagacaggagtgatcaggaccgctctccacaacatggatagggaggcacgagaacactactccgtggtcattcaggctaaggatatggccggccaggtcggcggcctgtccggatctacgactgtcaacataacactgaccgacgtgaacgataatcctccgcggtttccacagaagcattatcaattgtatgtgcctgaaagcgcccaggtaggatctgctgtgggcaaaatcaaggccaatgatgcggacacaggctcgaacgcggatatgacctactcaataattaacggagacggaatggggatctttagcatttccacggacaaggagactcgcgagggaatcctaagcctgaaaaaaccacttaactacgagaaaaaaaagtcctatactctgaacatcgagggagccaatacccacctggatttcagattcagccacctgggtcccttcaaagatgccacaatgctcaaaataatcgtgggggacgtggacgagccacctttgttttccatgccctcttatctcatggaggtttacgagaatgcaaagatcgggacggtggtcgggactgtcctggcccaggatccggactcaacaaactcgcttgtcaggtattttattaactacaacgtggaggatgacaggttttttaatattgacgccaacacaggaaccatccggactacaaaggtccttgaccgcgaggagactccatggtataatatcactgttactgcgtcagagattgataaccccgacctgctcagccacgtgaccgtgggaatcagggtactggacgtgaatgataatccacctgaactcgcacgggagtacgacattatcgtctgtgaaaattctaagccaggacaggtgattcatacaatcagtgccaccgacaaggatgacttcgcgaacgggccccggtttaactttttcttggatgaaagattgccagttaatccaaattttacgcttaaagacaatgaagacaacactgcaagcattcttacccggcgtcgtcgtttctcacgaaccgtccaggacgtgtactatctgcccattatgatttccgacggaggaatcccgtccctaagctctagctccactctgactatcagagtgtgcgcttgcgaacgggacggccgggttaggacatgccacgcagaagcgttcctctcctccgcaggactgtcgacaggagctcttatcgccattctcctgtgtgtgctgattctcctggcaatcgtcgtactgttcatcactctccgtagaagcaaaaaagagccattaattatctctgaagaggacgttagagaaaatgtagttacatatgacgatgaaggaggcggagaggaggacactgaggccttcgatattaccgcccttcgtaatcctagtgccgctgaagagctgaagtatcgccgggatataaggccagaagttaaactgaccccccggcaccagactagctccaccctcgaatccattgatgtgcaggagtttatcaaacaacgcctagccgaggcagatctggatccatccgtacccccttatgactccctgcagacatacgcttatgaggggcagcgctccgaagccgggtccatttcttccctggactcagccacaacacaaagcgatcaagattatcactacctaggcgattgggggccagaattcaaaaagctcgccgaactgtacggtgagatagaaagtgagcggacaacctag

SEQ ID NO: 181049 - DNA, 1725 bp, synthetic construct
  misc_feature 1..1725: note = Description of Artificial Sequence: Synthetic coding sequence
  source 1..1725: mol_type = other DNA
atgaagatcaccagcaccagctgcatctgccccgtgctggtgtgcctatgcttcgtccagaggtgctacggaaccgcccaccactcgtccatcaaggtgatgcgaaaccaaaccaaacacatagagggagaaacagaagtgcaccaccgtccgaagagagggtgggtgtggaatcagtttttcgtccttgaagaacacatgggcccggatcctcaatatgtgggcaagctccattccaacagcgacaagggtgacggatccgtgaagtatatactgacaggagagggcgccgggactatcttcattatagacgataccactggggacatccacagtactaaaagccttgaccgggaacagaagacccattatgtattgcacgctcaggctatcgataggaggaccaacaagccgctcgaaccagagagtgaatttataatcaaagtccaggacattaacgacaacgcccccaagttcaccgacggcccctacatcgtgactgtacctgaaatgagcgacatggggacctccgtgctacaggtcaccgctaccgacgctgacgacccaacatacggtaacagtgcccgggtggtatactcaattctgcagggacagccatacttcagtgtcgatcccaagacaggagtgattcgcaccgcactgcataacatggatagagaagcacgagagcactattcagtcgtcatccaggccaaggacatggcgggccaagttggaggattatccgggtctaccactgtgaacatcactttaaccgacgtgaacgataaccctcccagatttcctcagaaacactaccagctttacgttcccgagagtgctcaggtcggcagcgccgtcggcaagataaaggccaatgatgcagataccggatccaatgcggatatgacatatagtatcattaacggagatggcatgggaattttttccataagcaccgataaggagactcgtgaagggatcctgtctctgaaaaaaccactgaattacgaaaaaaaaaaatcgtacacattaaatatcgaaggggccaatacacatctcgatttccgcttttctcacctgggccccttcaaggacgcaacgatgctaaagattatcgtaggagacgtagacgagcccccactcttctctatgccctcctacctgatggaagtgtatgagaacgcgaagatcggcaccgtggtcggtacggtgttggcccaggacccagactcgacaaattcgttggtgcggtatttcataaactataacgtggaggacgacagattcttcaatatcgacgctaacactggcactattcgtactacaaaagtgcttgaccgggaggagaccccctggtacaatattaccgtcacggcttcagaaattgacaacccagatttgctctctcatgtcactgtggggataagggtactggatgtgaacgacaatcctccagagctggccagagaatacgacatcattgtgtgcgagaattcaaagccagggcaagtgatccatactatctctgcaaccgacaaagatgatttcgctaatggacctcgattcaatttcttcctggacgaaagactgccagtaaacccaaacttcacattgaaggacaatgaagctgctgcaccttctccaagcggttttgtgcatgcccgcgagatgggggtgtgcggccctgccatgcagaagccatcatgcccacggctcgtatag

SEQ ID NO: 181050 - DNA, 2373 bp, synthetic construct
  misc_feature 1..2373: note = Description of Artificial Sequence: Synthetic coding sequence
  source 1..2373: mol_type = other DNA
atgaagatcaccagcaccagctgcatctgccccgtgctggtgtgcctgtgctttgtacagcggtgttatggcaccgcccatcactcgtctataaaagttatgcgcaaccagaccaaacacattgagggcgagaccgaggtgcaccatcggccaaagcgaggatgggtgtggaatcagtttttcgtcctcgaggagcacatgggaccggatccccaatatgtgggcaaattacactccaactcagataaaggagatggctctgtcaaatatattctgacaggagagggcgcgggtactatctttatcatcgacgatactaccggggatatccactccaccaagtcgctcgatcgcgagcagaaaacacactacgtactccacgcccaggctattgaccggcggaccaataaacccttggagcccgagtcagagttcattataaaagtgcaggacatcaacgacaatgcccccaagtttacagatggaccctatatagtgaccgtgccagagatgagcgatatgggcacttctgtgctgcaagttactgctacagacgccgacgatcccacctacggcaactccgcccgtgttgtgtacagcatactgcagggccaaccatacttcagcgtggacccgaagacaggagtgatccggacggccctgcacaatatggacagagaagcccgtgagcactactccgttgttattcaggcgaaggacatggccggccaagtggggggcctctcaggatccacaaccgtgaacattaccctgacagatgtcaatgataacccaccacggttcccccagaaacactaccaactctatgtcccagaatctgcccaggttggtagtgccgtcggaaaaatcaaggccaatgacgcagatactggctccaacgccgacatgacttactctatcataaacggagacgggatggggatctttagcatcagcaccgataaagaaacaagggagggaatattgtccttaaagaagcctctaaactacgagaagaagaagtcctatactctgaacatagaaggcgcaaacacccacctcgactttcgattttcacacctgggacccttcaaggacgccacaatgctcaagatcattgtcggcgacgtagacgagccacctcttttttcaatgcccagctatctgatggaagtttacgagaacgcaaaaattggtactgtggtgggcacggtcctggcccaggatccggattcaactaactctctcgttagatacttcattaactacaacgtcgaggacgacagattttttaacatcgacgctaacacaggcaccatcaggacaacaaaggttcttgacagagaagagactccttggtataacattacagtgaccgcttcagaaatcgacaaccccgatctactctcacacgttactgttggcatccgggtcctggacgttaatgacaacccacccgagcttgctagagaatatgacatcatagtatgcgaaaatagcaagcctggccaggttatacatacgatcagcgccacggacaaggatgattttgctaatggcccgaggttcaatttcttcctggacgagcggctacccgtgaatcctaactttaccctgaaagataacgaggacaatacagcttcaatactaactaggagacggcgctttagcaggaccgtgcaggacgtctattatcttcccattatgatatcagatggtgggattccgtcattgtcatcttcgtcgacactgactatccgcgtatgtgcatgtgagagggacggccgcgttcgcacctgccacgcagaggcctttttgagttccgccgggctctcaactggagccctcatcgccatcctgctgtgcgtcttaattcttctggctatcgtagttttatttatcactctacggcggagtaaaaaggagccactcattatttctgaagaggacgtgagggagaacgtggttacatatgacgatgaaggaggaggtgaggaggatacagaggccttcgatattactgctcttcggaatcccagcgcagcggaagagctcaagtatcgcagagatattaggccagaggtcaaactcactccaagacatcagacctcgtccacattggagagcatcgacgtccaagagtttataaagcagcggttggccgaggccgatcttgatccgagcgtgccaccatacgacagcctccaaacttacgcatacgagggccaaagatcggaagctggctccatttcatcactggattctgccacgacacaaagtgatcaggactatcattacttgggtgactggggaccagaattcaagaagttggccgagctctatggcgaaatagaatcagaaaggacaacgtag

SEQ ID NO: 181051 - DNA, 2373 bp, synthetic construct
  misc_feature 1..2373: note = Description of Artificial Sequence: Synthetic coding sequence
  source 1..2373: mol_type = other DNA
atgaagatcaccagcaccagctgcatctgccccgtgctggtgtgcctttgcttcgtccagcggtgttacggcaccgctcaccattccagtatcaaagtgatgcgcaaccagacgaaacatattgaaggcgaaacggaagtgcaccataggccgaagcgcggatgggtctggaaccagttctttgtgttggaagaacatatgggcccagatccccagtacgtcggtaagctgcactcaaattcagataaaggagacggaagcgtgaaatacattctgacgggtgagggggctggcaccattttcattatagatgacaccaccggcgacatccatagcaccaagtccctcgatagagagcagaaaacacactatgtgttgcacgcccaggcgatagaccgccgaaccaataagcctctggagcctgaatccgaatttattattaaggtccaggatatcaacgataatgcccctaagtttaccgacggcccgtacattgtgaccgtaccggagatgtctgatatgggcacatcagttttgcaggtgaccgccacagacgcagatgacccaacatacgggaacagtgcacgcgtggtctattcgattctgcaggggcagccatatttcagtgtcgaccctaaaaccggtgtgattcgtacggcccttcacaacatggacagggaggccagggagcattattccgtggtgatacaggctaaagacatggccggccaggtgggcggcctgagtggatctaccaccgttaacatcacactgacggacgttaatgacaacccacccagatttcctcaaaaacattaccaattatacgttccagaatccgctcaggtgggtagtgcagtcggtaaaattaaggccaatgatgctgacacaggaagcaacgccgacatgacatactctattattaacggtgatggtatgggtatattctcaatcagtaccgacaaggaaaccagggagggaatccttagtttgaaaaagcccctgaattacgaaaaaaagaaaagctacaccctcaatattgaaggagcgaatacccatctcgatttccgcttcagccatctcgggcccttcaaggatgcaaccatgctcaaaattatcgtaggggacgtggatgaaccaccattgttttcaatgccgtcttacttgatggaagtgtatgagaatgcaaagattggcaccgtcgtcggaaccgtgttggcacaggacccggattccacaaattccctggtgcgctacttcatcaactataacgttgaagacgacaggtttttcaacattgacgccaatacaggtactatccgcaccactaaagtactggaccgggaggagaccccttggtataacatcaccgtcacagcctcggagattgataaccccgacctgcttagtcatgtgaccgtgggcatccgagtgctcgatgtgaatgacaacccccctgaactagctcgcgagtatgatataatcgtttgcgagaattccaagcctggccaggtaattcacaccatttctgccacagacaaggatgacttcgcaaacggcccaagattcaatttctttcttgatgagaggctgcccgtgaaccccaatttcactttgaaagacaatgaggacaataccgcgtcgattcttactcgacgccggcgcttctcgcggacggttcaggacgtgtattacctgcctataatgatttctgatggcgggatccctagtttaagctcatcttccacacttacaatccgtgtctgcgcttgcgagagagacggcagagttcgcacctgccatgcggaggccttcctctcctcagccggactatccaccggcgctttgattgcaatccttttgtgtgtcctaatcctcctggcaattgtcgttctgttcattaccctgagaagatctaaaaaagaacccctgatcatctccgaggaggacgtcagggaaaatgtggttacatacgacgatgaagggggcggtgaggaagacacagaagccttcgacattactgcactgcgcaatccatcagccgcggaagagcttaagtataggcgagacatccggccagaagttaaactcactcccaggcatcagacttcgagcacgcttgaatctattgatgttcaggaatttatcaagcaaaggctggctgaagccgatctggacccgagcgtacccccatacgactctctacagacgtatgcctatgagggtcagcgaagcgaggctggctctatttcatccctggactccgccactacccagagcgaccaggactatcattatctgggtgattgggggccagagtttaagaagctggccgagttatacggtgagatagagtccgagcgcaccacctag

SEQ ID NO: 181052 - DNA, 2319 bp, synthetic construct
  misc_feature 1..2319: note = Description of Artificial Sequence: Synthetic coding sequence
  source 1..2319: mol_type = other DNA
atgaactgctacctgctgctgcggttcatgctgggcatccccctgctgtggccctgcctgggagccacagagaactcacagacaaagaaggtgaaacagcctgtacgctcccatcttcgcgtaaaacggggctgggtgtggaaccaattcttcgtgcccgaagaaatgaataccacttcgcaccacattggtcaactgcgaagcgacctggacaatggaaataatagctttcaatataaactgctgggggcgggggccggtagcacgtttataatcgatgagaggaccggcgacatttatgctattcagaaactggaccgggaagagaggtctctgtatatcttgcgcgcgcaggtgatcgacatcgctacgggaagggctgtggaacccgagagtgagtttgtcataaaggtcagcgatattaatgataatgagcccaagtttctggatgagccatatgaggctatcgtgcctgagatgagtcctgagggcaccctggttattcaagtgaccgcgtctgacgccgacgacccttcttccgggaacaatgcccgactcctctactcccttctgcagggacagccttacttcagcgttgagcccactactggagttatccgtatttcttcaaagatggatagagagctgcaggacgaatactgggtgatcatccaggcaaaggatatgattggccagccaggggccctttctggcaccacatccgtcctgattaaactgagtgatgtgaacgacaataagcccatctttaaagagtctttataccgcctaactgtgtccgaatcggctcctacaggaacgtcgatcggcaccatcatggcctatgataatgatattggcgaaaacgcggaaatggactactcaatcgaggaggacgattcccaaacttttgacatcattaccaaccacgaaacacaagagggaatcgtcatacttaaaaagaaagtggattttgaacatcaaaaccactatggaataagggccaaggtgaagaaccaccacgtccccgagcagttaatgaagtatcatacagaggcaagcactaccttcataaaaattcaagtcgaggacgtcgacgaacctcccctctttctgttaccatactacgtgttcgaggtgttcgaggaaaccccccaggggtcctttgttggagttgtgtccgcgaccgaccccgacaacaggaagagtccaattcgctactctattactcgctcgaaggtgtttaatattaacgataatggcaccatcaccacatcgaactctctggatagagaaatttcggcttggtacaacctctcgattaccgccacggaaaagtacaatatcgaacagattagcagcatccctctgtatgttcaagttctcaacattaatgatcacgcaccagagttttcacagtattatgagacttacgtgtgcgaaaacgctggctccgggcaggtgatacagacaatcagtgccgtagaccgggacgagtccatcgaggagcatcatttttattttaatctgtcggtggaggacactaataactcaagcttcaccatcattgacaatcaagacaacactgcagtgattctgactaaccggacagggtttaacctgcaagaggagcctgtgttctacatcagtattctcattgctgataatggaattccgagccttacatccaccaatacactcaccattcatgtatgtgactgcggtgactctgggagtacgcagacctgccaataccaggaactggtgctgtcaatgggtttcaagactgaagttattattgcaatcctcatttgtattatgattatttttggatttatttttctgacattgggtctgaaacaaaggcgaaaacaaatcttgttcccagagaaaagtgaagatttccgggagaacatctttcagtacgacgatgagggcggaggggaagaggacaccgaggcgtttgatatcgcagagttgcgctcctcgactatcatgcgcgaacgcaagacccggaaaaccacgagtgcagaaatccgcagcttgtatcgtcagtctctgcaggtcggccccgattcagcgattttccgaaagttcatcctggagaagctggaagaggctaatacggatccctgtgcccccccattcgatagcttgcagacatatgcttttgaaggcactgggagtctagccggcagcttgtctagtctggaatctgcagtttccgatcaggacgaatcatacgactatctgaatgagctgggtccgcggtttaaacgcttagcctgtatgttcggcagtgctgtgcagagcaataactag

SEQ ID NO: 181053 - DNA, 1173 bp, synthetic construct
  misc_feature 1..1173: note = Description of Artificial Sequence: Synthetic coding sequence
  source 1..1173: mol_type = other DNA
atgaacaccaccagccaccacatcggccagctgcggagcgacctggacaatggaaataatagcttccagtacaagctcctgggagctggtgccggcagcacatttattatcgatgaacgtacaggcgacatctatgcaatccagaagctggaccgagaggagcgaagcttgtacatactccgggcacaggtgatcgatattgcaactggtcgggcagttgaacccgaaagcgaatttgtgataaaggtcagtgatattaacgacaacgagccgaaatttctggatgaaccttacgaagccatagtacccgagatgtcacctgaggggacattagtcatacaagtgaccgcttctgatgcagatgatccttcttcagggaataacgcccgtctgctgtatagcttacttcagggacagccatacttcagtgtggaacctacaacgggcgtcattcgaatttcatccaaaatggaccgcgaactgcaggatgagtactgggtgattattcaagccaaagacatgatcggtcaacccggcgccttgtcgggcacaaccagcgtgctgattaagctgagtgacgtcaacgacaacaagccaatcttcaaagagagtctgtaccgtctgaccgtgagcgagtccgcccctaccggcacttccataggtaccattatggcctacgataacgacatcggcgagaacgctgaaatggactactctatcgaagaggacgactcacagactttcgatatcatcacgaaccacgagacgcaggagggcatcgttattcttaagaaaaaggtggactttgagcatcagaaccactacggaatccgggctaaggtgaagaaccaccatgtgccggagcagctgatgaaataccacacagaggcttctaccactttcataaagatccaagtggaagatgtggatgaaccccccctgttcctcctcccctactacgtatttgaggtgtttgaggagacccctcagggctcctttgtgggcgtcgtgagcgctacagatcccgacaacagaaagtctcctatccgatattctattaccaggtctaaggtgtttaacatcaacgacaatggcaccatcaccaccagtaactctcttgaccgggagatctccgcgtggtacaaccttagcatcacagccaccgaaaagtag

SEQ ID NO: 181054 - DNA, 1473 bp, synthetic construct
  misc_feature 1..1473: note = Description of Artificial Sequence: Synthetic coding sequence
  source 1..1473: mol_type = other DNA
atgaactgctacctgctgctgcggttcatgctgggcatccccctgctgtggccttgtcttggggctaccgagaatagccaaaccaagaaagttaagcaacctgtgcgctcccacctgcgagttaaaagaggctgggtctggaatcagttctttgtgcctgaagagatgaatacaacttcacatcatatcggtcagctcagatccgatttagacaacggtaataattcttttcaatacaaacttctaggagccggagccggatcaacatttattatcgacgaacgaacaggggatatatacgcaatccagaaactggatagagaagagcgcagcctgtacatcctgagggcccaggtgatagacatcgctacagggcgcgcagtagagcctgagtctgaattcgtgatcaaggtgagtgacattaatgataacgaaccaaaatttctggatgagccctatgaggctattgtgcccgagatgagtccagagggaaccctggtgattcaagtgactgccagtgacgcggatgacccctcaagcggcaataacgctaggctactctactcacttttacagggccagccttacttcagtgttgagccgaccaccggtgttattcgtattagcagcaagatggatagggagctccaggatgaatattgggtgatcatccaagccaaggacatgatagggcagcccggtgccctgtccgggaccactagcgtgctcatcaagctgagcgatgttaatgataataaacctatcttcaaggaaagtttatatcgactcaccgtatccgaatcagcccccaccgggacttccattggtacaatcatggcttatgataatgatattggcgaaaacgctgagatggattatagcatagaagaagacgactcccaaacctttgacatcataacaaatcatgagactcaggagggaattgtcatcctcaaaaaaaaagtggattttgagcaccaaaaccattatggcatccgcgctaaggtgaaaaaccaccatgtgcctgaacagctgatgaagtaccacactgaagcttctaccacatttattaaaatccaggtggaagacgttgacgagcctcccctgttcttactgccctactacgtgttcgaggtatttgaggagacaccacagggctctttcgttggggtcgtctctgctactgaccccgacaatcgtaagagtcccatccgttactcaatcacaaggtccaaggtgtttaatataaatgataacggaaccattactacaagtaactccctcgacagagaaatttccgcctggtacaatctgagcattacagccaccgaaaaatacaacatcgaacagatctctagcatcccgctatatgttcaagtcctcaatattaacgaccatgctcccgagttttctcagtactatgaaacctacgtttgtgaaaatgcgggctccggtcagggcttatttttctag

SEQ ID NO: 181055 - DNA, 2406 bp, synthetic construct
  misc_feature 1..2406: note = Description of Artificial Sequence: Synthetic coding sequence
  source 1..2406: mol_type = other DNA
atgtggaccagcggccggatgagcaacgccaagaactggctgggcttggggatgagcctctatttttggggcctgatggacctgactacaacagtcctaagcgacacccccacgcctcagggcgagttagaggccttgctctctgacaaaccacaatcacaccagcgcaccaagcgtagctgggtgtggaaccaatttttcgtgctggaagaatatacaggaaccgaccctctttatgtaggcaagctgcacagcgatatggatcgaggagacggctcaattaaatacattctgtcaggcgagggcgccggaatcgtctttaccatcgatgacacgactggagacatccacgctattcagcgccttgatcgggaagaaagagcgcaatacactctcagagctcaagctttggacaggcggactggtagaccaatggaacctgaatccgagttcatcataaagattcaggatatcaatgacaatgaacccaaatttcttgatgggccatacgtcgcaaccgtgccagagatgtctcctgtgggtacatcggtcattcaagtgacagctacagacgcagacgatccgacctacgggaattccgcccgagtggtgtattccatattgcagggtcagccttacttttcggtggactccaagactggcgtgatcaggacagccctcatgaatatggatcgagaggccaaagaatactatgaagtcatcattcaagccaaagacatgggcggacagctgggaggcctcgcaggcactacaacagtcaacatcaccctcagcgacgtaaatgacaacccccctcgttttccacagaaacactatcagatgagcgtcctcgaatccgcccctatttcatccactgtaggtagagtcttcgctaaagacttagacgagggcattaacgccgagatgaagtacactatcgtcgacggtgacggagccgacgcatttgacatctccacggatccaaattttcaggtagggattattaccgtgaaaaaacccctcagctttgaatccaagaaaagctacactttgaaggtggagggtgctaaccctcacttggaaatgaggtttctcaacctcgggccatttcaggacactaccacagtgcacatttcagttgaggacgttgacgaaccaccagttttcgagcccggcttttactttgtggaagtcccagaggacgttgcaattggaaccaccatccaaattatctccgccaaggatccagatgtgacaaacaatagcattagatactctatcgatagatccagcgatcccggccgcttcttctatgtcgatatcacaaccggagcacttatgacagccagaccacttgatcgcgaggagttctcctggcataatatcactgtgctggccatggagatgaataaccctagtcaagttgggagcgtgccagtgactataaaagtgcttgatgtcaacgacaacgcccctgaatttcctcgattctacgaggctttcgtctgcgagaatgcaaaggcgggtcagcttatccagaccgtatcggctgttgatcaggatgacccccgaaatggtcaacacttttactacagcctcgccccggaggccgccaacaatccaaactttacaattcgcgacaatcaggacaataccgctagaattctcactagacgaagcgggttccgtcagcaggagcaaagtgtgtttcatcttcccattctgatcgcagattccggccagccagtcctcagctccactgggactctcacaatccaggtctgttcctgtgacgacgatggtcatgtgatgtcatgttcccctgaggcatatatgttgcctgtctctctctcccggggggcactgatcgcgattctggcgtgcatcttcgtgctgctcgtcttagtactgctcattttgtcaatgcgccggcataggaaacagccctacatcattgatgacgaggagaacatacacgaaaacattgtccggtacgatgatgaagggggcggagaagaggataccgaggccttcgacatcgccgccatgtggaaccccagagaggcccaagccggtgcggctccaaagacacgtcaggatatgctgccagagattgagtcactctccaggtatgtgccccagacatgtgccgtgaacagtacagtccatagctacgtgctcgcaaagctgtatgaagctgatatggacctatgggcgccaccctttgactcattgcaaacttatatgttcgagggcgacggtagtgtggcaggttctctgagctctctgcagtcagccacttccgacagcgaacaaagctttgatttcttgactgattggggacctcggttccggaagctggcagaactgtatggagctagcgaggggcctgccccattgtggtag

SEQ ID NO: 181056 - DNA, 2406 bp, synthetic construct
  misc_feature 1..2406: note = Description of Artificial Sequence: Synthetic coding sequence
  source 1..2406: mol_type = other DNA
atgtggaccagcggccggatgagcaacgccaagaactggctgggcctaggtatgtctctgtacttttggggtttgatggatctgaccacgaccgtgctgagtgataccccgactccccagggcgaactcgaggcccttctatctgacaagccccagagtcaccagcgtacaaaacggtcatgggtgtggaatcagttttttgtgcttgaagaatacacgggaaccgatccactgtatgtcgggaaactccacagcgacatggacaggggagacgggagcatcaaatatatactctctggggagggggccgggatcgtgttcacaatagacgacaccactggagatatccacgctattcagcgactggaccgggaagagcgcgcccagtatacgctgcgggctcaggcacttgacagaaggacaggcaggccaatggagccggaatcagaattcattattaaaatccaggacattaatgacaacgagcccaagttcctggacggcccctacgtggcaacagttcccgagatgtctcctgtgggaacaagcgttatacaggtaacggccactgacgcggacgaccccacatacgggaattccgcgagagtggtctactcaatcttgcagggtcagccctacttttctgtcgatagcaaaactggtgtaattcgcacagccttaatgaatatggatagggaagctaaagaatattatgaggttataattcaggcaaaggacatgggcggacagctgggcgggctcgctggcactaccaccgttaatatcaccttgtctgatgtgaatgacaaccctcctcgttttccacagaaacattatcaaatgtcagttctggaaagcgccccaatctcttccacggtggggagagtgttcgctaaggacctggatgagggaattaacgccgagatgaagtatacaatcgtcgacggcgatggcgccgacgcatttgacatttcaaccgaccccaactttcaggtgggcatcatcacagtgaagaaacctctgagctttgaatcaaagaagtcctacacactgaaagtggaaggagcaaacccacacctcgagatgcgcttcctgaacttgggccctttccaggacactaccacagtgcacatctccgtggaggatgtggatgagccgccagttttcgaacctggcttttatttcgtcgaggtccccgaagacgtggcgattggtactactatccagattataagtgcgaaagaccctgatgtcaccaataattccatcagatatagcatcgaccgctcctccgacccaggcaggttcttttacgtggacattacaactggcgcattaatgacggctaggcccctggaccgcgaggagttctcttggcataacatcacggttttggcaatggaaatgaataatccgagtcaggtgggttctgtccccgtcacaattaaagtgctcgatgttaacgacaacgcacccgaatttccccggttttacgaagcctttgtctgtgagaatgctaaagccgggcagcttattcagaccgtatccgctgtggaccaggatgatccaagaaatggccaacacttctattactcactggcaccagaagccgctaataaccccaactttaccatccgggacaatcaggataatacagcgaggatcctgactcgccggtcgggatttcgccaacaagagcaatcagtcttccacctgcccattttaatcgctgactcaggccagccggtgctctccagtacaggcactctaaccattcaggtgtgtagctgcgacgacgacggccatgtcatgtcctgttctcctgaagcctatatgcttccagtaagcctcagtcggggggccctcatcgcaattctcgcttgcatttttgttctgctggtactcgtcttgctgattctgtctatgaggcgacataggaaacagccctacatcatcgatgacgaggagaacatccatgagaacatcgtgcgctacgatgatgaggggggcggcgaggaagatacagaagccttcgatatcgcagctatgtggaatccaagggaagctcaggctggagccgctccaaagaccagacaagacatgctgcccgagattgagtcgctgtccaggtacgtgccccaaacatgcgcagttaactcgaccgtccactcctacgttctggcgaaactgtacgaagcggatatggatctctgggctccgccgtttgatagcctgcaaacttacatgttcgagggtgatgggagtgtcgcggggagtctgtccagtctgcaaagcgcaacatccgattcagaacaaagtttcgacttcctcacggattggggccctcgcttccgcaagctcgccgagctttacggggcctctgagggccccgctcctctgtggtag

SEQ ID NO: 181057 - DNA, 2406 bp, synthetic construct
  misc_feature 1..2406: note = Description of Artificial Sequence: Synthetic coding sequence
  source 1..2406: mol_type = other DNA
atgtggaccagcggccggatgagcaacgccaagaactggctgggcctcgggatgtcattatacttttggggcctaatggatctgaccacaacggtcctcagcgatacaccaacacctcagggcgaactggaggccctcctgtctgataagccgcagtcgcaccagcgaaccaaacggtcttgggtttggaatcagttctttgtcctggaggagtataccggaacagacccgctgtatgttggcaagctgcacagcgatatggacaggggtgacggtagcatcaaatacattttaagcggcgagggagcaggaatcgtgttcactatcgatgacaccacgggcgatatccatgctatccagagattagacagagaggagagggcacaatatacacttcgtgcccaggcgctggaccgcagaacggggcggcctatggaacctgagagcgaatttattataaagatccaggacattaatgacaacgagcccaagttcctcgacggcccctacgtcgctaccgtgccagagatgagtcccgtgggtaccagcgttatccaggtgaccgcaactgatgctgacgaccccacttatgggaattcggcacgggtggtgtactcaattttgcagggccaaccatacttctcagttgatagcaaaacaggcgttattcgcactgctttgatgaacatggatcgggaggcaaaggaatactacgaggtaatcatccaggcaaaggacatgggcggccagttgggaggcctcgccgggacaactacagtgaatatcaccctgtccgacgttaatgacaatcctccccgtttccctcagaagcactatcagatgtctgttcttgagtctgcgccgatcagctcaaccgtgggcagggtttttgcgaaggatctcgacgaaggcatcaacgcagaaatgaagtacacaattgttgacggcgatggcgccgatgcttttgatattagtaccgaccccaacttccaggttggtattatcaccgtaaagaagccactgagcttcgagagcaagaaaagctacaccttgaaagtcgagggtgcgaacccccacctcgaaatgaggtttctgaacctcggcccattccaggacaccactaccgtgcatatctccgtggaagatgtcgatgagcccccggtgttcgagccagggttctactttgtggaagtgcctgaggacgtcgcaatcgggaccactattcagatcatcagtgcgaaagatccagacgtgaccaacaattccatacgctatagtatcgatagatcgtccgatccaggtcgtttcttttacgtagatatcacaactggtgcactgatgactgcccggccattggacagggaggaatttagctggcataatatcactgtactggcaatggagatgaataatccaagccaggtggggagcgtgcccgttacaatcaaagtgctcgacgtcaatgataacgcacccgaattcccgcggttttatgaggcttttgtctgtgagaacgccaaagcaggccaactgatccagactgtctctgctgttgatcaagacgacccccgcaacggccagcacttctattatagtctagctcccgaggctgcaaataatcctaacttcaccatcagggacaatcaggacaacacagctagaatcctgacccgtagaagcggctttaggcagcaagagcagagtgtattccacctgccaatattgatcgcagactcaggccaaccggtgctttcttccacggggaccctgacaatccaagtatgcagttgtgatgacgatggtcatgtcatgtcgtgtagtccagaggcctacatgcttcccgtgagtctgtctaggggagctttgatcgcaatactggcatgcatatttgtgctattagtcctcgtcctgttgattctcagcatgcggcgacaccgcaagcagccatatattatcgacgacgaagagaacatccatgagaatattgtcaggtatgatgacgaggggggaggcgaagaagatactgaagcgtttgacatcgctgctatgtggaacccacgggaagcccaggccggagccgcccccaagacccgccaagacatgttgcccgaaattgaatctctcagcagatatgtgcctcagacatgtgcggtgaacagtacggtccactcctatgtgctggccaaactttacgaggctgacatggatctctgggcccctccctttgatagtttacaaacatacatgttcgagggtgatggaagtgtggcgggcagtttgtcttccctgcagtcagctaccagcgattcagagcagtcttttgattttctgaccgattggggacccaggttccgaaaactggcagagctctacggagctagtgaaggccccgcgccgctctggtag

SEQ ID NO: 181058 - DNA, 2487 bp, synthetic construct
  misc_feature 1..2487: note = Description of Artificial Sequence: Synthetic coding sequence
  source 1..2487: mol_type = other DNA
atgcggccccggcccgagggccggggcctgcgggccggcgtggccttgtcccctgccctgctgctgctcctgctcctcccccctccgcccactctgctagggcgcctgtgggcagcaggaacaccgtccccatcagcccccggagcgaggcaggatggcgccctgggggctggccgggtgaagagggggtgggtatggaaccagttctttgtggtagaggagtacactggcacagaaccgctgtatgtgggcaaaatacactctgattctgacgagggagacggagcaatcaaatatactatctccggggagggtgccggaaccatttttctgatcgatgagctcactggagacattcatgctatggaacgtctggaccgggaacaaaagacattctataccctccgcgctcaagcacgtgatagagcgacaaatagactgctggaacctgaaagtgaatttataattaaggttcaggacataaacgacagtgaaccaagatttctgcacgggccttacatcgggagtgtcgcagagctcagtcccaccggaacgagtgtcatgcaggtcatggcctcagacgccgatgatcccacctatggcagctcggcccgcctcgtttacagcgtactggacggggagcatcatttcactgtggacccaaagaccggcgttatcagaactgccgtgcccgaccttgacagagagtcccaggaacgttatgaggtggtgatccaagcaacggacatggcagggcagctagggggcctgtccgggagtacaacggttactatcgttgtgactgacgtcaacgacaaccctcctcgcttccctcagaagatgtaccagttcagcatccaggaatctgctccgattggcaccgctgtcggccgcgtgaaagccgaagactctgacgtcggtgagaacactgacatgacgtatcacctgaaggacgaatcaagctcagggggcgacgtgtttaaggtgacaacagatagtgatacacaggaggcaattatcgtagtccaaaagcgactggactttgagtctcagcctgtgcacaccgtcatcctggaggccctaaataagttcgtggaccccagatttgctgatctgggaacgttcagagaccaagccattgtacgagtcgctgttacggacgtggacgagccaccagagtttcgccctcccagcggcctcctggaagtccaggaggatgcccaggtcggctcccttgtgggcgtggttacagctcgggatcccgacgccgccaaccggccagttcgttacgctattgacagagagagcgacctggaccagatattcgatatcgacgccgacacgggcgctattgtcacagggaaaggcctcgaccgcgagaccgccgggtggcataacattacagttctcgccatggaggcagacaaccacgcccagctttctcgcgccagtctgcgaatcagaattctggacgtgaacgataatcctccagagttggctactccgtacgaggccgcggtctgcgaggacgctaaacctgggcaactgattcagactatatccgttgtagaccgggacgaaccccagggcggccacaggttttacttcagactggtcccagaagcgccttccaacccccatttctcactgctggatattcaggataacaccgcagcggtgcacactcaacatgtggggtttaatagacaggaacaggatgtgttctttttgcccattctcgtggtggatagtgggcctccaactttgtcgtcaaccgggacactgacaatcaggatctgcggatgcgattcatccggcaccatacagagttgcaataccacagccttcgttatggcagctagcttgtcacccggcgccttgatcgctctgttagtatgtgttttgattctagtcgtgctcgtgctgttaattctgaccctcagaaggcaccacaagtcacacctatccagtgacgaggatgaggacatgagagacaacgtgattaagtataacgatgaaggtgggggtgagcaggatactgaagcatacgacatgtccgcgctgcggtctctatacgactttggcgagttaaaagggggcgatggcgggggtagcgcaggcggaggggcaggcggagggtccggcgggggagccggatctcctccacaggcccacctgcctagcgaaagacactccctcccgcagggacccccatcccctgagcccgattttagcgtcttccgcgacttcatttcccggaaggttgcactagctgacggggatctgtcggtccccccatacgatgcatttcagacttacgcttttgagggcgctgatagcccagctgcttcgctttcctctttgcacagtggctcctctggatctgaacaggattttgcctacctgtcaagttggggccctcgattccggcccctcgcagcactgtacgctggccataggggggacgatgaggcccaggcgtcctag

SEQ ID NO: 181059 - DNA, 2487 bp, synthetic construct
  misc_feature 1..2487: note = Description of Artificial Sequence: Synthetic coding sequence
  source 1..2487: mol_type = other DNA
atgcggccccggcccgagggccggggcctgcgggccggcgtggcccttagcccagccttactactgctactgcttctgccgcccccgccaactttgctagggcggctgtgggccgctggtactccatcaccaagtgccccaggtgctcggcaggacggagccctgggggcagggcgcgtgaagcggggatgggtgtggaaccagttctttgtcgttgaggagtacacaggaaccgagcccctctatgtcggcaaaattcactccgattccgatgagggggacggagccattaagtatactatttctggtgagggcgcggggactatcttcttaattgacgagttgaccggggatatccatgctatggagaggttggaccgcgaacaaaagacattttacacgctcagggcgcaggcacgagatcgtgcaaccaatagattattagaaccagagtctgagtttatcatcaaggtacaggatatcaatgatagtgaaccaaggtttttgcacggcccctacattgggtctgtggctgaactcagccccacaggcacctcagttatgcaggtgatggcgagcgacgccgacgaccctacctatgggagtagcgcacggcttgtatacagcgtactggatggagagcaccatttcacagtggatccaaagacaggtgtcattcgcacggctgtgccggatttagatagagaatcacaggagagatatgaggttgttattcaagctaccgatatggccggccaattaggtggcttaagtggcagcaccacggtgactattgtggttaccgacgtgaatgacaacccccctcggtttccacagaagatgtatcagttcagcatccaagaatcagcccctatcggcaccgctgtcggtagggtgaaggctgaggacagcgatgtaggcgaaaataccgacatgacctatcacctcaaagatgagagcagctccggtggagacgtctttaaagtgacaacagacagcgacactcaggaggcaatcatcgtcgtgcagaagcggctggatttcgagtctcaacccgtgcacactgttatcttggaggccctcaataagttcgtcgatccacggtttgcagacttgggaacatttagggaccaggcaatcgttagagtggcagtgactgatgtggacgaacctcctgagttcagacctccttccggcctgctggaagtccaggaggacgctcaggtcggtagtctggttggggtagtgaccgcaagggacccagacgccgctaaccgcccagtgcgttacgctatcgaccgtgaaagtgacctcgatcagatttttgacatcgacgccgatacaggggctatcgtgacaggcaagggtctcgacagagaaacagcagggtggcataatatcaccgtcttagccatggaagcagacaatcatgcccagttaagccgcgctagtctacggatccggatactggatgtcaacgataatcctcccgagctagccacgccttatgaggctgccgtgtgtgaggacgccaagccagggcagctcattcagaccatctcagtggtggatcgcgatgagcctcagggcggacataggttctatttccggctggttcccgaagcgccatcaaatccacacttcagtctgttagatattcaggataataccgccgcagttcatacacagcatgtcggctttaataggcaagagcaagacgtgttcttcttacctatccttgtcgttgacagtggacctcctactctttcctctacaggaactctgaccatacgcatctgcgggtgtgattcgagcggcacgatccagagttgcaatactaccgcatttgtcatggcagcgtccctgagcccaggggcgttgattgcactgctggtctgcgttcttatactggtcgtgctagtcctgctaatcctgaccctgcgccgccaccataagtctcacctgtcctccgacgaggacgaggatatgcgagacaatgtaattaagtataacgatgagggcggcggagagcaggacacggaggcttacgacatgtccgcactgaggtcattgtacgatttcggcgaactcaaaggcggagacggtggcggttctgctggcggcggggcgggtggtgggtctggaggaggagcaggaagccctccacaggcgcacctgcccagcgagcgccattccttaccgcagggtcctccgagcccggagccagatttctctgtgttccgtgacttcatcagccgcaaggtcgccttggccgatggagacctctcagtgcccccatatgacgcctttcagacctacgccttcgagggggccgatagcccagccgcaagtctgtcaagcctgcattcaggttcatccggtagtgaacaggatttcgcctacttatccagctgggggccacgatttcgcccactggcagctctgtacgctggccatcgtggagacgacgaggcccaggcttcttag

SEQ ID NO: 181060 - DNA, 2490 bp, synthetic construct
  misc_feature 1..2490: note = Description of Artificial Sequence: Synthetic coding sequence
  source 1..2490: mol_type = other DNA
atgggcctgccccggggccccctggccagcctgctgctgctgcaggtgtgctggcttcagtgcgccgcgtctgagccatgtagagcagtttttcgggaggctgaggtgacgctggaggcaggaggtgcagagcaggaacccggtcaagcactgggcaaggtctttatgggctgccccggacaggaacccgctttgttttcaactgataatgatgactttaccgtgaggaacggggaaactgtgcaggagcggagatcactaaaggagcgcaacccgctcaaaatctttccttccaagcggatcctgagaaggcataaaagggattgggtggttgccccaatatccgtgcccgagaatggtaagggacccttccctcagcggttgaaccagcttaagtccaacaaggacagggacactaaaattttttattctatcacgggtcctggtgccgatagccctcccgagggagttttcgcagtggaaaaggagactgggtggctattgctgaataaacctcttgacagggaggaaatcgcaaaatatgagttgtttggtcatgccgtaagtgagaacggggcatctgtggaagaccccatgaatatcagcatcattgttactgaccaaaatgaccataagccaaagttcacgcaggatacattccgagggtccgtccttgagggagtgctgcccggaacttctgtgatgcaagtcacagcaactgacgaggacgacgcaatctacacctacaacggtgttgtggcctactctattcacagtcaagaacctaaggacccgcacgatctgatgtttactattcatcgctccacaggaacgatctccgtcatcagttcagggctagaccgcgagaaagtgcctgaatacacgctgactatccaggccaccgatatggacggcgacggctcaacaacgacagctgtggctgttgtggagatcctggatgcgaacgacaacgccccaatgttcgacccgcagaagtacgaagctcacgttcccgagaacgcggtgggccacgaggtgcagaggctcactgtgacagacctggacgccccaaacagccctgcatggagggccacctatctgatcatgggaggggacgacggcgaccacttcaccatcactactcaccctgaaagtaatcagggcattttgactacaaggaagggcctggacttcgaagccaagaatcagcacaccctctacgtggaggtcaccaatgaagcccccttcgtgctgaaactccctacatccacagcaactatcgtagtgcatgttgaggacgtcaatgaggcacccgtgtttgtcccacctagtaaagtggtggaagtgcaggagggaattcccactggagagccagtgtgtgtgtacaccgcagaagatccggataaggagaaccagaaaatcagttaccgcatcttacgcgaccctgccggctggcttgccatggatccagactcgggccaggtcactgccgtggggacgcttgatagggaagatgaacagttcgtgcgaaacaacatctatgaggttatggtcctcgctatggacaacggctctccaccaacaacggggacagggacactgctgctgaccctgatcgacgtgaatgaccatggtccagtgcccgagcccagacagatcactatctgcaaccagagtcccgtacggcaagttctcaatattacagacaaagacttaagtccccacacctcgccctttcaggctcagctgactgacgatagcgatatatactggacagctgaagtcaatgaggaaggcgatacggtggtgcttagcttgaaaaagtttctgaagcaggacacttacgacgtacatttgagcctgtccgatcacgggaataaagagcagttaactgtgattagagcaacagtgtgcgactgccacgggcacgtagagacatgccctggcccttggaaaggaggttttatactgccagttctgggcgcagttttggctctcctcttccttctgctagtgttgttgctactagttaggaagaagagaaaaattaaggaaccccttctcctgccagaagacgacaccagggataatgtcttctactatggggaagagggaggcggagaggaagaccaggattacgacattacccagttacatcgcggactagaggctagacccgaagtggtgctgcggaacgatgtcgcccccacgattattcccaccccaatgtaccgtccgaggcctgctaaccctgatgagatcgggaatttcatcatcgagaacttgaaagccgctaatacagacccgaccgcaccgccgtacgacacattgctggtctttgactatgaaggttctggctcagatgctgcctcgctgtccagtttaacctctagcgcctcagaccaagatcaggattatgattacctaaacgaatggggaagccgatttaagaaactcgccgatatgtacggaggcggggaggacgactag

SEQ ID NO: 181061 - DNA, 2355 bp, synthetic construct
  misc_feature 1..2355: note = Description of Artificial Sequence: Synthetic coding sequence
  source 1..2355: mol_type = other DNA
atgggcctgccccggggccccctggccagcctgctgctgctgcaggtatgttggcttcagtgtgccgcctcggagccgtgtcgggccgtattcagggaggcagaggtgacactagaggcaggcggagccgagcaagaacccgggcaggcactgggtaaggtcttcatgggatgccctgggcaagagccagccttattcagcaccgataacgatgatttcaccgtgcgcaacggcgaaacagtgcaggaaagacgctcgttaaaggagcgaaatcctctgaaaatttttcctagcaaaaggattctccggcgccacaagcgagactgggttgtagctccaatctcagtcccagagaatggaaaaggccccttcccccaaagactgaaccaattgaaaagtaataaagacagagacacgaaaattttctacagcatcaccgggcctggcgccgactctcctcccgagggagtctttgccgtggagaaggaaacagggtggctgcttctgaacaagccactggatagagaggaaattgcaaaatacgaactttttggccacgctgtcagcgaaaacggggcctcagtggaagatccaatgaatatctcaatcatcgtgaccgaccagaacgaccacaagccaaaatttactcaagatacatttagagggtctgtcctcgaaggagtgctacctggcactagcgtgatgcaggtgacggccacagacgaggacgacgccatctatacatataatggcgtcgtcgcttacagcatccattctcaagagcccaaagatcctcatgacctcatgttcaccatccaccggtcgactggaactatttcggtgattagtagtggtctagaccgggaaaaagtgccggagtacaccctgactatccaggcaaccgatatggatggggacggctcgactacaacagctgtggcagtcgttgaaatcctggacgcaaacgacaacgccccgatgttcgacccccagaagtatgaggcccacgttcccgaaaacgccgtaggtcatgaagttcaaagattaactgtgacagaccttgacgcgcctaattctcccgcttggcgggcgacctaccttattatgggtggcgatgatggtgaccacttcacaatcacgacccaccctgagagcaatcagggcattctgactacacgcaagggtctggatttcgaggcaaagaaccagcatactctgtatgttgaggtgaccaacgaggccccatttgtattgaagctccctacttccactgcaaccatcgtggtgcacgtggaagacgtcaatgaggcacctgttttcgtgccaccttcaaaagtggtcgaggtacaggagggcattccgacaggagagcctgtctgcgtgtacaccgctgaagatccagacaaagagaaccagaaaatatcctataggatcctgagggatcccgcgggctggctggcaatggaccctgactcagggcaggtgactgccgtggggacattggaccgcgaagacgagcagttcgtcaggaacaatatctacgaagtgatggtgctggccatggataatggttctccacccactaccgggacagggaccctgctcctcacactgatcgacgtgaatgaccatggacctgttcctgagccaagacaaataacaatatgcaaccaaagccctgtccggcaggtgctcaatataaccgacaaagacctttcacctcacacctctccttttcaggctcaactaacagatgattcggacatctactggaccgctgaagtgaatgaagaaggagacacagtggttctgagccttaagaagtttctgaagcaggacacctacgatgttcaccttagcctgtcagaccatggtaacaaggagcagctgacagtcattcgtgctaccgtctgcgactgccacggccacgtcgagacgtgtccggggccctggaaaggcgggtttatcctgcctgttctcggagcagtgttggcacttctttttctgctgctggtcctattgctgctcgttagaaagaagcgcaagatcaaagaaccgctcctcctacctgaggatgacacaagagacaatgtgttttactacggcgaggaaggtggaggtgaggaggaccaagattacgacatcacccaactgcatcggggacttgaggcccgccccgaagttgttctgcgcaatgacgttgcccccaccatcatcccaacccccatgtacaggcccagaccggcgaacccagacgagattggcaacttcatcatagaaggccgcggcgaacgcggatcccagcgagggaacggcggtttacaactggctcgaggccgcacgcggcgcagttag

SEQ ID NO: 181062 - DNA, 2325 bp, synthetic construct
  misc_feature 1..2325: note = Description of Artificial Sequence: Synthetic coding sequence
  source 1..2325: mol_type = other DNA
atgggctgccccggccaggagcccgccctgttcagcaccgacaacgatgactttacagttcggaatggagagacagtccaggaacggagatccctgaaagagcgaaatcctctgaaaatttttccctctaaacggatcctgcgtaggcacaagagggattgggtggtggcccctatctccgtgcccgagaacggcaaaggcccatttcctcagaggttaaaccagctgaaaagtaacaaagaccgcgatacaaagatcttctactcgattaccggcccaggtgccgatagccctccagaaggcgtgttcgcagtggaaaaagagaccggctggctcctgttgaacaaacccctggatagggaagagatcgctaagtacgaactctttggtcacgccgtttctgagaacggtgctagtgtcgaggatcccatgaatatctccattattgtgaccgatcagaacgaccacaagcccaagttcactcaggatacatttcgagggtcggtactggagggagtgctgcccggaacatcagtgatgcaggtcactgccacggacgaggatgacgccatctacacttacaacggagtcgtggcgtactccattcatagtcaggaacctaaggatccccacgatctcatgttcaccattcatcgatcaacaggaacaataagcgtcattagtagtgggctggacagggaaaaagtacctgagtacacattaaccatacaagcgactgatatggacggggacggcagtacaaccaccgcggtggcagtggtggagatactcgatgccaacgataatgcccccatgttcgaccctcagaaatatgaagcccatgtgcccgaaaacgctgtggggcatgaagtgcaacgtctcactgtcaccgatctggatgcccccaattcccctgcatggagagcaacatacctcattatgggcggagatgacggcgatcacttcaccataactacacaccccgagtcaaaccaaggtatcctcacaactagaaaggggctggatttcgaagccaagaatcagcatacgctttatgtggaggtgacgaacgaagctccttttgtgctaaagctgcccacgagcactgccactatcgtggtacacgttgaggacgtgaatgaagcccccgttttcgtccctccttctaaggtggtggaagtgcaggagggcattcccactggggaacctgtctgtgtctatactgccgaggatccagataaggaaaatcagaagatatcatataggattctgcgagaccccgctggctggctggctatggaccccgatagcggtcaggtgacagcggtgggaactctggacagggaagatgaacagttcgtgagaaataatatttacgaagtcatggtgctcgccatggataacggaagccctccaaccactggaactggcactctgttacttaccctgattgacgttaatgatcatggcccagtccccgagccccgccaaatcactatctgtaatcaaagcccagtgagacaggttctcaatatcaccgacaaagacttgtcgccacacacgagtccattccaagctcaactgaccgatgactctgacatctattggacagccgaagtcaacgaggagggggacacggtcgtgctgtcgctgaagaagtttctcaagcaggacacatacgacgttcacttgtcgctctccgaccacggcaataaggagcagctcactgtgatcagagctaccgtgtgtgattgccatggtcatgtcgagacttgtcccggaccatggaaaggcggatttattctgcctgttctcggtgctgtgcttgctctgctctttctcctgcttgtccttctcctactggtgcggaagaaacgaaagatcaaggagccactgctcctgcccgaggacgacactcgcgacaacgtgttctattatggcgaggagggcggtggagaggaggaccaggactatgatattacccagctgcacagggggttagaggctagacccgaagtggtgttgcggaatgacgtggctcccacaattatccccacccctatgtatcgccccagacctgctaacccagatgagatcggaaacttcataatcgagaacctcaaagctgcgaatactgaccctaccgcgccaccttacgatactctgctggtatttgattatgaaggcagcgggagtgacgctgctagcctctcatctcttacctcttcggctagcgaccaagaccaggactatgactaccttaacgaatggggtagcagattcaaaaaactggccgatatgtatggtgggggcgaggacgattag

SEQ ID NO: 181063 - DNA, 2751 bp, synthetic construct
  misc_feature 1..2751: note = Description of Artificial Sequence: Synthetic coding sequence
  source 1..2751: mol_type = other DNA
atgaccgccggcgccggcgtgctgctgctgctgctgagcctgagcggtgccctgcgtgcgcataatgaggacctgacgacccgagagacctgcaaggcggggttctccgaagatgactacactgctctgatctcccaaaacattctggaaggagaaaagctgcttcaggtgaaattttcgagttgcgttggaactaaggggacccaatacgaaaccaactctatggactttaaagtaggtgccgatgggacagtgttcgcaactagagagttgcaggtcccatccgagcaggttgcatttactgtaaccgcatgggattcacagacggccgaaaagtgggatgccgtggtgagactgcttgttgctcaaacaagctcgccacacagtggccacaagcctcagaagggcaaaaaggtggttgccctggatcccagtccacctcctaaggatacactgctgccctggcctcagcatcagaacgctaacgggctgcgacggcgtaagcgtgactgggtgataccaccaataaatgtgcctgaaaactcccgcgggccttttcctcagcaactggtccggatccggagtgacaaagataatgacattccaatccgctactccatcacaggcgttggagccgatcagccacccatggaagtgttcagtatcgatagtatgagcggcagaatgtacgtaaccagaccaatggaccgagaggaacacgcatcctatcatctgcgagcacatgctgtggatatgaacggtaataaagttgaaaaccccatagatctgtacatctacgttatcgacatgaatgataaccggcccgaattcattaaccaagtttacaacggtagcgtggacgaggggagcaagcctggcacgtacgtcatgaccgtcactgctaacgacgcggacgattctacaactgcaaacggcatggtgcgctatcgtattgttacccagaccccacagtctccaagccagaatatgtttacaatcaacagcgagacaggcgacatcgtgaccgtagcagccggtttagatcgggaaaaggtgcagcagtacactgtcatcgtccaggccacagatatggagggaaacctgaattatggccttagcaatacagctacggccataattacagtcacagacgtgaatgataacccacctgagtttacagcttcaacctttgccggcgaagtgccagagaaccgggttgagacagtagtggcgaacttaactgtgatggacagagatcagcctcacagccccaactggaatgcagtctaccgtattatctccggagatccctccgggcacttcagcgtgagaactgaccctgtgacgaacgaaggtatggtaactgtggtaaaggccgtggactacgagctcaacagagcgttcatgctgacagtcatggtttctaatcaggcccctctggcctcggggatccagatgagctttcagtcaaccgccggagtaactatctctatcatggatatcaatgaggccccttactttccctcaaatcataaactcataaggctggaagagggcgtccctcccggaacagtccttacgacatttagcgctgtggacccagaccgctttatgcaacaggcagtaagatatagtaaattgtccgacccagcatcttggctccatatcaacgctactaacggtcagatcaccacggctgctgtcctggacagagaatctctttacactaaaaataacgtctatgaagccaccttcctggctgccgataacggcattcctcccgcctctggaacagggacactacagatctatctcatcgatatcaatgataacgcgccagagctcttgcctaaggaggcacagatttgcgagaagcctaacttaaatgctatcaacattacagcagccgatgcagacgttgacccaaatattggaccctacgtatttgagctgcccttcgtaccagcggctgttcgaaagaactggaccattactaggctcaacggagactacgcccagctgagtttgagaatattatatcttgaagccgggatgtatgatgtacccataattgtgacagacagcgggaatccgccattgtctaataccagcattatcaaggtgaaggtgtgtccttgtgatgacaacggtgattgcaccactatcggggcggtggcagccgcggggctcggaacaggggctatcgtagctattctgatatgcattctgattttactcacaatggtcttactgttcgtgatgtggatgaagcgccgtgagaaggagcggcacacaaaacagctgctcatcgatccggaggacgacgtgcgcgacaatatcctgaagtacgatgaggaaggaggcggagaagaggatcaggactatgacctgtcccaactgcaacaacccgaagccatgggccatgtcccatctaaggctcccggcgtgaggcgggtggacgagcggccagttggagctgagcctcaatatcccatacggcccatggtaccacacccaggcgacatcggagattttattaatgagggccttcgggcagccgataatgatccaacagcacccccgtacgattccctgcttgtgtttgactatgaagggagcggttccactgctgggagcgtgagttcattaaatagttcctcttccggcgaccaggattatgactatctgaacgactgggggccccgattcaagaaactggcagacatgtatggaggaggcgaggaggattag

SEQ ID NO: 181064 - DNA, 2475 bp, synthetic construct
  misc_feature 1..2475: note = Description of Artificial Sequence: Synthetic coding sequence
  source 1..2475: mol_type = other DNA
atgcccaagagcaccggcatgctgcacggcggccgggagaacgccggcgtcaagttctcatcctgcgtgggtaccaaaggcacccaatatgaaacatcctctcctcactccgggcataaaccccaaaagggcaaaaaggttgtcgctcttgatcccagtcctccgcccaaggacacgttgctcccctggccacagcaccagaatgccaatggccttcggcgccggaagagggactgggtgattccccctataaatgtacccgagaattcaaggggccccttcccacagcagctggttcgtattcgctcagacaaggataacgatatccctattcgctacagcattactggggtcggcgctgatcagccgcctatggaagttttttccatcgattcaatgagcggtcggatgtatgtaacacggcccatggatcgggaggaacacgcctcctatcacctgcgagcccacgccgtggatatgaatggcaacaaggtcgagaatcctattgatttgtacatctacgtgatcgacatgaacgacaacagaccggagtttattaaccaggtatataatgggagcgtcgatgagggatccaaaccaggcacttatgttatgaccgtgacagcaaatgacgctgacgacagcaccacagctaacgggatggttcggtacagaatagtgacccagacgccacagtcgccaagccaaaacatgttcactattaattccgaaacaggagacatagtgacagttgctgcaggcctggacagggaaaaagttcaacagtacacagtgattgtgcaggccactgatatggagggaaatttaaactacggtctgtccaatacagctaccgcaatcatcactgtgactgacgtaaatgacaatcctcctgaatttactgctagtacattcgcgggagaggtgcccgagaaccgcgtcgagaccgtcgtggccaatctaactgttatggacagagatcaaccgcactctccaaactggaacgcagtgtaccgtatcatcagtggtgacccaagtggtcacttttccgtgcgtaccgacccggtgacaaatgagggcatggtgactgttgtgaaagcagtagattacgaactgaatcgcgccttcatgctgaccgtcatggtgtctaatcaggcacctcttgctagcggaatccagatgtctttccagagcactgccggagttactatttcaattatggatatcaatgaggcaccttatttcccctccaatcataagctgattcggcttgaagagggagtgcccccgggcacagtactaaccacattttcagccgtcgatccagatcggtttatgcagcaggctgtgcgctactccaagctctctgacccggcatcctggctgcacataaatgcaacgaacgggcaaatcaccaccgccgctgtcctggatagggaatcattatataccaagaataacgtctatgaagctacgttcttggccgccgataatggtattccccccgctagtggcacaggcaccctacaaatctacctgatcgacatcaatgacaatgcccctgagttgctgccgaaagaagcccagatatgcgaaaaaccaaatctcaacgcaataaatatcactgccgctgacgctgatgtagaccccaatattggcccctatgtgttcgaactgccctttgttcccgcagccgtgcggaaaaactggactattacgcgcttgaacggcgactatgcccaactgtccctcagaatcttgtatcttgaggcgggaatgtatgatgtgccaatcatagtgaccgactccggtaatccacctctgagtaatacttccatcatcaaagtgaaggtgtgcccgtgtgatgataatggagactgtactaccataggcgcagtggccgccgcagggctcgggactggtgccatcgtggccattttgatctgcattttgatcttactgacaatggtgctgctgttcgtaatgtggatgaagaggcgggagaaagagcggcacactaaacagctcctgatcgacccggaggacgacgtgcgggacaacattcttaaatatgatgaggaaggcggaggggaggaggatcaggactacgacctgagccagcttcaacagcccgaggcgatgggccacgtgccaagcaaggcccctggggtgcgcagagtagacgaaagaccagtgggcgctgagccgcaataccctatcagaccaatggttcctcaccctggcgatatcggagacttcattaatgagggcttgcgagcagccgataatgaccctacagctccaccttatgatagccttctggtgttcgactatgaggggtctggcagcactgccggaagcgttagttctctgaacagcagcagctcaggcgatcaggattacgattatctgaatgattggggacctaggttcaaaaaactagctgatatgtacggtggtggggaggaagactag

SEQ ID NO: 181065 - DNA, 2529 bp, synthetic construct
  misc_feature 1..2529: note = Description of Artificial Sequence: Synthetic coding sequence
  source 1..2529: mol_type = other DNA
atggacttcaaggtgggcgccgacggcaccgtgttcgccacccgggagctgcaggtgccttcggagcaggttgcctttactgtcaccgcctgggatagtcagacggccgagaagtgggacgcagtagtcagattactggtagcccagaccagctccccccatagcgggcataaaccacagaaaggaaaaaaggtggtcgcccttgacccctccccccctccaaaagatacacttctcccctggccacagcatcagaacgctaacggtcttagacggcgtaagagggattgggtgattcctcctattaatgtgccagaaaatagcagaggtccctttccacaacagttggtgcggattcggtccgacaaggacaacgatattcctatacgatatagcattaccggagtgggggccgatcagccgccgatggaagtgttttccatagatagcatgtctgggcgtatgtacgtcacgcgccccatggaccgtgaagaacatgcctcatatcacctgcgggctcatgccgttgacatgaacggcaacaaggtggagaatcctatcgatctttacatctacgtaatcgatatgaacgacaatagacctgaattcataaatcaggtttataacggttcagtcgatgaaggttctaagcctggaacttacgtaatgacagtcactgccaacgacgccgacgacagcaccacagcaaacggcatggtcagataccggatcgtcacacaaactccacagagccctagtcagaacatgttcacaatcaactcagaaaccggagacatcgtcactgtagccgccgggttggatcgagaaaaagtccagcagtatacagtgattgtgcaggctaccgatatggaagggaacttgaactacgggctatctaacacggctacagccattataaccgttactgacgttaatgacaacccgccagagttcacagcatccaccttcgcaggcgaagtcccagaaaatagggtcgagaccgtggtagccaacttaaccgtcatggaccgggatcagcctcactctccaaattggaacgccgtctatcgaattatcagcggagacccatctggacacttcagcgtgaggaccgatcccgttaccaatgaggggatggtcacggtggtgaaagccgtggactatgagctcaaccgtgcgtttatgctcacagttatggtttctaaccaggcccccctggcttcggggatccagatgtcatttcagagcactgctggcgtgacaatttccattatggacataaacgaagctccctacttcccctccaaccacaagctcataaggctggaagagggtgtgccacccggcacagtacttacaactttctctgccgtggatcctgaccgcttcatgcagcaggcagtgaggtactctaagctttctgatccagcctcttggctccacatcaatgctacaaatggccagattactaccgctgctgtattggatcgggaaagcctgtacaccaaaaacaacgtgtacgaagccacctttctggcagccgacaatgggatccctcctgccagcgggacgggtacccttcagatctacttgatcgacattaacgataacgccccagagctgctgcctaaggaagcgcagatttgcgaaaagcccaacctcaacgccatcaatattacggctgccgacgctgatgtggaccctaacataggtccatatgtttttgagttgcccttcgtgccagctgctgttcgtaaaaattggaccattacccgtcttaacggcgactatgctcagctgtcgcttagaatcctgtacctggaagcagggatgtacgacgtaccaataatcgtaaccgactccggcaaccctcccctgtcaaatacatccattattaaggtcaaggtttgtccctgcgatgacaatggagactgcaccacaatcggggctgtggctgctgccggtctcgggaccggagcgatagtggccattttgatatgtatcctgatcttgcttactatggttctcctattcgttatgtggatgaagcggcgcgaaaaagagcggcatactaagcagctgctgatcgaccctgaggatgatgtgcgtgacaatattcttaaatacgacgaggagggtggcggggaggaagatcaagactacgacctctcacagttgcagcaaccagaggctatgggtcatgttccaagcaaggctcccggcgtgagacgggtggacgagcgccccgtcggggccgaaccccagtaccctattcgacccatggtaccccatcctggggatataggcgactttatcaacgaagggctcagagcagcggacaacgatccaactgcgcctccgtacgattcccttctggtattcgactacgagggttcggggagtactgccgggagtgtgtcttcgctgaacagttcctcctctggcgatcaggactacgactatctgaacgactggggacccagatttaaaaagctcgccgacatgtatgggggtggagaggaggactag

SEQ ID NO: 181066 - DNA, 2358 bp, synthetic construct
  misc_feature 1..2358: note = Description of Artificial Sequence: Synthetic coding sequence
  source 1..2358: mol_type = other DNA
atgaagctgggcaaggtggagttctgccacttcctgcagctgatcgcactttttttgtgcttctccggaatgagccaagccgaattaagtcgctccaggtccaaaccttacttccaatctggccgctcacgtacaaaaagaagttgggtgtggaatcagtttttcgtgcttgaggagtacatggggagcgaccctctttacgtgggaaagctccactctgacgtagataagggggatggcagcatcaagtatatcctgtctggggagggtgctagctcaatttttataattgacgaaaacaccggcgatatccacgcaacaaagcgattggatcgcgaagaacaagcctattacacgctgcgggctcaggccctggatcggctgacgaacaagcccgtggagccagagtccgagtttgttatcaagattcaggacatcaacgacaacgaaccaaagttcttggacgggccctatactgccggcgtgccggagatgtctcccgtgggaaccagtgtggtccaagtaacggctactgacgcagacgatcccacctacggcaacagcgcacgggtcgtgtactctatcctgcaaggccagccgtacttttccgtggaacccaaaactggggtgattaagaccgcgttgcccaacatggatcgcgaggccaaggatcaatacctcctcgtgatacaagccaaggatatggtaggtcagaatggtggcttatcaggcactaccagcgtcaccgttactctcaccgacgtgaacgacaacccaccccgatttccacgacgctcctaccagtacaacgtcccagaatctcttcccgtagcaagtgtggtagcccgcattaaagccgctgatgcagatatcggcgccaacgccgagatggagtacaaaatagttgacggggatgggttgggcatcttcaaaatctctgttgataaggagactcaagagggaattataaccatccaaaaggagctagactttgaagccaagacatcgtacacactccggatagaggcagctaataaggatgccgacccccggtttttatccctgggacctttcagtgacactactacggtgaaaattatcgtggaagacgtagacgaaccacccgttttttcctctcctctgtaccctatggaagttagtgaggccactcaggtgggcaacatcatcggaaccgtggcagctcacgatccagactcttcaaactctcccgtgcgctattctatcgaccgaaacactgacttggaacggtatttcaacatagacgctaacagtggggtgatcactaccgcaaagtctctggacagggaaactaatgcaatccataatatcaccgtgcttgccatggagtcccagaatccttcccaggtgggacgagggtatgtcgccatcactatcctagatattaatgacaacgcccccgaatttgccatggactacgagacgactgtgtgcgagaacgcccagccaggtcaggtgattcagaagattagcgccgtggataaggacgaacctagcaatggtcaccagttttatttctcccttactactgacgctactaataatcataacttcagcctgaaagacaataaggacaacacggcgtccatcctcactcgtcggaacggtttccgacgccaggagcaatctgtatactatctccccatcttcatagttgactctggcagtccaagtctcagcagcacaaacaccctgactattcgggtgtgtgattgcgatgccgacggagtggctcagacatgtaatgccgaggcttatgtactgcctgcaggattgtccacgggcgccctgattgccattttggcatgcgtgctgactctactcgtacttatcctactgattgtgacaatgcggaggcgtaagaaagagcccctgatttttgatgaggagagggatatcagagagaacattgtaaggtacgacgatgaaggcggaggagaagaggacaccgaggcctttgatatggcagccttgcgcaacttaaatgtaataagagacactaaaacccgccgagacgttacacccgagattcaattcctgtctcgccccgctttcaagtcaattcctgacaatgtgatttttcgagaattcatttgggaacgccttaaggaagccgacgttgatcctggcgccccgccatacgacagcctgcagacttacgcttttgaagggaatggtagcgtcgccgagagtctgtcatcactcgattccattagttccaactcagatcaaaactatgattatttgtcagattggggcccacgatttaaaagactcgcagatatgtacggtacaggacaagaaagtttgtactcttag

SEQ ID NO: 181067 - DNA, 2358 bp, synthetic construct
  misc_feature 1..2358: note = Description of Artificial Sequence: Synthetic coding sequence
  source 1..2358: mol_type = other DNA
atgaagctgggcaaggtggagttctgccacttcctgcagctgatcgccctatttttgtgttttagcggtatgagccaggcagagctgtccagatctaggagcaaaccttacttccagtctggcagaagtcggactaaaagatcttgggtctggaatcagtttttcgtgttggaggaatatatgggcagcgatcctctgtatgtggggaaacttcacagcgacgtggataagggcgacggttccatcaagtacatcttgtccggagaaggtgcttcttctatctttattatcgacgagaatacaggcgacattcacgccacgaaaagacttgaccgcgaggaacaagcgtattacactctccgcgcccaggcactggatcgtctgacaaacaagccagttgagcctgagtcggagttcgtaatcaagatccaggatataaacgataacgaaccaaagtttctggacgggccctatactgcaggtgtccccgagatgagtccagtgggaacatctgtggtacaggtaacagccactgacgcggacgaccccacatacggaaattcggccagggtggtttactcaatcctccaggggcagccctactttagtgtggagcctaagactggtgtcataaaaacagccctcccaaacatggaccgcgaggcaaaggaccaatatttgcttgtaattcaagcaaaagatatggtgggtcagaacgggggcctgtccggtaccacctccgtgacagtcaccctgacagatgtgaacgataatccgcccagattccctcggaggtcctaccagtataatgtgccagagagcctcccagtggcctccgtcgtggcacggatcaaggccgctgatgcggacattggggctaatgccgaaatggagtacaagatagtggatggggatggactaggcatctttaagatcagcgtagataaggagacccaagaagggattattaccatccaaaaggagttagatttcgaagctaagacgagttacacccttaggatagaggccgctaataaggacgcagacccgaggttcctgtctcttgggcccttctctgacacaactacagtgaagatcatcgtggaggacgtcgatgagccacccgttttttcatcaccattataccccatggaagtgtcagaggcaacccaggtgggtaacatcatcggcacggtggccgcacacgatccagacagttccaactctcccgttaggtattccatagacagaaataccgacctcgaaaggtattttaatatcgacgctaacagtggtgttatcaccaccgcgaagtctctggatcgagagacaaatgccatacacaatatcacagtactggccatggagtctcagaacccaagccaggtgggccgggggtacgtggctataaccatcctggatattaatgacaacgcacctgagtttgccatggattacgaaacgacagtgtgcgagaacgcacagcctggtcaggtgattcaaaagataagtgccgtggataaggacgagccgtccaacggccatcaattttatttttcccttacaacggatgcgactaacaatcacaatttcagtctcaaagataacaaggacaacactgcatcaatattaacacgtagaaatggctttcggcggcaagagcagagcgtgtattacttgcccatcttcatagtcgactctggaagccccagcctcagctccaccaacaccctgaccataagggtatgtgactgtgacgcggacggtgtagcccaaacctgcaacgccgaggcgtatgtcctgccagctgggttgagtacaggggccttaattgccatcttggcctgtgtcctcacgctgctggtcctcatcctcttaatcgtgactatgcgccgacgaaagaaggaacctctgatctttgatgaggaaagggacatcagagagaacattgtgaggtacgatgacgaaggcggtggtgaagaggatacagaagcgttcgacatggccgcccttcggaatctgaacgtgattcgagataccaagacccgccgggacgtaacccccgagatacagttcctctctagaccagcgtttaaaagtatcccagataacgtcatcttccgcgagtttatctgggaacgcctgaaagaggcagacgttgatccgggagctccaccctacgattctttacagacctacgctttcgaagggaacgggtcggtcgccgagtcgctgagctccttggacagtatatcaagcaattccgaccagaattatgattatctgtccgattggggtcctcgctttaaacgcctggcagacatgtatggtacggggcaagagtcgctgtactcctag

SEQ ID NO: 181068 - DNA, 2358 bp, synthetic construct
  misc_feature 1..2358: note = Description of Artificial Sequence: Synthetic coding sequence
  source 1..2358: mol_type = other DNA
atgaagctgggcaaggtggagttctgccacttcctgcagctgatcgcccttttcctctgcttttctggtatgtcgcaggccgagttgtcacggtccaggtccaaaccatactttcaaagcggtcggtccagaaccaagcggagttgggtgtggaaccagttttttgtcctggaagagtacatgggaagcgatccgctgtatgtgggtaagctacatagtgacgttgacaagggtgatggatccatcaagtacatcctgtcaggggagggcgcaagtagcatcttcataattgacgaaaacaccggggacatccacgctactaaaaggctcgatagagaggagcaggcctattacaccttgcgcgcccaagcactagatagattgacgaacaaacccgtcgaacccgaatcagagttcgtgattaaaatccaggacatcaacgataacgagcccaagtttcttgacggcccatacaccgcaggtgtccctgaaatgagccccgtgggcacatcagtggtgcaggtcaccgccacagacgcggatgatcccacgtacggtaacagtgctcgcgtggtttactcgatccttcagggccagccatacttctccgtggaacccaagacaggcgtgatcaagacagctcttcctaatatggacagagaagccaaggatcagtatctcctggtgattcaggcaaaagatatggttggccagaatgggggattatccggcactacatctgtgacagtgacgctgacagacgttaacgacaaccctccgaggttccctcgccgtagctatcagtataatgtgcctgagtctctccctgtggcttccgtcgtcgctcgaataaaggcagccgacgcagatatcggggctaacgccgaaatggagtacaagatcgttgacggcgatggactaggcatattcaagatttccgttgacaaggagactcaggagggcattattaccatccaaaaagagctggatttcgaggcgaagacttcctacacccttcgaattgaggcagctaataaagacgccgacccccgctttcttagcctcggccccttcagcgatacaactactgttaagataatagtggaggacgtggatgaaccgccagtcttcagctcaccgctatacccaatggaggtgagtgaagcaactcaagtggggaatatcataggcacagtggcagcacatgatccagactcctccaacagccccgtaagatactccattgatcggaatacagatctagagaggtactttaacatcgatgccaatagtggagtgatcacgacggctaagtctttggacagagagaccaatgccatccacaatattaccgtgttagccatggaatcccagaacccctcccaggttgggagaggatacgtagctattactattctggatattaatgataacgcccctgagtttgctatggattatgaaactacagtctgcgaaaacgctcaacccggtcaggttatccagaagatttcagccgtggataaggacgagccctccaatgggcatcagttctatttttctcttactaccgatgccacgaacaaccacaacttctccttgaaagacaacaaagacaacacagcttctatcctcacgcggagaaacggctttcgcagacaggaacaatccgtgtattatttacccattttcatagtcgactctgggtccccctcactgtcgagtacgaatacacttaccatacgggtgtgtgattgcgacgccgacggagtagcccaaacctgcaacgccgaggcgtatgtgttaccagctggcctaagcacaggagcactcatcgctattttggcctgtgtcctaacgctgctcgtcctgattttactgatagtgacaatgcgacgccggaagaaggaacctctcatctttgacgaggaacgtgacattcgcgagaatattgtgcggtacgatgacgaaggggggggggaggaggatacggaggccttcgatatggcggcacttcgcaatttgaacgtgatacgagacacaaaaacgcgcagggacgtcactcctgagatccagttcctgtcaaggcccgcatttaaaagtatccccgataatgtcatcttcagagagtttatttgggaacgactcaaagaggccgacgtggaccccggcgcaccaccatatgactcgctgcagacctacgctttcgaaggcaacggaagtgtggcagagtctctgagtagcctggatagtattagcagtaactctgaccaaaattacgactatctctcggattggggcccaagattcaagaggttagccgatatgtacgggacaggccaggaatctttgtatagctag

SEQ ID NO: 181069 - DNA, 1893 bp, synthetic construct
  misc_feature 1..1893: note = Description of Artificial Sequence: Synthetic coding sequence
  source 1..1893: mol_type = other DNA
atgaagctgggcaaggtggagttctgccacttcctgcagctgatcgccctatttctgtgcttttcaggtatgtctcaggcggagctgagccgctcgcgaagtaagccatattttcagtctggccgatccaggactaaaagatcatgggtctggaaccagttctttgtccttgaggagtacatgggatccgatccgctatacgtggggaagctccatagcgacgttgataaaggcgacgggtcaatcaagtacatcttgtctggtgagggcgcttcttcaatcttcataatcgatgagaacacaggagacatacatgccacaaagaggctcgatcgggaggagcaggcttattatactctgagggctcaggctctagaccgactgacaaataagccagttgagcctgagagcgaatttgtcatcaagattcaggatatcaacgataatgaacctaagttcttggatggcccatatactgccggagttcctgagatgtctcccgtgggaactagtgtggtgcaggtgaccgctacggatgccgacgaccctacatatggaaatagcgccagggtagtctactctatcctccaggggcagccctacttcagtgtcgaaccaaaaacaggcgtaattaaaaccgctctgcccaacatggatagggaagcaaaagatcagtatctgctggttattcaagccaaagacatggttggccagaatggcggcctgagcggcaccacatcagtgacggtaactctaacggatgtgaacgataatcccccccgctttccacggaggtcctaccagtataatgtgccggagtccctccctgtggcatccgtggtcgcacggataaaagcggcggatgctgatattggcgctaacgccgagatggagtataagatcgtagatggcgacggcctgggtatctttaaaatctccgttgataaagagacacaggaaggcatcatcacaattcagaaagagcttgactttgaagccaagacctcctacactctccggattgaagctgctaataaagacgccgacccaaggttcctcagccttgggcccttcagcgatacaacaactgtgaagatcatcgttgaagatgttgatgagcctcccgtgttttcaagcccgctgtatcctatggaagtgtctgaagctacccaggtgggcaacataatcgggacggtagctgcacacgacccagatagctcaaatagtcctgtgaggtattcaatagatcgtaacacagaccttgaaagatattttaacattgacgcgaatagcggtgtgatcacaacggccaaatctttagatagggaaaccaatgccatccataacatcaccgtactggccatggagtcccagaacccatctcaggtggggcgaggctatgttgccattaccatactcgatattaacgacaacgcgccagagtttgcaatggattatgagacaaccgtctgcgaaaatgcccagccaggacaagtgatccaaaaaattagcgcagtggacaaagatgaaccatctaatgggcaccagttctattttagcttgaccaccgatgcgaccaacaaccataattttagcctaaaggacaacaaagacaatacggcaagcattctcacccggcggaacgggttccggcgccaggagcagtccgtgtactacctgccgatcttcatcgttgacagcggctctccatctttgtcctccactaatacacttacgatcagggtgtgtgactgtgacgcagacggcgttgcccagacctgtaacgctgaggcctatgtgcttccagctggcctgagcacaggagctttgattgccattcttgcttgcgttctcactcttctcgggcgatactgcttccagggcctgttatag

SEQ ID NO: 181070 - DNA, 2400 bp, synthetic construct
  misc_feature 1..2400: note = Description of Artificial Sequence: Synthetic coding sequence
  source 1..2400: mol_type = other DNA
atgcccgagcggctggccgagatgctgctggacctgtggacccccctgatcatactgtggattaccctaccaccatgcatctacatggcacccatgaaccagtcccaggtcttgatgtcaggctcgcctctggagctgaattctctgggtgaggagcagaggattctgaatcgatctaagcgcggttgggtctggaaccaaatgtttgtacttgaggagttctctggcccagaacctatacttgtgggccgcttgcacacggatctggatcctggcagcaagaaaatcaagtacatcctgtcaggggacggagctgggacaattttccagataaacgatgtaactggcgacatacatgccatcaagcggctggatagggaggaaaaggcagaatatactcttaccgcacaggccgttgactgggaaacgtccaaacctctcgagccccctagtgagtttatcatcaaagtgcaggatattaacgacaacgccccagaatttctaaacggcccatatcacgcaacagttcctgagatgtctatcctggggacctctgtgactaacgtcacggcgactgacgcggatgatcccgtctacgggaacagcgctaagttggtgtatagtatcctggaggggcagccttatttcagcatcgagccagaaacggctatcattaagacagcattgcccaatatggatagagaggctaaggaggaatatctggtagtaatccaggctaaggacatgggtgggcactctggtggccttagcggaaccacaaccttaaccgtgacgctgacagacgtcaatgataatccccccaaatttgcacagtctctgtaccacttctccgtcccggaagacgtggtgttgggaacggctattggccgagtcaaggcaaatgatcaggatattggtgagaacgcccagagcagctacgatataatcgacggcgatgggaccgccctcttcgaaatcacgtctgacgcacaagcccaggacggcattattcgtctccgcaaacccttagattttgagacaaaaaagtcatatacattgaaggttgaggctgcaaatgtacatatagatcccagattttcaggaagggggccatttaaggatacagctaccgtcaagatagtagtggaggacgccgacgaacctccagtgttttccagccctacttatttgctggaagtgcacgagaatgcagctctcaactccgtcatcggtcaggtaaccgcaagagaccccgatatcacctccagccccatcagattctccatagacaggcacactgacctggagcggcagtttaatattaacgccgacgacgggaagataactctcgcaaccccactggacagggagctttcagtttggcacaatatcaccattatcgcaacagaaataagaaaccacagccagatatctcgcgtgccagtggcaatcaaggtcctggacgttaacgacaatgccccagaatttgcttctgaatacgaagcattcctctgtgaaaatgggaagcccgggcaggtgattcaaaccgtttcggcaatggacaaggatgatcctaagaacggccattactttctttatagcctgctccctgagatggtcaacaacccaaattttacgatcaaaaagaatgaagataacagcctgtcaatattggccaaacacaatgggtttaaccgacaaaagcaggaagtgtatcttctgccaatcattatctcagattccggaaacccccctctctcatctacttctacactcacaattcgggtgtgtgggtgtagcaacgacggcgttgtacaatcctgcaatgtcgaggcctatgtgctccccatcgggctgtccatgggcgcgctaatcgcaattctggcatgcattatcctgctcctggttattgtggtgctatttgtaaccctccggaggcacaaaaatgaacccctcatcatcaaagacgacgaggacgtgagggaaaacatcattaggtacgatgatgaaggcggcggggaggaagatacggaagctttcgatatagcgacactccaaaaccccgacgggattaatggttttttaccccggaaggatattaaacctgacctccagttcatgcccagacaagggctggcccccgtgccaaatggtgtcgatgtcgatgagtttatcaatgtccggctgcacgaagcagacaacgatccaaccgctccaccctacgactcgattcaaatctatggctacgagggacggggctcggtcgccggaagcctttcaagcctggagtccacgacatcggactcagatcagaactttgattacttaagcgattggggccctagatttaagagactaggagagttgtacagcgtgggggagagcgacaaggagacttag

SEQ ID NO: 181071 - DNA, 2400 bp, synthetic construct
  misc_feature 1..2400: note = Description of Artificial Sequence: Synthetic coding sequence
  source 1..2400: mol_type = other DNA
atgcccgagcggctggccgagatgctgctggacctgtggacccccttgattatcctttggattactttaccaccctgcatatatatggcacccatgaatcaaagccaagtgttgatgagcggaagcccactggagttgaattccttaggcgaggaacagagaattcttaacaggagtaaacgcggttgggtgtggaaccagatgttcgtgctagaagagttctcaggcccagagccgatcttggtgggccgactgcatactgatctggatccgggctctaagaagataaagtacatcttatcaggagacggcgcagggacaatatttcagattaacgacgtgacaggggatatccacgcgatcaaacgactcgatcgggaagaaaaggctgagtacacactgactgcgcaggcagtagactgggaaaccagcaagccattagagcccccgtcggaatttatcatcaaggtgcaagatattaacgacaacgcacctgagtttttgaatgggccttatcatgctactgttcctgaaatgtcgattctcggcacttccgtcacaaacgttactgcaacggatgcagatgaccctgtctacgggaacagcgcaaaactcgtgtacagcattcttgagggccagccatatttctccatagagcctgagaccgctataatcaagacagcactgcctaatatggaccgcgaggccaaggaggagtacctcgtcgtgattcaagctaaagacatggggggacattccggaggactcagcggtactactaccctgacagtgacgctaaccgatgtgaacgacaacccacctaagttcgctcagtccttataccacttttccgtgcccgaagacgttgtgcttggcaccgcaattggaagagtgaaagctaacgaccaagacattggtgaaaacgctcaatcttcttatgacatcattgacggagacggtacggctttgttcgagatcacctcagacgctcaggctcaggatggcataatcaggttgaggaaaccactggactttgagactaagaagtcatacacgctgaaagtggaggccgcaaacgtccatatcgatccaagattctctggacggggccctttcaaggacacagcgacggtgaagattgtagttgaagacgcagatgagccaccagtgttttcctcccctacatatctcttggaagttcatgagaacgctgctctgaatagtgttattgggcaagtcacagccagggaccctgacataacgagctcaccaattcgttttagtatcgaccggcacacagatttggaaaggcagttcaacattaatgcggacgatggtaagatcacactggcaaccccgttggacagagaactgagtgtgtggcacaacatcactattattgctacagagataagaaaccatagccagatctctcgtgtgccagtcgcgattaaggtccttgatgtgaacgataatgcccccgaattcgcatctgagtatgaggcattcttgtgtgaaaacggtaagccagggcaagtcatccagactgtcagcgcgatggacaaagacgaccccaaaaatggccattatttcctgtacagcctcctgcctgagatggtcaacaaccctaatttcactatcaaaaagaatgaggacaattcactgtcaattctggccaaacataacggcttcaatcgtcagaagcaggaggtgtacctgctcccaattataatctctgacagtggtaatccacccctctcctctacttctacattgaccataagggtgtgcggatgttccaacgacggtgtggtgcagtcctgtaacgtggaggcatacgtgttgcctatagggctatctatgggagctctgatagctatcctggcatgtatcatcctactcctggtgattgtggttctattcgtgacattacggcggcacaaaaatgaacccctcatcatcaaagacgatgaagatgtgcgggagaacataatccgatacgatgatgaagggggaggagaggaggacacagaagcctttgatatagccactctccagaatcccgacggcatcaacggattcttgccgcgcaaggacatcaaacctgacctccaattcatgcctcgccaagggctggccccagtgccaaatggcgtggacgtcgacgagttcatcaatgtgaggctgcatgaggctgataacgatccaacggcaccgccgtacgattcaatccagatatatggctatgaaggcaggggcagtgtcgctgggtctctgagctcgttggaatctacgacgagcgacagcgatcagaattttgattatctctcagattggggcccgcgctttaaacgcctgggggagttatatagcgtgggagagagcgataaggagacatag

SEQ ID NO: 181072 - DNA, 795 bp, synthetic construct
  misc_feature 1..795: note = Description of Artificial Sequence: Synthetic coding sequence
  source 1..795: mol_type = other DNA
atgaccaagttcagcagcttcagcctgttcttcctgatcgtgggcgcatacatgacacacgtgtgctttaatatggaaattattgggggtaaggaagtatctcctcacagtagaccattcatggctagcatccaatatggaggtcaccatgtctgcggcggggtgctgatcgatccccaatgggtccttactgcagctcactgtcaatacagatttactaagggtcagtctcctaccgtggtgctgggagcccattcccttagcaagaatgaagcctctaagcagacgctggagatcaagaaatttatacccttcagccgcgtgacatcagaccctcagagcaacgacattatgttagtaaaactccaaacggcagcaaagcttaacaagcacgtcaaaatgctgcacattagatctaagacctccctccgaagtgggactaaatgcaaggtaacaggatggggggctaccgaccctgatagcctgcgtcccagtgacacactgcgggaggtcacagttaccgtccttagccggaagctgtgcaatagtcagtcttactataatggcgacccctttattacaaaggatatggtctgtgcaggggatgctaaggggcagaaggacagctgcaagggtgacagcggcggtccactgatatgtaaaggggtcttccacgccatcgtgtctggcggacacgagtgcggagttgccacaaaacccgggatatacacattacttacgaaaaagtaccaaacatggattaagtcaaatctggtgcccccacacacaaattag

SEQ ID NO: 181073 - DNA, 246 bp, synthetic construct
  misc_feature 1..246: note = Description of Artificial Sequence: Synthetic coding sequence
  source 1..246: mol_type = other DNA
atgcggacctaccactacatccccctgttcatctggacctacatgtttcacacagtcgacaccattttgctacaggagaagcctaatagctatctgtccagcaagaaaatcgccgggctcaccaaggacgatggtaaaatgcttagacgaacgaaacgtggttggatgtggaaccagttctttctcctggaggaatacaccggcaccgatacgcagtacgtcggaaagctccataccgaccagtag

SEQ ID NO: 181074 - DNA, 399 bp, synthetic construct
  misc_feature 1..399: note = Description of Artificial Sequence: Synthetic coding sequence
  source 1..399: mol_type = other DNA
atgcggacctaccactacatccccctgttcatctggacctacatgttccacacggtagacaccattctattgcaagagaaaccaaacagctatctcagttcaaaaaagatcgcgggtctgacaaaagacgacggaaaaatgcttagacggacaaagagaggttggatgtggaatcagttctttctcctggaagagtataccggcaccgatacccagtacgtgggcaaacttcacaccgatcaggacaagggggacggaaacctgaaatacatactcactggagacggggctggctctttattcgttattgatgagaataccggagacattcacgcggccaaaaaactggaccgagaagagaagtcactgtatattctgcgtgccaaagcgatcgactag

SEQ ID NO: 181075 - DNA, 9045 bp, synthetic construct
  misc_feature 1..9045: note = Description of Artificial Sequence: Synthetic coding sequence
  source 1..9045: mol_type = other DNA
atggcccccccccccccccccgtgctgcccgtgctgctgctgctggcagccgccgcagccctgcccgctatgggacttagagcagcggcatgggaacccagagttcccggcggtactcgcgcttttgcactccgcccggggtgtacctacgcagttggagctgcttgcacaccacgcgctcccagggaactgctggatgtgggccgggacggtcgcttggccggacgaagacgcgtatcgggcgccggaaggcctctccccctccaggtccgtctagtagcacgcagcgcccccacagctctcagcagacggctgcgagctcggacccatctacccggatgcggtgctcgggcgaggttgtgcgggaccggggctaggctgtgtggggccctctgttttcccgtacccggaggatgcgctgccgcacagcattccgctctggcagcccctacgactctgcctgcatgtcgatgccctccaagaccccgacctcgatgtccagggaggccaatttgtctgcctccaggcggctcagtccgcctacgcctgctctgcgccttacgtcgagctgctggagccgtgagagttggccttgctcttgaggccgccaccgcaggaaccccatcagcatcaccttcgcctagcccgcctttgcccccaaacctgccagaagctcgggcgggccccgctcggagagcaaggcgaggaacatcaggccggggatcactcaagtttcctatgcccaattatcaggttgcactgttcgaaaacgagccagccggcacactcattctgcagctgcatgcgcactataccattgagggagaggaagagcgagtgtcttattacatggaggggcttttcgatgagcgcagccggggctatttccggatcgactcagccactggcgcagtgagcactgattcagtcttagacagggagaccaaggagactcacgtcttgagagtgaaggctgtcgactactctacccccccacgtagcgcgactacgtacattaccgtgttggtgaaagacacaaacgatcactcacctgttttcgaacaatccgaatatcgagaacgcgtccgggagaacctcgaagttggctacgaggtgttaactattcgcgcctctgacagggactccccaatcaacgccaatctgaggtatcgggtgctcggaggcgcttgggatgtctttcagttaaatgagtcatctggggtcgtgtccactcgcgctgtcctagatcgtgaggaggctgcagagtatcaactcctggtggaagccaacgaccaaggacgcaacccaggcccactgtctgccaccgccactgtctatatcgaagtggaggacgagaacgacaactacccacaattctctgaacaaaactatgttgtacaggtaccagaagacgtgggcttgaatactgccgttctgagagtacaagccactgatagggatcagggccagaatgcagcaatccactattccatcctaagcggcaacgtggccggccagttctatctacactccctttcaggaatcctggatgtgatcaatccgctcgatttcgaagatgtgcaaaaatattccctgagcattaaggcacaggatggcggacggccccccttaatcaatagttcaggggtggttagcgtgcaggtcctggatgtgaacgacaatgagccaatttttgtgagcagccccttccaggctacagtgctcgagaatgtgcccctgggctaccctgtggtgcacatccaggccgtagacgccgattctggagaaaatgcaagactccactatcgactagtcgacactgcttcgactttcctggggggcggtagcgccggcccaaagaatcccgccccaacccccgatttccccttccaaatccacaacagttccggatggatcaccgtctgtgctgaactggacagagaagaggtggaacattatagcttcggagtggaagctgtcgaccacgggtcaccacccatgtcttcctctaccagtgtcagtatcaccgtcctggatgtgaacgataacgacccagtattcacgcaacctacgtacgagctgcggctaaatgaggatgcagctgtaggatccagtgttttgacactccaagcacgcgaccgcgacgccaactccgttatcacctaccagttgaccgggggtaatacccggaacaggtttgctctgagctctcaaagggggggaggcctgatcactctcgccctaccattggattacaaacaggagcagcaatacgtacttgctgtgactgcgtccgacggcactcggtcccacactgcacatgtgctgattaacgtcaccgacgccaatactcataggcccgtgttccagtcatctcactatacagttagcgtaagtgaggacaggccagttggtactagcatcgcaaccctcagcgccaacgacgaagatacgggcgaaaatgctcgaatcacttacgtgatccaggatccagtccctcagttcagaattgaccctgactctggaacaatgtacacaatgatggagctcgactacgaaaatcaggttgcctatacgctgacaatcatggcccaggacaacgggatacctcagaagtccgataccacaaccctggaaatccttatactggacgccaatgacaatgcaccccaattcctgtgggatttctaccaggggtcaattttcgaggacgcacccccatccacgtccattcttcaggtatctgctacagacagggactcagggccaaacggtcggctgctgtatacgtttcagggaggcgacgatggcgatggagacttttacatcgaacctactagcggtgtgattcgtacccagaggagattggatagagagaacgtagccgtgtataacttatgggctctcgccgttgataggggatctcctacgcccctctcagccagtgtagagatccaggtcactattctggacattaacgataacgcgccaatgttcgaaaaggacgaactggagctgtttgttgaagaaaataatcctgtcggaagcgtggttgccaagattcgcgctaatgaccccgacgaagggccaaacgcccaaatcatgtatcagattgtggaaggcgacatgagacacttcttccagttggatctcctgaacggtgatctccgcgccatggttgaactggactttgaagtccggagagaatacgtcctggttgtacaggcaacatctgctcctctcgtctcccgggcaacagtgcacatattacttgtggatcagaatgataatccacccgtgttacctgattttcagatcctgttcaacaattacgtgacaaacaagtctaactcttttcctacaggagtcattggctgtatccccgctcacgaccccgacgtctcagactctctgaattacacgtttgtacaagggaacgagctgcggctcctcttgctcgaccctgctaccggtgaattgcagctgtccagggatcttgacaataacagaccccttgaggccctgatggaggtaagtgtgtctgacggtatccactccgtaacagcattttgcaccctccgggttaccatcatcacggacgatatgctgacaaattcgatcactgtgcggctcgaaaatatgtctcaggagaagttcctgtcacctctgctggcgctcttcgtagaaggtgtggcagctgttctcagcacgacaaaggacgatgtctttgtgttcaatgttcagaatgatactgacgtgagctccaatatactcaacgtgacttttagcgctcttctccctggtggcgtccgtgggcagttcttcccaagtgaggaccttcaggagcaaatctatctgaaccgaaccctgcttacgaccatttctactcagcgtgtgctgcctttcgacgacaatatctgtctccgtgagccttgcgaaaattatatgaaatgtgtgagcgtgctgcggttcgacagctcagccccttttctttcgtctacgacagtcctgttcaggcctatccaccccatcaacggcctgaggtgcaggtgtccccccggctttaccggggattactgcgagaccgaaatcgatctttgttactctgatccctgtggcgccaacgggagatgccgtagccgcgaggggggttatacttgtgagtgttttgaggattttaccggggagcactgcgaagtagacgcccgtagcggaaggtgcgcaaatggggtctgtaagaatggcggcacatgtgtgaacctccttatcgggggttttcactgcgtctgcccgcccggggagtacgaacgcccatattgcgaagtcaccacgcggagcttccccccacagagctttgtgaccttccgcggtctgaggcagaggttccacttcaccatcagcctcacctttgcaactcaagaaagaaatgggctcctgctgtataatggaaggttcaacgaaaaacacgatttcattgctctggagatagtcgacgagcaggttcagttgactttttccgctggcgaaaccaccaccactgtggcccccaaggtgccctccggcgtgagtgacggaagatggcactccgttcaggttcaatactacaataaaccgaatattgggcatttgggactgccccacggcccatctggggaaaagatggccgtggtgaccgtcgatgactgcgacactaccatggctgtgcgcttcggcaaggatatcggcaactatagttgcgctgcccagggcacacagacgggatctaagaagagcttagatctgacaggtcctttgttgcttggcggggtacccaaccttcctgaggattttcccgtacataaccgccagtttgtcggttgtatgcggaatctttcagtggatgggaaaaacgtggacatggccggcttcatcgcaaataatggcacaagagagggatgcgccgcacgtaggaatttttgtgacgggcgccgctgccagaacggtgggacatgcgtcaacagatggaatatgtacttatgcgagtgcccactgcgttttggcgggaagaactgcgaacaggccatgccccatccgcagttattctctggggagtcagtggtgtcgtggagtgatctgaacattataatatcagtgccttggtatttggggctcatgttccgaacacgaaaggaggactccgtcctgatggaggccacaagcgggggccccacgtcctttcgcctacagatcttgaataactacctgcagttcgaggttagtcacgggccctctgacgtcgaatcagtgatgctgtcaggtctacgcgtaaccgatggggaatggcaccacctgctgatagagctcaagaacgtcaaagaagactcagagatgaaacacctggtgaccatgacactagactatggtatggaccagaataaagccgatatcggcggcatgctacctggtctgaccgtcagatccgtggtcgtggggggggcatcagaggacaaagtgagcgtccggaggggttttcgaggttgtatgcagggggtgcgtatgggagggactccgacgaatgtagctaccctcaacatgaacaatgccttgaaagtgcgggtgaaggatggctgcgacgtagatgacccgtgcacgtctagtccatgtcctccaaattctcgctgtcacgatgcttgggaggactactcttgcgtttgcgacaaggggtacctggggatcaactgcgtcgatgcctgtcatctgaacccatgcgaaaacatgggcgcttgtgttaggtccccaggcagcccccagggttatgtctgcgaatgcggcccttcacactacggcccttactgtgaaaataagctcgacttaccctgcccaagaggctggtggggaaacccagtttgcggtccatgtcactgcgctgtcagcaaaggcttcgacccagattgtaacaagactaacggtcagtgtcagtgtaaagaaaactactacaagctgctcgcccaggatacctgcctcccatgcgattgttttccacatggaagccacagcaggacctgtgacatggcgacaggccaatgtgcatgcaagccaggtgtgatcgggagacagtgcaatcgctgtgataaccccttcgccgaagtgactactttgggctgtgaagtgatctataacgggtgcccaaaggcttttgaggccggcatttggtggcctcaaaccaaattcggccagccagcggccgtgccttgtcccaaggggagcgtaggaaacgctgtgagacattgctccggcgaaaaagggtggctgcccccagaactctttaactgcaccacaatttctttcgtggacctgagagccatgaatgagaagctgtcacgtaacgagacccaggtggacggcgcaagagcgctacagctggtgagggccctgagaagcgctacccagcacacagggacactgttcggaaatgacgtcagaactgcgtaccagctgttaggccacgtgctgcagcatgaatcctggcaacagggatttgatctggcggcgactcaggacgccgattttcatgaggacgttatacattctggctcagcgctcctggctcccgccacgcgagccgcttgggagcagatccagaggagtgaaggaggcactgcacaactgctgcgcaggctggaaggctatttctccaacgtggccagaaacgtcagacgaacgtacctaaggccgttcgtcatcgtgaccgccaacatgatactcgcagtggacatttttgataaattcaatttcacgggagcccgtgtccctaggttcgacaccatccacgaggagttccccagagaactggagtcaagcgttagcttccccgccgacttttttagaccacctgaagaaaaagaggggcccctgttgcggccagccggacgcagaaccacccctcaaacaaccaggcccgggcccggtactgagagagaagcacccatctctaggagaagacgacaccctgatgatgccgggcaatttgccgtggccctggtcattatctatagaactcttggccagttgcttccggagagatacgaccccgaccgaaggtcactgagattgcctcacaggcctatcattaacacacccatggttagtaccttggtctatagcgaaggtgctccacttccccgtccccttgagaggcccgtactagtcgagtttgctctgctcgaagtggaggaacgcacaaagcctgtgtgcgtgttttggaaccacagtctggcagtgggcggtactggcgggtggagtgcacggggctgtgaattgctttcccggaacagaacacatgtggcttgtcagtgctcacacactgcaagtttcgccgtactgatggacatttctaggcgtgagaacggggaggttctccccttgaagattgttacttatgctgccgtctccctcagcctggcagcactcctagtagccttcgtcttgttgtccctggttagaatgctgaggagcaatctccatagcatccacaagcatctggcagtggcactctttctgagccagctcgtattcgtaataggaatcaatcagaccgaaaacccgtttctgtgcaccgtggtcgcaatattactccattatatatatatgtcaacatttgcctggacacttgttgaaagtttgcacgtgtataggatgctgactgaagtgcgcaacattgatacagggccaatgcggttctactatgtcgtgggctgggggatccctgctatcgttaccggacttgccgtgggcttagatcctcagggctacggcaatccggacttttgctggcttagcctgcaggatactcttatctggtcatttgccggccccatcggcgctgtgataatcatcaacactgtgacgagcgtgctgagtgccaaggttagttgccagcgcaaacaccactactacggcaaaaagggaatcgtgagtctcctgcgaaccgccttcctgctgctcctcctgattagcgctacttggctgctcggtctcctggcagtgaaccgagacgccctaagttttcattatctgttcgccatcttcagtggattgcagggacccttcgtcttgctgttccactgcgtcttaaatcaggaggtgagaaaacacctcaagggagtgctcgggggacggaagttacatttggaagatagcgctaccaccagggctaccttgctcacacgctcactcaactgcaacactaccttcggagatgggccagacatgctccggacagatttaggcgagagcacagcatccctcgacagcatcgttcgtgacgagggcattcagaagctgggggtgtcgtctggactcgtacggggatctcatggcgaacctgatgcttctcttatgcctcgttcgtgcaaagaccctcctgggcacgatagtgatagcgattcagagctcagcttggatgaacaatcttcatcctatgcgagttctcatagcagcgacagtgaagatgacggggtgggcgctgaggaaaaatgggacccagctaggggagcagtccacagtacccccaagggcgatgccgtcgccaaccatgttccagcgggctggcctgaccagagtttggccgaaagcgactccgaagacccatctgggaagcccaggctgaaggtagaaaccaaggtatccgtggagttgcaccgtgaggagcaagggagccatcggggagaatacccaccagatcaggagtctggtggggccgcccgcctcgcatcctcccagccccccgagcagcgcaaagggatactgaagaataaggtgacatatccccccccccttaccctgacggagcagaccctcaaagggcgactgcgggagaaactagcagattgtgagcagtcccctacctcatctcgaacgtccagcttgggtagcggtggccctgattgtgcgatcactgtcaaaagccccgggagagaacccggtagggatcacttaaacggggtcgctatgaacgtaagaacaggatcagcccaggcagatggctccgactccgaaaaaccctag

SEQ ID NO: 181076 - DNA, 4194 bp, synthetic construct
  misc_feature 1..4194: note = Description of Artificial Sequence: Synthetic coding sequence
  source 1..4194: mol_type = other DNA
atggcccccccccccccccccgtgctgcccgtgctgctgctgctggccgcagctgcggcactcccagcgatgggcctccgcgcggccgcatgggaacctcgggtgcccggcggcactagagcgtttgcactgagacctgggtgtacttatgccgtgggagctgcctgcacccccagggcgccaagagagttgttagacgtaggtcgagatggacggctggccgggcggagacgggtgtctggcgccggccggccgttacccctacaagtgaggctggtggcccgctccgcaccaactgcactgagccgacgactgcgcgcgaggacccacctccctggctgtggtgccagggcaaggttatgtggcactggcgcacgtttgtgcggcgccctgtgtttcccagttccgggagggtgcgcggcagctcagcattccgcactagctgcccccacgaccctaccggcttgtcggtgcccccctcggcctcgccccaggtgcccgggccgtccaatatgtctgcccccgggcggttctgtcagactgagactgctttgtgcccttagacgcgccgctggggctgtccgggttgggctggccctggaagctgccaccgcaggtacacccagcgcgagcccttccccaagtccgccactccccccaaatctccctgaggctcgcgctgggcctgcaaggcgagcccgaaggggcacgagcgggcggggatccctgaagtttccaatgcctaattatcaggtggccctatttgaaaacgagccagcaggaaccctcatcctgcagttgcatgcccactacacaatcgagggcgaggaggagagagtttcatattatatggaaggtctcttcgatgaacggagcagaggatattttcgcattgactctgccacaggtgctgtctcgacagactcagtcctggatcgcgaaaccaaggaaacccacgttttgcgtgtgaaggccgtggactacagtaccccccccaggagcgccaccacatatatcaccgttctggtcaaagacacaaacgaccacagccctgtttttgaacagagcgaataccgcgaaagagtccgggaaaatcttgaagtcggatatgaagtgcttaccatcagagcttcagatagagactctcctattaatgccaatctaagataccgagtgcttggcggagcatgggatgtgtttcagttgaatgagagcagcggcgtcgtgtcaacccgagccgtgctggaccgggaggaggcagctgaataccagttacttgtggaggccaatgaccagggacggaatccaggcccactgtccgcaacagcaactgtctacatagaggtcgaggacgagaatgataactaccctcaattctctgaacagaattacgttgtgcaggtgcctgaggatgtaggccttaacactgccgtgctaagggtgcaggcgacggatcgggaccaggggcagaacgccgccatacattacagtatcctttcagggaacgtggccggccagttctacctccactcactatcaggaattctcgatgtgataaaccccctcgacttcgaggatgtgcaaaagtactctctgtctatcaaagcacaggacggcggtcggccgcctctaattaacagctctggggttgtgagcgtgcaggtgctggacgtgaacgacaacgagcctatctttgtgtcctccccctttcaagcaacagtcctagagaacgtgcctctcggatatcccgttgtgcacatccaagcagtggatgctgacagtggcgagaacgcaaggttgcactataggctggttgacacagccagcaccttcctcgggggggggagtgccggccccaagaaccccgcccccacccctgactttccgttccagatccataacagcagtggctggatcacagtttgcgccgaattggacagagaggaggtggagcattattcttttggcgtggaggcagtcgatcatggatctccacctatgtcctcaagcacctctgtcagcattactgtcctggacgtgaatgataatgacccagtctttacacaaccaacctacgaactgcggctcaatgaagatgcagctgtgggctcatctgtgttgacactccaagcccgcgacagggatgctaactcagtgatcacatatcagctgacaggcggtaatactaggaaccgattcgccttatcatcacagcggggaggaggactgataacccttgccttaccactggactataagcaggaacaacagtacgtcctagctgtgaccgccagcgacggtacgagatcccatacagcccatgtactgatcaacgtgactgatgctaatacacaccggccagtgttccaatccagtcattacaccgtatccgtctccgaagacagacccgtcgggacctctattgctacgctgtccgctaacgacgaagatactggtgagaacgctaggatcacctatgtcatccaagatccagtgccacagttcaggatcgatcctgatagcgggacgatgtatactatgatggaactggattatgagaatcaggtcgcttacacactcactataatggcacaggataatggaatcccacaaaagtctgacacgacaactttggagattctcattcttgacgcaaatgataatgcgcctcaatttctgtgggatttttatcagggtagcatctttgaggacgctccaccgagcacatctattctgcaggtgagcgctacagatcgtgattcgggacccaatgggaggctgctgtacacttttcaggggggcgacgacggagatggggacttttacattgaacctactagcggcgtcatccgtacacagcgacggctggacagggagaacgtggcagtttacaacctatgggcactcgccgtagatcggggatctcctaccccgctctctgcctctgttgagatccaggttaccatactcgatatcaacgataacgcccctatgttcgagaaagatgagttggaactgtttgtagaagaaaacaacccagtgggatcggttgtcgctaagatccgcgctaacgaccctgatgaagggcccaatgcgcagattatgtaccagatcgtggagggggatatgcgccatttctttcaactggatcttctcaacggtgacctccgggccatggtggagctcgacttcgaggtgagaagagaatatgtactcgttgtgcaagcaacatccgctcccttggttagtagagccacagtgcatattctattggtggaccagaatgataatccccccgttctacccgatttccaaatcctcttcaataattacgttaccaataaaagcaactcctttccgacaggtgtgattggatgtatacccgcacacgaccctgatgtcagcgatagtttgaattacacttttgttcaggggaacgagctgagactcctccttctggaccctgcaacgggtgagctgcaactctcccgggatctggacaacaacagaccactggaagccctcatggaagtgtctgtgagcgacggtatccactctgtgacagcattctgtaccctgcgagtgactattattacagatgacatgcttacgaactcaattaccgtccgactggaaaatatgtcacaagagaaattcctgtccccgctgctggcactgttcgtggaaggcgtggccgcggtactgtcaacaactaaagacgatgtgttcgtgtttaatgtccaaaatgacacggacgtcagctcaaatatactcaatgtgaccttttctgcactactacctggaggcgtgcgaggacagttctttcctagtgaagatcttcaggaacagatttacctgaaccgcacacttctgaccacgatatctacccaacgggtgcttccttttgacgacaatatctgtctgcgcgagccttgtgaaaattatatgaaatgtgtatctgtcttgaggtttgacagcagcgcgccatttctgtctagtactactgtactgttcaggccgatacatcccatcaacgggctgagatgtcgctgtccccccggatttacgggtgactactgtgagacggaaatcgacctgtgttactcggatccgtgcggggcaaatggacgatgtcggagcagagaaggaggctatacctgtgaatgctttgaggacttcactgccgtctcctag

SEQ ID NO: 181077 - DNA, 2319 bp, synthetic construct
  misc_feature 1..2319: note = Description of Artificial Sequence: Synthetic coding sequence
  source 1..2319: mol_type = other DNA
tgagacttccccttccagatccacaacagcagcggctggatcaccgtgtgtgctgagctcgatcgcgaggaagtggagcattactccttcggcgtcgaggcggtcgaccacggatccccaccaatgagcagtagtactagtgtcagcatcaccgtgctggacgtaaacgataatgatcctgtgtttacgcagcctacctacgagctcagactcaacgaagacgctgccgtaggatcatcggttctaactctacaggcccgtgaccgggatgcaaactccgtcatcacctaccagcttacaggcggaaatacacggaacagatttgcactgtcctcccagcgtggagggggcctaatcactctggcccttcctctagactataagcaagagcagcagtacgtgttggccgtcaccgccagtgatggtactcggtcccacacagcccacgtgctgatcaacgtgaccgacgcgaatacccacaggcccgtgttccagtcatcccactacactgtatccgtgtctgaagatagacctgttgggacctctattgctaccctgagcgcgaatgatgaagataccggcgagaatgcaaggataacatacgtcatccaggatcccgtacctcagtttagaatcgatcctgactctggcacaatgtacactatgatggagctggattacgaaaatcaggttgcctacactctgaccattatggcccaggacaacgggattccacagaagagcgatacaaccaccctcgagattctaatcctcgacgctaacgataacgcacctcaattcctctgggacttttatcaggggagtattttcgaggacgcgccaccctccacctctatattgcaggtatcggcaaccgaccgcgattctggccctaatggaaggcttctttataccttccagggcggcgacgatggagatggggacttttacatcgaaccaacctctggcgttatcagaacacagagacgcctcgatcgcgagaacgtagccgtttacaatctctgggccctcgccgtagatagaggttcccccacacccctttcagccagcgtggaaatccaggtgactattctcgatatcaacgataatgctccgatgtttgaaaaggacgagctggagttatttgtcgaggaaaacaatccggtgggcagtgtggttgcgaagatccgcgcaaatgatccggacgagggacccaatgctcaaataatgtaccagatagtggagggggacatgagacacttttttcagctcgatctcctgaatggtgaccttagggcaatggtggagctggacttcgaagtcagaagggagtacgtcctggtcgtgcaagcgacaagtgcccccctggtatctagagcaacggtccatattctcctggtcgatcagaatgataatcctcctgtgctgcctgacttccagattctgttcaacaactacgtgactaacaaatccaacagcttccctacaggcgtgattggatgtattccagctcacgaccccgatgtgtctgactcactgaactataccttcgtgcaaggtaatgagttgcgcctacttctgctcgacccggcaactggagagctgcagctgtcacgggacctcgacaataaccggcccttggaggctctcatggaggtgtccgtaagcgatggcatacacagcgtgactgccttctgtacccttcgagttacgatcataactgatgacatgttgactaacagtatcactgtcagattggaaaatatgagccaagaaaagttcctgtcccccctgctggctctgtttgttgaaggggtggcagccgtgctcagcaccaccaaggacgacgtgttcgtgttcaatgtccaaaacgatacagacgttagcagtaatattttgaacgtgacattctccgcgcttctgcccggaggggttcgaggccaattcttcccgtctgaggaccttcaagagcaaatatatctcaatagaaccctgttaaccacaatttctacacagcgcgtgctcccattcgatgacaatatctgtctgcgggaaccgtgtgaaaactacatgaaatgtgtctctgtgttgcgcttcgactcaagtgcccccttcttgtcatcaaccaccgtgttgtttagaccgatccatcctatcaatgggcttcgttgtcgttgtccgccggggttcaccggcgactattgtgagactgagattgatttgtgttactccgacccgtgcggtgctaatggacgttgtcgctcaagagaagggggttacacatgtgaatgcttcgaggatttcaccgaaatcagctag

SEQ ID NO: 181078 - DNA, 8772 bp, synthetic construct
  misc_feature 1..8772: note = Description of Artificial Sequence: Synthetic coding sequence
  source 1..8772: mol_type = other DNA
atgcggagccccgccaccggcgtgcccctgcccaccccccccccccctctactccttctgctcctcctcctgctgcccccgcccttactcggagatcaagtaggaccttgtaggtctttaggttcccgcggccgcggctctagcggggcctgcgcaccaatgggatggctgtgcccttcctctgcctctaatctgtggctgtatacctctaggtgtcgtgacgccggcaccgaattgaccgggcacctggtaccgcatcacgacggcctgagagtctggtgccctgaaagtgaagctcatatcccactgccaccagctcccgagggatgcccatggtcctgcaggctgctagggatcggggggcacctttctccacagggcaagctgactctgcctgaagagcacccttgcctcaaagcccctcggctgagatgccaatcctgtaaattagcccaagcacccggcttgagagcaggggagagatcaccggaggagtcattaggcggtagacgcaaaagaaacgtgaacactgccccccagttccagccccccagttaccaagccaccgtacccgagaaccagcccgccggcacaccggtggcttctctcagggcaatagatcctgacgagggcgaggccggcaggctggaatacacgatggatgccttatttgatagtcgatcaaatcagttcttctctctggaccctgtgacaggcgcagtaaccacggcagaggaacttgatagggagacaaagtccacccatgtgtttagggttacagcccaggatcacggcatgccccgccggagcgcgctggctaccctgactattctagttaccgacacaaatgatcatgatccagtctttgagcagcaggagtataaggaaagtttaagagagaacctggaggttggatacgaagtgctgactgtgagggccacggatggagacgcccccccgaatgcgaacattttgtaccggttacttgagggatctggggggagcccaagtgaggtgtttgaaatagaccctcgatccggagtcatccggactagaggcccagtggatagggaggaagtcgaatcctaccagttgacagttgaagctagtgatcaaggcagagatccaggaccccgctccaccaccgcagctgtctttctgtccgtggaggacgataacgataatgctcctcaattttccgaaaaaagatatgttgtgcaagtgagagaagacgtgacaccgggtgctccagtcctgagagtaacagcaagtgatcgtgacaaaggatctaacgccgtggtccactattcaatcatgtctgggaatgctaggggtcagttctacctggacgctcagactggggcgcttgatgttgtgagtccccttgactacgaaactacaaaagagtacaccctgagggtcagagctcaggatgggggaagaccgccccttagcaacgtgtcaggtttggtgactgtccaagtgctcgacatcaacgacaatgcacctatctttgtgagcacccccttccaggccacagtattggaaagtgtcccactgggctatctcgtattacacgtgcaggcaatagacgctgatgctggggacaacgcccgcctggagtacagattggcaggcgtaggacacgattttcctttcaccatcaacaacggcacaggatggatctctgtggccgcagagcttgaccgggaggaggtggacttttattctttcggtgtagaagcccgggaccacggaacacctgcactgacagcgtctgcaagtgttagcgtgacagttctggacgtgaatgataacaatcccaccttcacccagccggagtacactgtgcgcctaaacgaagacgcagccgtgggcactagtgttgttacagtatcagctgtcgacagagacgcccactccgtgataacataccaaataacatcgggtaacacccgcaatagattttccattaccagccagtccggaggtggcctggtcagtctcgcactgccgctggactataaactggagaggcagtatgtactcgctgttacggcatcagacgggactcgacaggacacggcgcagattgtagtgaacgttacggacgccaacacgcatcgacccgtctttcagagctcacactacactgtgaacgttaacgaggacaggcctgcaggcacaacagtcgtgctgattagtgcaaccgacgaggacacaggagaaaacgccaggattacttattttatggaagattctattccacagtttaggatagacgccgacacgggcgccgtgactactcaggccgagcttgattatgaagaccaggtgtcatacacgctagccattaccgcgagggacaacggcatcccccagaaatcggataccacgtacctggaaatccttgtgaatgacgtgaacgacaacgctcctcaatttctgcgggacagttatcaaggcagcgtttacgaagacgtgcccccttttactagcgttctgcaaatcagcgccacagacagggatagcggcctcaacgggagagtgttttacacctttcaggggggtgatgacggggacggagatttcatagtcgaaagcactagcggaattgtgcgcaccctccgtcggcttgacagggagaacgttgctcagtatgtcctgagggcctacgctgtggataaaggcatgcctccagccagaacccctatggaagtcacggtgacagtccttgatgtcaacgacaacccacctgtcttcgaacaagacgagtttgacgtgttcgtagaggaaaactcaccaatcgggttggctgtagccagggtgacagcaacggaccctgacgagggaactaatgctcagatcatgtatcaaatagtagagggcaacatcccagaggtcttccaactcgacattttttcaggggaactgaccgccctcgttgacttagactatgaggataggcccgaatacgttctggttatacaggcaactagcgctccgcttgtgtctcgcgctaccgtgcacgtgcggctgctggatcgaaatgacaacccacccgtgctgggtaattttgaaatcctgttcaataactacgtgacgaatcggagttcctcctttcctgggggcgctatagggcgggttcctgctcacgatcctgacatctcagattccctcacttactcatttgaacggggcaacgagttgtccttagtcctcctcaatgccagtactggcgaacttaaactcagcagagccctggataataatcggcccctagaggccatcatgagcgttcttgtgtctgacggagtacattccgttaccgcccaatgcgcactgcgcgtgaccattattaccgacgaaatgcttacacatagtattaccttgcggctggaggatatgagcccagaacgatttctgtccccccttctcggactgttcatccaagcggttgcggctacgcttgctactccacccgatcacgtcgttgtttttaatgtacagcgcgatactgatgctcccgggggacacatcctgaatgtgtccctctccgttgggcagccccccggcccaggcgggggacctccgttcttgccatcggaagacctccaggagaggctgtacctgaaccgctccctcttgaccgccatcagtgcccagagggtgctgccctttgatgacaacatctgcctgcgtgagccttgtgaaaattacatgcgctgtgtaagtgtgttaagattcgactctagtgcgccctttatcgcaagctctagcgtactgttccggcccattcatccggtcggcggcctacgttgccggtgccctcccggtttcactggagactactgcgagaccgaggtggacctgtgctattcccggccttgtggtccccacggcagatgccgttctcgtgagggcgggtacacttgcttgtgtcgggatgggtataccggagaacattgcgaagtgtcggctcggagcggcagatgtacacctggggtgtgtaaaaatggaggaacttgtgtgaatcttctggtggggggcttcaaatgcgactgccccagcggtgattttgagaagccctattgccaggtgaccacacgctcctttcccgcccactcattcattaccttccgaggcttgcggcagcgttttcatttcactctagccctctcttttgccaccaaggagagagacggcctcctgttgtacaatggtcgctttaatgagaagcatgacttcgtggcactggaagtgattcaggagcaggtccagctgaccttctcagctggggagagtactactaccgtcagtccatttgtgcccggcggcgtgtctgacgggcagtggcacaccgtgcaactgaagtattataataagccacttcttggccaaacaggacttccgcagggaccctctgaacagaaggtggccgtggtgacggtggatggatgtgataccggagttgccctgaggtttggctcggttttaggtaactattcatgtgcagcccagggaactcaggggggcagcaaaaagagcctcgatttgactggcccactgctgctggggggagtgcccgacttaccggaaagcttcccggtaaggatgcggcaattcgttgggtgcatgcgaaacctccaggtagactcacgacatatcgatatggccgatttcatcgctaacaatggcacggtgccaggctgcccagctaagaagaatgtttgcgactccaatacttgtcataacgggggcacctgcgtcaaccagtgggatgctttcagctgcgaatgccctcttggtttcggcggaaagagttgtgcgcaggagatggccaatccgcagcattttttgggcagttccctggttgcttggcacggattatctctgcccatttctcagccttggtacctgtcacttatgttcaggactcgccaggccgatggagtgcttctgcaggcaatcactcgcggcagatccaccattacgctccagctgagggagggacacgtgatgctctcggtcgagggaacagggctccaagcctccagcctcaggctcgagccaggtagagctaacgacggagactggcatcatgcgcagttggccctgggggcatccggcggtccaggtcacgcgattctctctttcgactacgggcaacagcgcgctgagggcaacctggggccacggttacacggtcttcacctgagtaacatcactgtcggaggaattccaggacccgctggcggcgtcgccaggggattcagaggctgcctgcagggggtccgggtgtccgacactccagaaggtgtgaattcacttgaccccagccacggcgagtctattaatgtggagcagggctgtagcctgccagatccctgcgacagcaacccatgtcctgccaactcatactgtagcaatgattgggattcctacagctgcagttgtgatcctgggtactacggagataattgcaccaatgtgtgcgacctcaacccttgtgagcaccaatctgtctgtacaaggaaaccctccgccccacatggctacacatgtgaatgcccccccaactatctcgggccctactgcgaaacacggatcgatcagccttgccccagaggatggtggggccatccaacgtgcggtccctgtaactgcgacgttagcaagggctttgaccccgattgcaacaaaacgtccggggaatgccactgcaaagagaaccattatcggccccccgggtcaccaacatgcctgctgtgtgactgctaccccaccgggagtctatcacgcgtctgtgaccccgaggacggccagtgcccctgtaaaccaggtgttattggtagacagtgcgatagatgcgacaacccgttcgccgaggtgactacaaatggatgtgaggtcaactatgactcctgtccgcgggccattgaggcaggaatttggtggcctcggaccaggtttggcctgcctgctgcagctccttgccctaagggttcatttgggaccgctgtccggcactgcgacgagcaccgggggtggcttccgcctaacctgttcaactgcacctctatcaccttctcagaactcaagggatttgccgagcggctccaacgcaatgaaagcggcctagactcaggcaggtctcagcagctggctcttctgctcagaaacgctactcagcacacggctggttacttcggcagcgatgttaaggtggcttaccagctcgctacaaggctgctcgcccacgagtcaacccagcgtggttttggccttagcgctacccaagacgtgcattttaccgagaacctactgagggtagggtcggctctgctcgacaccgccaataaaagacattgggaactgatccagcaaacagagggcggcactgcgtggttgttgcaacattacgaggcttacgcctcagctctcgctcagaatatgcggcatacatacctctcccccttcacaatcgtcacaccgaacatcgtcatcagcgttgtccggctggacaagggcaattttgccggcgccaaactgcctcgatatgaggcactgagaggagaacagcccccagatcttgaaaccacagtaatccttccagagtcagtgtttagggagactccacctgtggtgcgccccgcgggccccggtgaggcccaggagccagaagagctcgctcggcgacagcgaagacaccccgaactcagccagggtgaggctgtggcttcggtaataatttaccggaccctggcgggactgctacctcataattatgacccggataagcggtcactgcgcgttccgaagcggcctatcataaatacccctgtggtgagtatcagcgtgcacgatgatgaagagttattgccacgggccttggacaaaccagtcacagtgcaatttagactcctggaaacagaggagcgcaccaagcccatttgcgtattttggaatcatagtatccttgtgtccggcacaggcggttggtccgcgcggggctgcgaagtggtgttcaggaatgagtctcacgttagctgtcagtgtaatcacatgacctcattcgctgtgctcatggacgtgtctcgccgtgagaacggggagattcttccacttaaaacactgacgtacgtcgctctgggcgtcacactggcggcattgcttctgactttcttcttcctcacactcttacggatactgaggagcaatcaacacggaataaggcgcaacctgaccgcagcactgggactagctcagctggtgtttctgttgggtatcaatcaggcagacctcccgttcgcgtgcacagttattgccatcctcctacactttctgtacctctgcacattctcctgggctctgctggaagcactgcacctctacagagcactgactgaggtcagggacgtaaacaccggacccatgagattctactatatgcttgggtggggcgtccctgccttcattaccgggttggctgtcgggctggatcctgaaggatatggaaatccagatttttgttggctctcaatttatgacacacttatatggtcctttgccggccccgtcgccttcgccgtcagtatgtctgtttttctgtatatcctggccgcgagagcaagctgtgccgcacagagacagggctttgagaagaaagggcctgtgtcaggcctccagccttccttcgctgtgctgcttctgctgagcgctacatggctactggctctcctttcagttaacagcgacacgctacttttccactacctctttgccacgtgtaattgcatccagggacccttcatcttcctctcctacgttgtcctcagtaaagaagtgagaaaagccctgaaactggcgtgctcacgtaagcctagccccgatcctgcactcaccaccaagagcacactgacatccagttataactgtcccagtccttacgctgatgggcgactgtaccagccttacggggatagtgcagggtctctgcactcaacatcccggtccggcaagagccagccatcttatatacccttcctactgcgcgaagagtccgctctgaacccaggccagggtccccctggactgggagatcctgggagtctctttctggagggccaggatcaacaacatgacccagacacagattcggactctgaccttagtttggaggacgatcagtccggctcttacgcatccacgcacagctccgactcggaagaagaggaagaggaagaggaggaggaggctgcctttcccggcgagcagggttgggactccttactaggtcccggggccgaaaggcttcctctgcattcgactccaaaggatggagggcctgggcccggcaaggccccctggcctggagacttcggcaccaccgcaaaggaatctagcggaaacggcgcccccgaggaacgcctgagggagaatggggacgccctgtctagagaagggtctttggggcctcttcccggctcaagtgctcagccacacaagggcattcttaaaaagaaatgtctgccaaccatcagtgagaagtcgagtctcctgagattgcctctggagcagtgcactggcagctctcggggcagtagcgccagcgaagggtctcggggcgggccacctccacggcccccacctcggcagtcgctgcaggagcagttaaacggcgtgatgcccatcgccatgtcaatcaaggccggaaccgtggatgaggactcatccgggagtgaatttttattcttcaatttcctgcactag

SEQ ID NO: 181079 - DNA, 9939 bp, synthetic construct
  misc_feature 1..9939: note = Description of Artificial Sequence: Synthetic coding sequence
  source 1..9939: mol_type = other DNA
atgatggcccggcggcccccctggcggggcctgggcggccggagcacccccatactcttgctgctgctattgtctctgtttccgctctctcaggaggaacttggcgggggaggccaccagggatgggatccagggctggcagcaacaacgggcccccgcgctcacatcggcggtggcgcactggcattgtgtcccgaatcgtctggggtacgggaggacggaggcccaggactgggcgtgagggagcctatctttgtcggcctaagaggccggaggcagagcgccaggaatagtcggggtcccccagagcagccaaacgaagaattaggcattgaacacggagtacagccccttggtagccgggaaagagaaacgggccaagggccaggatcagtcctatattggcgcccggaggttagctcttgtggtcggacaggacctctacagaggggatcgctgtcccccggcgccctgtcgtccggggtgccaggcagtggtaactctagtcctctgcccagtgattttcttatacgccatcatggacccaaacccgtaagcagccagagaaatgctgggactggcagccgaaagagggtcggaacagcgcgctgttgcggagagctctgggccactggctcaaagggccagggcgagcgcgccactacgtccggcgctgagcggacggccccccgccgcaactgtttgcctggcgcaagcggaagcggacctgaactcgactctgctccgaggaccgcccgaacggcaccagcatcaggctcagcaccacgcgagagtagaaccgcgcctgagcctgcaccaaagagaatgcggtcacggggtctgtttaggtgtagatttcttcctcagaggcctggacctaggcctccaggcctgccagcacgaccagaagctcgcaaagtgaccagtgccaatcgagctcggtttcgccgagccgccaaccgtcacccacagttcccgcagtataattatcagactctggtcccggaaaatgaagctgctggaaccgccgtgctgagagtggtggctcaagatccagacgccggggaggccggcagattggtgtacagcttagccgccctcatgaattcacggagcctggagctgttctcgattgatccacagtccggcctcatccgaactgccgccgccctagaccgcgaaagtatggagaggcattacctccgagtaaccgcccaggaccacggctctccgcgactgtccgccacgacgatggtggcagtgactgtggcggatcgcaacgaccacagtcctgttttcgagcaggcccagtaccgggaaaccttgcgcgagaatgtagaggaaggatatcctattctgcagctgagggcaaccgatggggacgctccgccaaacgccaatctgagatataggtttgtgggcccccctgccgccagggcagccgccgccgcagcattcgaaatagaccctagaagcggtctgataagcacctccggacgtgtggatagggagcacatggaaagttacgagcttgtggtggaggcctcagaccaagggcaggagccaggcccaagaagcgctaccgttcgcgttcacatcaccgtactggacgagaacgacaacgctccccagttttccgagaaacgatacgtggcccaagtacgggaggatgtgagaccccatacagtagttctgcgggttacagcaacggaccgcgacaaggatgcaaacggactggtacattataatatcattagcggtaattcacgcggtcacttcgctattgactccctaacaggcgaaatccaggtagtcgctcccctcgacttcgaagccgagcgagagtatgccctcagaatccgggcacaagatgccgggaggccccctctctctaataatactggactggcctcaatccaggtggtggatatcaacgatcacatcccgatttttgtgtccacacctttccaggtgtctgtgttggagaatgccccacttggtcacagtgtcatccatatccaagccgttgatgcagaccacggagagaatgctcgccttgagtactcactaacaggcgtggcccccgatactccctttgtgatcaattccgctaccggttgggtgtccgtgagtggccctcttgacagggagtctgttgagcattacttttttggtgtggaggccagggaccacggcagccctccactgagcgcaagtgcttctgtgacagtgactgtattggacgtgaatgacaaccgcccagagttcaccatgaaggagtaccacctccgcctgaacgaggatgccgccgtgggcacctctgttgtaagtgtcactgctgtggatcgggatgctaactcagcgatttcctaccagatcactggaggcaatactaggaatcggtttgcaatctctactcagggcggagttggcctggtaaccctcgctttacccctggattataagcaagagaggtacttcaaactggtccttacagcctctgacagggcactacatgaccactgctatgtccacatcaatatcacggatgcgaacacccaccggcccgtctttcagtcagctcactattccgtgtctgttaacgaagatcgacccatgggatctacaatcgttgtgattagcgcctcagatgacgatgttggagaaaacgcccggattacctacttacttgaagacaacctcccacagtttcgcatcgacgccgattccggcgcaattactctgcaggccccactagactatgaggaccaggtcacttataccttggccattaccgctagggacaacggtatcccccagaaggccgacaccacgtacgtggaggtgatggtgaacgatgtgaacgacaacgctccgcaatttgttgctagccactatactggactggtgagtgaagacgccccaccatttacttctgttcttcagatatctgcaacagatagggacgcccatgccaacgggcgtgtacagtatacattccagaatggagaagacggggatggggacttcaccatcgaacccactagcggaatcgtgcgtacagttcgcagactggatcgcgaagcagtaagcgtgtacgagctcacagcttacgcagtggacaggggcgtgcctccacttagaacgccagtaagcattcaggttatggtccaggacgttaatgacaatgcccctgtttttcctgccgaggagttcgaggttcgcgttaaggagaactcaattgtggggagcgtagtggcacagatcaccgctgtcgatccagacgaggggccgaacgcccatattatgtaccaaattgtggaagggaacattcctgagctgttccaaatggatatctttagcggcgagttgaccgctctcatcgatctggactatgaggccagacaggagtacgtaattgtagtgcaggctactagcgccccgctcgtctctcgggcaaccgtgcacgttagattggtcgatcaaaacgacaacagccccgtgctgaataacttccagatcctattcaacaactacgtgtccaataggtcagatacatttccttccgggattataggtagaatccctgcctacgatccggacgtttccgatcacctcttttattctttcgagcggggaaacgaactccagctgcttgtggtcaatcagacatccggcgagctaagactgtctaggaagctggataacaacagacccttggtagcatcaatgttggtgacagtgaccgacggcctgcatagtgttactgcgcagtgcgtgctgcgcgttgtaattataactgaagagttacttgccaattccctgaccgtgcggctagaaaacatgtggcaagaacgctttctgtcaccactgctcggtagatttctcgaaggcgtagctgctgtcttggctacacccgcagaggatgtattcatttttaatatccagaatgatactgatgtgggggggacagtgctgaatgtgtccttttccgccctggcccctcgtggcgctggagctggtgcagccggcccctggtttagtagcgaggagctgcaagagcagctctacgtcagacgggcggctctcgccgccaggagcttgctggatgtcctaccattcgacgataacgtttgcctgcgggagccttgcgaaaattatatgaagtgtgttagtgtgctgcgctttgacagttccgcgcccttccttgcgagtgccagcactttgttcagacccattcagcccattgccgggttgcggtgccggtgccccccaggatttactggagacttttgcgagaccgaattagatctttgttattccaacccttgtagaaatggcggggcttgtgctaggcgcgagggcggatacacttgcgtttgtcggccacgtttcacaggcgaagactgtgagctagatacggaagccggccggtgtgtgcccggcgtctgcaggaacggaggcacatgcacggacgcccccaacggcggattccgatgccagtgtccggctggcggcgcctttgaaggcccccgatgcgaagttgcagcaaggagttttcccccctcctcattcgttatgttccggggactgagacaaagattccatctgacccttagcctcagtttcgcaacagtccaacagtctggtttactcttctataacggtagactgaatgaaaagcatgacttcctggcactggagctcgttgccgggcaggtaaggttaacctactcaactggagagtcgaatacggtcgtgagccccaccgtgcctggtgggctgtccgatggccagtggcatacagtgcacctccggtactataacaaacccaggaccgatgcactcgggggcgctcagggcccatccaaagacaaggtggccgtactgagcgtggacgactgcgacgtggcagtcgccctgcagttcggggcagaaatcggaaattattcttgtgctgccgccggcgttcagacgtcaagcaaaaaatccctggacctgactggaccattgttactgggtggcgttcccaacctgccagagaacttccccgtgtcccacaaggacttcattgggtgcatgcgcgacctgcatattgacggccggcgtgtggacatggcagcctttgtggccaacaatggcaccatggcagggtgccaagcaaagctgcacttctgtgatagcggtccttgtaagaacagcgggttctgttcagaacgctggggcagtttctcctgcgactgtccagtgggtttcggcgggaaggactgtcagctaactatggcccacccccatcattttcgtgggaatggtaccctgtcttggaattttgggagcgacatggcggtgtccgttccttggtacttgggactcgcgttccggacccgagcgacacaaggtgttctgatgcaggtgcaagccggcccccattcaacactcctttgtcaactggatagaggcttactgagtgtgaccgtaactagaggtagcggtagagcatcccacctcctccttgaccaggttaccgtatctgacggacggtggcacgacttgagattagagttgcaagaagaacctggtgggcggcgcggtcatcatgtgttgatggtcagcctcgactttagtctgttccaggacacaatggcagtgggaagtgagctccagggtctgaaagtgaagcaactgcacgttggcggcttgccacctggtagtgctgaggaggcaccacaggggctggtgggctgcattcaaggcgtgtggcttgggagcaccccatccggcagccccgctctactacctcctagtcacagagtaaatgctgaaccaggatgcgtggtcacaaatgcatgtgcctcaggcccctgcccacctcacgccgattgccgcgacctgtggcagacctttagctgcacctgtcagcccggctactacgggcccggctgcgttgacgcctgcttgcttaatccttgtcaaaaccaggggtcatgccgacaccttccaggggctccacacggatacacctgtgactgcgtgggcggctacttcgggcaccattgcgaacatcgaatggaccaacaatgtcccagggggtggtggggatcgcccacatgtggcccgtgtaattgtgacgttcataaagggtttgatccaaactgtaacaaaacaaacggacagtgtcattgcaaagaatttcattataggccacgcggcagcgatagctgccttccttgcgactgttaccccgttggctcaacctctcggagctgcgctccgcactccgggcagtgtccttgtcgaccaggggcacttggacgtcaatgtaattcttgcgactctcccttcgccgaggtaaccgccagcgggtgtagagtgctctatgacgcctgtcccaaatcactgcggagcggcgtctggtggcctcagacaaagtttggagtgttggcaacagtaccctgccccaggggagccctgggagctgccgtacgtctctgtgacgaagcacaaggatggttggaaccagacctatttaattgtactagtcctgctttccgggagctgagtctgttgttagatggtctggaactcaataagacagcattggatacaatggaggctaagaaactagcccagaggctgagggaagtgacaggacacacagatcactactttagccaggacgtgcgcgtgacggccaggttactggcacatcttctcgcattcgaatcgcaccagcagggatttgggctgacagccacacaggatgcacattttaacgaaaacttgctgtgggccggctcagctctgctggcacccgagaccggcgacctgtgggcagcgctgggccagcgggcgcccgggggcagcccaggatcagctgggctggtccgccatctggaggaatacgccgccaccctggcccggaatatggaactcacatatctgaatcctatgggactagtgacacctaacattatgctgtcaatcgaccggatggagcaccccagctccccgagaggggccaggaggtaccctcgataccattcaaacctttttcggggacaggatgcttgggatccgcatacccatgttctcttgccctcacagtcacctaggcctagcccctctgaggtcctgcccacttcttcctcgatagagaacagcacaacgtcctcagttgtacccccacccgcccctccggaaccagagcccggaattagcatcattattctgctcgtttatcgtacactgggcgggctcctgcctgcacaattccaggccgagcgtcgcggcgctagactgcctcagaatcccgtgatgaactcgcctgttgtgtcagttgccgtgttccacggaaggaacttcttacggggcatcctggaaagcccaataagcctagagtttcgcctcttgcagacagcaaaccggagcaaggcaatttgcgtacagtgggaccccccgggactcgcagagcaacacggagtgtggactgcgcgagactgtgaactagttcataggaatgggtcccacgcccgctgccggtgcagccgcacgggcacatttggcgtgctaatggatgcaagtcctagagagcgactcgaaggcgatttggagctcctggcagtctttacgcatgtggtggtggctgtcagtgtggcggctttggtcctcaccgcagcgatcctcctaagcctccggagtctgaaaagcaatgtaaggggaatccacgctaacgttgccgcagccctgggcgtcgctgaattgttatttctcttggggattcatcgcacgcacaaccagcttgtttgcactgcggtggctattctattgcactacttctttctctccacgttcgcctggctgttcgtacaggggcttcacctctatcgaatgcaggtggagcctcggaacgtggatcgcggagccatgcgcttctaccacgcactaggatggggggtaccagcggttctccttggcttggccgtagggctggaccccgagggatatgggaatcccgacttctgctggataagcgtgcacgagccactcatttggtcctttgccgggccagtggtgctggttatcgtgatgaacgggaccatgttcctgctcgcagcgagaacttcatgctcgactggtcaacgagaggccaaaaaaacctctgccctaacactgaggtcatcttttctgctgttactgcttgtgtcagctagctggttgtttggattactggctgttaatcattccattctcgccttccactatctccatgctgggttgtgcggtttgcagggcctggcagttctactacttttctgcgttttgaatgccgacgcccgagccgcctggatgccagcctgtctggggcgtaaagccgcccccgaggaagctcgccccgcacccggtctgggcccaggggcttataataatacagccttgtttgaggagtccggcctgatccggattactctgggagcaagcacggtatcctctgtgagctcggcaaggagcggccgtactcaggaccaagatagccagagggggcgcagctatctgcgcgataacgtgctggtgcgacatgggagcgccgctgaccatactgaccattctcttcaggcccatgccggcccaaccgacttggatgtagccatgtttcatagagacgctggcgccgatagcgacagcgattcagaccttagtctggaagaagaacgcagcctgtctattccctccagtgagtccgaggataatgggcgcaccagaggaagattccagcgcccactatgtcgggctgcccagtctgagcggctcctcacccatccaaaggacgtggatgggaacgatttgttgtcgtactggccagcgctaggcgaatgcgaagctgctccctgcgcccttcagacttgggggagcgagcggcgactaggtctggacacctctaaagacgccgctaataacaaccaacccgaccccgccttaacaagcggtgatgagacttctttgggtagggctcagcgccagcggaaaggcatcctgaaaaatcggctccaataccctcttgtgccgcaaacacgcggggctcctgaactgtcttggtgccgagcagctaccttaggacacagggcagtgcccgcagcctcttatggtcgaatttatgctggaggaggcacaggctcgctgtcacagcctgcttccaggtattcaagcagagagcaattggacttactgttgcgccgccagctgagtcgggaacgcctggaggaggcgccagctcccgtgctgagacctctcagccgtcctggcagccaggaatgcatggatgcagcgcccggacgcctggaacctaaagatcgcggctcaacgcttccacggaggcagcccccccgcgattatcccggggccatggcaggcagattcgggagcagagacgcactagatctcggggctcccagagaatggctgagtaccctgccccctccccggcgcacccgtgacctggaccctcagccaccaccgcttcctctgtcacctcaacgacagttgtcacgggaccccctcctaccatcaagaccgctcgactcgttgagcaggagcagtaacagcagggaacagctagatcaggtcccctccaggcacccttctagggaagctttaggccccctgcctcaactccttcgtgctagggaagatagtgtgtcaggcccttcacatgggccctccaccgagcaactcgatattcttagttcaatactcgccagcttcaacagcagtgctttatcaagcgttcagtcctctagcacgcctcttggaccacacaccaccgctacaccctccgcaaccgcctcagtgctcggcccctctactccgcggtccgccaccagccactctatatccgaactgtcaccagattccgaggtgccgcggtccgagggacactcttag

SEQ ID NO: 181080 - DNA, 9954 bp, synthetic construct
  misc_feature 1..9954: note = Description of Artificial Sequence: Synthetic coding sequence
  source 1..9954: mol_type = other DNA
atgatggcccggcggcccccctggcggggcctgggcggccggagcacacctattctgctcttgctcttactatctttgtttcctctgtcccaggaggaacttgggggtggggggcaccaggggtgggatccgggattagctgcaaccactggtccaagggcccacattggcgggggcgcactagccctgtgtccagagagcagtggcgtaagagaggatggcggccccggtttaggtgtgagggagcccattttcgtgggacttcgtggtcgccgacagtcagcaaggaactccagagggcccccagagcagcctaacgaggagctcggaattgagcacggggtccagccgcttggctccagagaaagagaaacgggccaaggcccaggaagcgttttatactggcgcccagaggtgagttcatgcggcagaacagggccgttacagcgcggttcactgagccctggggcgttgagcagtggcgtacctggctccggaaacagcagtcctctccctagcgacttcttgattcggcaccacggacccaagccagtctcctcccagcggaacgcaggcaccgggtcaaggaaacgggtaggaaccgctaggtgttgtggagagctttgggccaccggtagcaagggacagggtgaaagagctacgacaagcggggctgagcgcacagcccctcggcgaaattgcctcccaggggcatctgggagcggtccggagctggattcggcacctagaacagcacgaacagccccagcttctggcagtgcaccccgggagagcagaacagccccagaacctgcccctaaaaggatgagatctcggggcctgtttcgctgccgctttctgccacagaggccgggtcctagacccccgggtttacctgcgagaccggaagcccgaaaggtcacaagcgcaaatagagcccgcttcaggcgggccgcgaacagacatcctcagtttccacagtacaattatcagaccctggtccccgagaatgaagccgcagggacagctgtcctacgggtagtggcccaggatccagatgcaggcgaggccggtagactagtatattctctcgctgcactgatgaactcccggtctcttgagctgttcagtatcgaccctcagagcggattgatcagaactgcggccgcattagatcgcgagtcaatggagagacattacttacgcgtgacagcgcaggatcatggtagtccacgtctctctgctactacaatggttgccgtaaccgtggctgatcggaacgaccactccccggtgtttgagcaggctcagtaccgggagacactcagggagaacgtggaggaaggctaccccatccttcaattgagagctactgacggagacgcccctcctaacgctaaccttcgctataggttcgttggtcctcccgccgcccgagccgcggcggccgctgcattcgaaatagacccccgctcgggcctgatttctacatctggccgcgttgatagagaacacatggaaagctatgagctggtggtggaggcttctgatcaagggcaggaacctggcccccggagcgccacggtgagagtgcatataaccgtgctagatgaaaatgacaacgccccgcagttttctgaaaaacggtatgttgcccaggtgcgagaagacgttagaccacatacagtagtgctgcgcgtgacggcaaccgacagagataaggacgccaatgggctagtccattacaacatcatatctggaaacagcagaggccatttcgccatcgattctcttaccggggagatccaggtggtcgcacctttggattttgaagccgaacgggagtatgctctcaggattcgcgctcaagacgcagggcgacccccactttcaaacaataccggactggcttccatccaggtggtggacatcaatgatcacatccccatctttgtatcaacgcctttccaggtaagcgtcttagaaaatgcgccccttggccactccgtaattcacatccaggccgtggatgccgaccatggagagaacgcacggctggaatattctctgaccggcgtggcccccgatacccctttcgtgatcaatagtgccaccggctgggtttctgtgagcggaccactcgatagagagtccgtcgagcactatttctttggggtcgaggctcgcgatcatggatctccacctttgtctgcttctgctagtgtgacagtgacagttctggacgtcaatgacaatagacccgaatttaccatgaaagagtatcatttgaggctgaacgaggacgccgctgtcgggacctctgtggtatcagttaccgccgttgatagagatgccaattcagccatttcctaccagataaccggggggaacaccagaaatagatttgctatttctacgcagggcggtgttggccttgtgaccttagctttaccgctggactataagcaggagcggtacttcaaacttgtcctaacagctagtgatagagccctgcacgaccattgttatgttcatatcaatatcacagatgctaatacgcatcgcccagtgttccagagtgcccactacagcgtcagcgtcaacgaggatcggcccatggggtccacgatcgtggtcatctccgcgagcgacgacgacgtgggcgaaaatgctcgcatcacatacctgctcgaagacaatctcccccagtttcgcattgacgccgactccggggccataacccttcaggctcctttggactatgaggatcaagttacgtataccctcgccattactgccagggataatggtattccacaaaaggcagataccacgtacgtcgaagttatggtcaatgacgtgaatgacaacgctccacagtttgtcgctagccactacactggccttgtaagcgaggatgctccacctttcacttccgttcttcagatctccgcgacagatagagacgctcacgccaatggtcgtgtgcagtacacttttcagaatggggaagacggcgatggggactttaccatcgagcctacatcaggcatcgtcagaacagttaggcggctcgatagggaagccgtgtcagtgtacgaattgaccgcttatgcagtggaccgtggagtccctcccttgcgaacgcccgtgagcatccaggttatggtacaggatgtgaatgacaatgcacctgtcttcccagccgaggaattcgaagtacgggtgaaggaaaatagtatagtaggctcagttgttgctcagattaccgccgttgaccctgatgaggggcctaatgctcatatcatgtatcaaatcgtggagggtaacatccctgaattgtttcagatggacattttctcgggtgaactgacagctttaattgacctggactacgaggcacgccaggaatatgtcattgtggtgcaggccacaagcgctccccttgtgtcgcgggccacggtccacgtgcggctggtggaccagaacgacaatagccctgtgctgaataacttccagattttgtttaataattatgtgagcaacaggagcgacacgtttccatctgggattattggcaggataccagcatacgacccggacgtaagtgaccacctgttttactcattcgagagggggaatgagctgcagctactggtagtgaaccagacctccggagaactccgactgtcacggaagctggacaacaaccggccccttgtcgcaagcatgctggtcaccgtgaccgacgggctgcacagtgtcactgcacaatgtgtgctgcgtgtggtcataataactgaggagctgctcgcaaactccctcactgtgcggctggagaacatgtggcaggagagattcctgtctccccttctgggtcggttcctcgagggggtcgcagctgtcctagctaccccagccgaagatgtcttcatatttaatatccagaatgacactgacgtcggcgggacggtgctcaacgtgagcttttcagctctagccccccggggcgccggagcaggggctgccggaccatggttctcctccgaggaattacaagagcaactgtacgtgcgccgtgccgctctggctgccagaagtctgctggatgtgttgccgttcgatgataatgtctgtctgcgtgagccatgcgaaaattacatgaagtgcgtcagtgttcttcgcttcgatagcagcgcaccattcttggccagcgcttccacactttttcggcctatacaacctattgccggtctgcgatgcagatgtccccctggctttaccggtgacttctgtgagactgaactggatctgtgctactcgaacccatgtagaaacggcggcgcttgtgctcggagagagggaggttatacatgcgtctgtcggcctaggtttaccggtgaggattgtgagttggacaccgaggcgggacggtgcgtaccgggggtctgccgcaacggcggaacttgcaccgacgcccccaatggcggattcagatgtcaatgtccagctggcggggcattcgaaggtccacgatgtgaggtagccgcaaggagcttccctcctagctcctttgtgatgttccgtgggctgcggcaaaggtttcatctgactctgtcactgagctttgccaccgtacagcagtccggcctgcttttttacaacgggcggctcaacgagaagcacgatttccttgctctcgagctggttgctgggcaagtgcggttgacttactctacaggcgaaagcaatacagtcgtcagtcccaccgtgcccgggggcctcagcgatgggcaatggcatacggtgcacctgcgctactataacaaaccacgtaccgacgctctcgggggcgctcagggcccctccaaagacaaagtggcagtgctcagcgtggacgattgcgacgtagcggtggccctgcagttcggcgcggaaattggaaactactcctgcgcagctgcaggggttcaaactagttccaagaagagcttggacttaacaggtccactcctgctgggaggtgtccctaatctgccggaaaattttcctgttagccataaagatttcattgggtgcatgagggatcttcacatcgatggacggagagtggacatggcggcatttgttgctaacaacggtaccatggcgggttgccaggcgaaattgcacttctgcgattccggaccttgtaaaaattccggcttctgttctgaacgctggggttccttctcatgcgattgccccgtaggtttcgggggaaaggattgtcagcttacaatggctcaccctcatcactttcgggggaatggcacacttagttggaatttcggaagtgacatggctgtatcggtaccatggtacttgggactagcgtttagaaccagagcgactcagggggtcctgatgcaggtacaggctgggccacatagtactctgttgtgccagctggacaggggcctgctgagtgttaccgtaacaagaggatccgggcgagcctcacatcttttactggatcaggtaaccgtttctgatggcagatggcacgatttgcgtcttgagctgcaggaagaacctgggggccgacgtggacaccatgtattgatggtgtcgctggatttttctctgttccaggacaccatggcagtcggctcagaacttcagggactcaaggtgaaacagttgcacgtcggagggttacctcctgggagtgcggaggaagcgccccagggcttggttggttgcatccaaggcgtttggctcggctcgaccccttctggcagccccgcacttctcccgccaagtcacagggttaacgccgagcctgggtgcgtggttaccaatgcttgcgcaagtggtccatgtcccccacatgccgactgccgcgacctttggcaaaccttcagttgtacatgtcagcctggttattatggccctggatgtgtggatgcctgcctcctgaacccatgccagaatcaaggcagttgccggcatctgccaggcgcgccccacggatacacttgcgactgtgttggcggatactttggacaccattgtgagcaccggatggaccagcagtgcccccgagggtggtgggggtctccaacctgcggcccatgtaattgcgatgtccataagggcttcgacccgaactgtaacaagaccaacggccaatgccactgtaaggagtttcactaccgtcctcgggggtccgactcctgtctaccctgtgactgttatcccgtcggttccacctctagaagctgtgctcctcactctggacaatgtccttgtagacctggcgctctgggaaggcagtgcaattcttgcgactcgccatttgcagaagtgacggcctctgggtgtcgggtactatatgacgcttgtcctaagagcttgcgtagcggtgtgtggtggccccagacaaaattcggggttcttgctaccgttccgtgccccaggggtgccctaggcctcaggggggccggtgcagccgttagactgtgcgacgaggcacaagggtggctcgaacccgacctctttaactgcacaagccctgccttcagagaactttcactactgctcgacgggctcgagcttaacaagacagccctggatacaatggaagccaagaaattggcacaacggctgagggaagtgaccggccatacggatcattacttctcgcaggatgtgagagttaccgcccgtttgctagcacatctgctggctttcgaaagccaccagcaaggctttgggctgaccgcgacacaggatgctcattttaatgagaatctgttatgggccggaagtgccctactagcacccgaaaccggcgacctgtgggccgcgctcggccagcgagcccccggcgggtcacctggtagcgccgggcttgtacggcatctagaagagtatgcggcgactttggcacggaatatggaattaacctacctgaatcccatgggactggtgaccccaaacatcatgctttcaattgaccgcatggagcaccctagtagcccccgcggcgctcgaagatacccaagatatcactccaatttgttcagaggacaggacgcttgggacccccatactcacgtcctgttgccgagccagagcccacgtccttcccccagcgaggtgctccccacaagtagttcgatcgaaaattctacaacaagttccgtggtgccccctcctgctcctccagaaccagaaccaggaatcagcattattatcctcttagtgtaccggacactgggaggtctcttaccggcacaatttcaggctgagagacgaggtgcaagactgcctcagaaccctgtgatgaactccccggtggtatcagttgcggtgttccacggccgcaatttcttacgcggcattctcgagtccccgatttccctggagttcagactcctacagacagccaacaggagcaaggctatctgcgtacagtgggatcccccgggactggccgagcagcacggagtctggaccgcccgcgactgcgaattggtgcaccgtaatggaagccacgctaggtgccgatgcagccgaactgggactttcggtgtcttaatggacgcctcaccacgggagcgacttgagggcgatctagagttgctcgcggtgttcactcacgtggtagtggcagtatccgttgccgccctggtgttgaccgccgcaatcctgctgagcctcagatcactgaagtcaaatgtaaggggtatccatgcgaacgtggctgcagctcttggtgtagctgagctgctgttcctcctgggcattcataggacacataaccaactcgtgtgcaccgctgtcgctatcctcctccattatttttttttgtccacttttgcatggctgtttgtccagggactgcacctataccgtatgcaagtggagcccagaaatgtggatagaggtgcaatgcgcttctaccatgccctgggatggggggtgccagcggtgctcctcgggcttgctgtaggcctggatcccgaaggatacggcaaccccgatttctgctggattagcgttcacgaacccctgatttggagcttcgccggacctgtggtccttgtcatcgtcatgaacggaacaatgtttctcctggcagccaggacttcatgctccacaggtcagcgtgaggcgaagaagactagcgctctgaccttgcgctcgtcctttctgctgctcctgctcgtctccgcaagctggctgttcgggctattagcggtgaatcacagcattctcgcctttcactatctgcacgcaggtctatgtggactgcaggggctcgctgtactgttgcttttttgcgtcctcaatgccgatgctcgtgcagcttggatgcccgcctgcctaggcagaaaagccgctccagaagaggctcgtccagcccctggcctgggccccggagcctataacaatacagctctcttcgaagagtccggtctcattcgtatcacactgggtgcatcgaccgtcagcagcgtgtcatccgcgcgcagcggacgaacccaggaccaggactcacaaagagggcgatcctacctcagggataatgtattagtgcggcacggcagtgccgccgaccacacggatcatagcctacaggcccatgccgggccaacagatctcgacgtggctatgtttcatcgggatgctggcgctgactcagatagtgactcggatctgtcactggaagaggaacgatccttatccattcccagctcagaaagtgaggataacgggagaaccaggggaaggtttcagcgcccactatgcagggcagcccagagcgaacggcttctcactcaccctaaggacgtggatggaaatgatttacttagttattggcctgccctgggggaatgcgaggctgctccgtgcgctcttcagacttggggcagcgagcgacgtctcggtctggatacatccaaggatgccgccaacaataaccaaccggaccccgccctgacaagtggtgatgaaacctctttggggcgggcccaaagacagcggaagggaattttaaagaacaggctccaatatccactcgtgcctcagacccgaggcgccccggagctgagttggtgccgtgcggccacccttggacatcgcgctgtgccagctgcctcatacggccgaatctacgccggggggggcaccggaagtttaagccagcccgccagtagatactcctcacgggagcagctggaccttctgctgcggagacagctctctagagaacgccttgaggaagcgcccgctcccgtacttaggcccctgtcccgccctggcagccaggaatgtatggatgccgccccggggcggctggagccgaaggacagaggttcaactctccctagacggcagccaccccgagactatcctggcgccatggccgggcggttcgggtcaagagacgctctggatctaggagccccacgggaatggctgtccacccttccgccccccagaaggacccgggaccttgatcctcagccaccccccctccctctgtctccacaaagacagctgagccgcgatcctttgctgccgtcacgacccttggatagcctgtccagaagttcaaactcgcgggaacaattggaccaagtgccaagtcgtcaccccagccgggaggcactcggccctctgccacagctcctgagggctagagaagatagcgtatcggggcctagccatggtccttctaccgagcagctcgatattctgagtagcatccttgcctccttcaactctagcgcactctctagtgtgcagtctagctccacgcccctggggccccacacaactgctacgccttccgctacagcatcggtactcggcccttccaccccaagatccgctaccagccactctattagcgaattaagccctgattctgaagtgccacgaagcgaggggcactcatag

SEQ ID NO: 181081 - DNA, 1557 bp, synthetic construct
  misc_feature 1..1557: note = Description of Artificial Sequence: Synthetic coding sequence
  source 1..1557: mol_type = other DNA
atggccttctgggccggcggcagccccagcgtggtggactacttccctagcgaggacttttacagatgtggctattgtaaaaacgagtcaggaagtaggagtaacggcatgtgggcacactccatgaccgttcaagactaccaggacctgattgatcgcggatggcgccgctctggcaaatacgtttacaagccagtcatgaatcagacctgctgtcctcagtacaccattcggtgtagaccactgcaattccagccaagcaagagccacaaaaaagtgctgaaaaaaatgctcaagttcttggccaagggggaagttcctaaaggaagttgcgaggacgaacccatggactccactatggatgacgctgtggcaggggatttcgccctgattaacaagttagacattcagtgcgatttgaagactctgagcgatgacataaaggaaagtttggagtcggagggcaaaaactctaaaaaggaagagccacaggaactactgcagtcccaggacttcgtaggcgagaaactgggcagcggggaaccgtcccactctgtgaaggtacacactgtcccaaagcccggtaaaggggccgacttgagtaaacccccttgccgcaaagccaaggaaatccgcaaagaacggaaacggcttaagctcatgcagcagaaccccgctggcgagctcgaggggtttcaggcccagggtcaccccccctcactttttccacccaaagcaaaatcgaaccagccgaagagtttggaagacctaatattcgaaagtctgccagagaacgcctcccataagctggaggttagggtggtgaggtcgagtcctccaagttctcaattcaaggcgacacttttagaaagctaccaagtttacaagcggtaccagatggtgatccataaaaacccccccgacaccccaacagaatcacagttcacacgattcttgtgttcttccccactggaggcagagactcctccaaatgggccagactgcggatacggctcctttcatcaacagtactggctcgatgggaaaattatcgctgtgggggtaatcgacatcttgccaaactgcgtgagctcagtatacttatattacgaccccgactacagttttctgtctctcggtgtgtactctgctctgagggagatagcttttacccggcaacttcacgagaagacttctcaactcagttactattatatgggattttacatccactcctgccctaagatgaaatacaaggggcagtataggcctagcgatctgctgtgcccggagacgtacgtgtgggtacccattgagcaatgtcttccctcactggaaaactctaaatactgcagattcaatcaagacccagaagctgtagacgaggaccgttcaaccgagccagatcgactccaggtattccataagcgggccattatgccttatggtgtctacaaaaagcagcaaaaggatccaagcgaggaggccgccgtgctgcagtacgcgagtctggtcgggcagaagtgcagcgaaagaatgcttctatttagaaactag

SEQ ID NO: 181082 - DNA, 3195 bp, synthetic construct
  misc_feature 1..3195: note = Description of Artificial Sequence: Synthetic coding sequence
  source 1..3195: mol_type = other DNA
atgggccggcacgtggccaccagctgccacgtggcctggctgctggtgttgatatcagggtgttgggggcaggtcaataggttaccattcttcactaatcattttttcgatacctatcttctgattagtgaggacacacccgtaggttcgagtgtgacacaactgctggcccaggacatggataatgatccattggtgtttggagttagcggcgaggaggccagcagatttttcgcggtcgagccagacaccggagtcgtgtggcttcggcagcctctggatcgggagacaaaatcagaatttaccgtggaattcagtgtcagcgaccaccagggcgttatcaccagaaaggtgaacatccaggtgggtgacgtgaacgataacgcgcctacttttcacaaccagccgtactctgttagaatcccagaagtgggagccacaggaaacaccccggtcggtacaccaatctttatcgtgaatgctaccgatcccgatctaggagctggcggttcggtgctctacagctttcagccgcccagccaatttttcgcaattgatagcgcgagagggattgtaactgttatccgagaactggactatgagacaacccaggcctaccagcttaccgtcaatgccaccgatcaggataagacccgtcctctgagtaccctggcaaatctggccattatcatcaccgatgtgcaggatatggatccgatcttcattaacctgccatacagcacgaacatctacgaacactctcccccaggcactactgttcgaataatcacagccattgaccaggataagggcaggcctcgcggaatcgggtacacaatcgtatcggggaatacaaatagcattttcgctctggattatatctccggtgtgttaacgctgaatgggctactggatcgcgagaatcctctgtacagtcatggctttattctgacagtgaagggcaccgaattgaatgatgaccgcactccgtccgatgcgacagtgacaacaacctttaacattctggtgatagacattaacgataacgcccccgaatttaattctagtgagtattccgtggctatcactgaactggctcaggtcgggtttgcgctgcccctttttattcaggtagtagataaggacgaagggctaaattctatgtttgaggtctatctggtcggaaataatagtcaccactttatcatttcccctacgagtgtgcagggcaaggccgacattcgcatcagggtagccatccctcttgattacgaaaccgtggataggtacgacttcgacctcttcgccaatgagagcgtgccagaccacgtcggttacgccaaagtgaaaataaccttgatcaatgagaatgataacaggcctatcttctcacagcccttgtataacatttctctctacgagaatgtgaccgtgggtacctcggtcctgacggtgctggctacagacaacgacgctgggacattcggagaagtgtcttactttttcagcgacgacccggatagattctctttggataaggataccggactgatcatgctgattgctagactggactatgagctaattcagcgttttactctcacaattatcgctagagatggcggtggtgaggagacaaccggcagagtgagaattaacgtgcttgatgtgaacgataacgtgcctacatttcagaaggacgcttatgtgggagctctgagggagaacgagccctcagtcacccagctagtgagactgagagcgaccgatgaggattcgcctcccaacaatcagatcacatattcaatcgtgagcgccagtgcttttggatcgtactttgacatcagcctgtacgagggctatggagtgattagtgtttctcgccctctggattacgagcagattagcaacggactaatctacttgactgtgatggccatggacgccggaaacccaccactcaatagcaccgtgccggttacaatcgaggtctttgatgaaaacgacaatcctccaactttttccaagcccgcatatttcgtgtcggttgtcgaaaatatcatggcaggggcgaccgtgctatttttaaacgctacagacctggatcgctctcgggaatacggccaggaatctataatttatagccttgaaggatcaactcaatttaggattaacgcaaggagtggtgagattaccactacatccctgctggatagggaaactaagtccgagtatatactgattgtgagagcagttgacggtggggtaggccataatcaaaaaacaggaatcgccacggtaaacatcacgctgctagatatcaatgataaccatccaacttggaaggacgcgccttattacattaacctggtagaaatgactccaccagacagcgacgtaaccacagtggtcgcggttgatccagatcttggtgagaatgggacgctggtctattccatacagccccccaataagttctactcgctgaacagcacaaccgggaagatcaggactactcacgcaatgctcgaccgtgaaaaccccgatccacacgaggctgagctgatgcggaagatcgtggtgagcgttactgactgcggccgtcccccactgaaggccacaagttccgctaccgtttttgtaaatcttttggatctaaatgataacgatcctacatttcaaaacctgccctttgtcgcggaagtcctcgagggtattcccgccggtgtaagcatttaccaggtggttgctatcgacctggatgaaggtctcaacggactcgtctcttatagaatgccagtgggcatgcccaggatggatttcctaatcaactcatccagtggcgttgtcgtaactacaactgaactggatagagagagaatcgcggagtatcagttgagggtggtggcgagcgacgccggcacacctaccaagagctccacatctaccttgaccatacacgtgcttgatgtgaacgacgaaacaccgacattttttccggcagtctacaacgtgtccgtgtccgaagatgtgccccgggagtttagagtggtgtggctgaattgtaccgataacgacgtgggtctcaatgcggagctgagctacttcatcaccggcgccgcccccgcgtcagcccacctgtgtcgcccaccgggggcattgccccctcctctaccggacgggcagcccgattag

SEQ ID NO: 181083 - DNA, 3345 bp, synthetic construct
  misc_feature 1..3345: note = Description of Artificial Sequence: Synthetic coding sequence
  source 1..3345: mol_type = other DNA
atggtgaagagccccatgaaccgggagctggtggccacctacgaggttaccctatccgtgattgacaatgctagcgatctgcctgaaaggagcgtgtccgtgccgaacgccaagttaacagttaacgtgctggatgtgaacgataataccccccaatttaaaccctttggcataacttattatatggaacgcattcttgagggtgcgacccccgggacaactctcatagctgtcgcagctgtcgaccctgacaagggactcaacgggctcgtgacttatacattacttgacctggtcccaccaggttatgttcaactggaggatagcagcgccggaaaagtaatcgctaaccggaccgtagactacgaagaggtacactggttaaattttactgtaagagcctctgacaatggcagccccccgcgggcagccgaaatacctgtgtaccttgagattgtggatattaacgataataaccccatattcgatcaacctagttatcaggaggccgtgttcgaagacgtgcccgtgggaaccatcattctcactgtgaccgccaccgacgcagattcaggtaacttcgccctcattgaatacagcttaggagacggagagtccaaatttgctattaatcccactactggcgatatttatgttctttcttcacttgacagggagaaaaaggaccactatatactaactgccctcgccaaggacaacccaggagacgttgcgagcaataggagggaaaatagcgtgcaggtggtgatacaagtgttggatgtgaacgattgccgtccacagttttcaaagccacagttttctacttctgtttatgaaaacgagcccgcgggaacatctgtaatcacgatgatggcaactgaccaggacgagggcccaaatggggaacttacctactccttagaagggcctggtgtggaggctttccatgtagacatggatagcggcctggtaacgactcagaggccactgcagagttacgaaaaattcagcctcaccgtagtagcaaccgatggtggtgaacctcctctgtggggtactactatgctactggtggaagttatagacgttaatgacaaccgtcctgtgttcgtaaggcccccaaacggcacaattctacacattcgcgaggagattcccctgcggtctaatgtctacgaagtctacgcgaccgataaagacgaaggcctgaatggagccgtgcggtatagctttctcaagactgccgggaaccgggactgggagtttttcatcatcgaccctattagcggtctgatccaaactgcccaacgactggacagggaatctcaagcagtctactccctcatcctcgtcgcaagcgacctcggacagcccgtgccttatgagaccatgcaacccctgcaagttgccctagaagacatagatgataatgagccactcttcgtgagacctcccaagggtagcccccagtaccagctgctcaccgtgccagagcactcccctcgcgggaccctcgtgggcaacgtcactggggccgtagatgcagacgaagggcccaacgccattgtgtactattttatcgccgccgggaacgaggaaaagaactttcatcttcagcccgacggctgtttgctcgtgttgcgggatcttgatcgtgagcgggaggcaatcttttcatttatagttaaggctagctctaacaggtcatggacgccacctagggggcccagccctacactggacttggtggccgatctaacactgcaggaggtccgggttgtactggaggacatcaatgatcagcctccgcgatttacgaaggcggagtatacggccggcgtggccaccgacgctaaggtgggttctgagttgatccaagttctggccctcgacgccgacataggcaacaatagccttgtgttctattctattcttgcaatccactacttccgtgcactggcgaatgacagtgaagacgtagggcaggtattcaccatggggagcatggatggtatcctgcggacctttgacctcttcatggcatactcacccggctatttcgtggtggacattgtcgccagggaccttgcaggccacaacgataccgctattattgggatatacattctcagagacgatcagcgggtgaaaatagtgattaatgagatacctgacagagtcagagggttcgaagaagagtttattcacttactttccaacattactggagctatcgttaatacagacaacgttcagttccacgtggacaagaagggcagagttaattttgcccagacagaactacttattcacgtcgtcaaccgggacaccaatagaatcttagacgtcgaccgagtgatccaaatgattgacgagaataaggaacagttaaggaacttatttcgaaattacaacgttctagacgtgcagcccgctatatcagttagacttcctgacgatatgagcgctctccagatggccattatcgtgctggctatactgcttttcctggccgctatgctcttcgtactcatgaactggtattatcggacagtccacaagcggaagctcaaggccattgtggctgggagtgcaggtaatcgcggatttatagatattatggatatgcccaacactaacaagtattcgttcgatggggccaaccctgtgtggcttgaccccttctgccgcaatctggagctagcagcgcaggcagaacacgaagatgacctgccagaaaatctgtcggagatagcagacctgtggaacagccctactagaacgcacggcactttcggcagagaacctgccgccgtgaagccagatgacgaccgctacctgagggccgccatacaggagtatgacaatattgcgaagctgggccagatcatacgagaaggaccaatcaaggggtcgctcctgaaggtggtgctggaagactaccttcgcctgaagaagctcttcgcacagaggatggtgcaaaaggcaagtagttgtcattcgagcataagtgagttgatacagaccgagttagacgaggagccaggggatcactcccctggtcagggcagtctccgtttccgccataaacctcctgttgagcttaaaggcccggatgggatccacgtggtgcatggaagtacaggaactttgctggccactgaccttaatagcctccctgaggaagatcaaaaagggctgggtagatcactcgaaacacttacagcagcggaggcaacagcctttgaaagaaacgctcggaccgagtctgccaagagtacgcctctccataagctgagagatgtcattatggaaacaccactcgagatcactgaactgtag

SEQ ID NO: 181084 - DNA, 1368 bp, synthetic construct
  misc_feature 1..1368: note = Description of Artificial Sequence: Synthetic coding sequence
  source 1..1368: mol_type = other DNA
atgcgggccagcctgggcgtgtgcggcaccgccagcagcatggtgattgtgtatgtggaggacattaacgatgaagcacctgttttcacgcagcagcagtacagccgcttgggcctgagagagacagccggaattgggacatccgtaatcgtagtgcaggccactgatcgggattcaggagacggtgggctggtcaattacagaattctgagtggggccgaagggaaatttgaaatagatgaatccacaggcctcatcatcaccgtaaattatctagattacgagaccaagacgtcctatatgatgaacgtttcagccacggatcaggcccccccattcaaccagggattttgcagcgtatacattactcttcttaacgagcttgacgaggcagtgcagtttagtaacgccagctatgaggccgccatacttgagaatctggccttgggcacagaaatcgttcgggtgcaagcttactctattgacaatctcaatcagatcacataccgcttcaacgcatacacaagcacgcaggctaaagccctgttcaagatagacgccataactggggtaatcaccgttcaggggctagttgatcgcgagaaaggggatttttataccctgaccgtggtggccgacgatggcggtccaaaggtggatagcaccgttgtctacattactgttttggatgaaaatgataatagccctagatttgacttcacttccgactccgcagtgtcaatccctgaggactgtcccgtgggccaacgagtcgctacagtgaaggcttgggatcctgacgcgggcagtaacggccaggtggtgttctcactggcatccgggaatatcgccggggcctttgagatcgtcaccacaaatgatagcattggagaagtgttcgttgcgagaccgttggacagggaggagcttgaccactatattttgcaggttgttgcctctgacagaggaacccctccccgaaagaaagaccatattctgcaggtgactatcctcgacattaatgacaatccaccggtcattgaaagtccttttggctacaacgtgagcgttaacgaaaacgtcgggggaggcacagccgtggtgcaggttagagcgactgaccgcgacattggaatcaactctgtgctgtcctactatatcacggaaggtaacaaagacatggcctttagaatggaccggatttctggagagattgctacccggcctgcaccacctgatcgcgagaggcaatcattttaccacttagtggctacagttgaagacgaagggacacccaccctaagcgtgagcgatggtgggggccatcgcgaggagcgcgtgggtcaagggtcatccgcctctgaatag

SEQ ID NO: 181085 - DNA, 1593 bp, synthetic construct
  misc_feature 1..1593: note = Description of Artificial Sequence: Synthetic coding sequence
  source 1..1593: mol_type = other DNA
atgggccggcacgtggccaccagctgccacgtggcctggctgctggtgttgatttcaggttgttggggccaggttaaccgtcttccctttttcacgaatcatttctttgacacatacctgctgatcagcgaggacacacccgtgggctctagcgtgacccagttgttagcacaggatatggacaacgacccactggtgtttggcgtttctggggaggaggcctcaagattctttgcagtggaaccagatacaggcgttgtttggctcagacagcctctggatcgagagactaagtccgagttcaccgtagagtttagtgtgagcgaccaccagggcgtgatcactagaaaggtcaatatccaggttggcgatgttaacgacaatgcccccacctttcacaatcagccttattccgtaagaatcccagagaatacacctgtcgggactccaatctttattgtcaacgccactgatccagacctgggggcaggcggctccgttctgtatagttttcagcccccatcccaatttttcgcgatcgatagcgcgagaggcatagtcactgtcatccgagagctcgattacgagactacccaggcttatcaactgacagtcaacgcaacagaccaagataagactcggccactctctactctcgctaatctcgccatcatcattaccgacgtacaggacatggaccctatctttattaacctgccctacagcactaacatctacgagcatagcccccctggtacgaccgtgcgcattatcacagcgatcgaccaggacaagggcagacctaggggtatcgggtatacaatcgtaagcgggaatactaatagtatatttgctttggactatatctcgggggtgctgaccctcaatggtcttcttgatcgcgagaatccactgtactctcacggtttcatcttgacagtgaagggcaccgagcttaacgatgatcgaactccctcagatgccaccgtgaccactactttcaatattttggtcatagacatcaacgataacgctcccgaatttaacagtagcgaatattctgtcgccattacggaactggcgcaggtcgggttcgcccttcccctgtttatccaggtagtggataaggacgagaatctggggttaaattctatgttcgaggtctatcttgtaggcaataactctcaccatttcattatcagcccaacaagtgtacaggggaaagcagacattagaattagagttgcaattcctctcgattatgaaaccgtggatcgatatgacttcgatctttttgccaacgaaagtgtgcccgatcacgtgggctacgccaaagttaagataacccttatcaatgaaaatgacaaccgacctattttcagccagcccctgtataatataagcctctacgaaaacgtaacagtcgggacgtcagtgttgactgtgcttgtttcacccaggttcacagctggccctctgagcagccccgggccaacagtggttcgccatccggaaggattttgccctagagacttatccaatcaagggcgtagacacccccagattcccgagttatgtctacttgtctactag

SEQ ID NO: 181086 - DNA, 3639 bp, synthetic construct
  misc_feature 1..3639: note = Description of Artificial Sequence: Synthetic coding sequence
  source 1..3639: mol_type = other DNA
atgggccggcacgtggccaccagctgccacgtggcctggctgctggttttaattagtggctgctggggacaggtcaacaggttacccttcttcaccaaccactttttcgacacgtatctactgatcagcgaggacaccccggtgggctcatccgttacacagctgctcgcccaagatatggataacgatccactcgtgttcggcgtgtcgggcgaggaagcaagccgcttttttgccgttgagcctgacactggggtggtgtggctgagacagcccctggacagagaaactaaaagcgaattcaccgtggagttctctgtcagtgatcatcagggcgtcattacccgaaaagtcaatatccaggtgggcgatgtaaatgataatgcgccgaccttccataatcagccatactccgtgcgtattccagagaatacgcctgtcggcacgcccattttcatagtgaacgctaccgacccggacctgggggcgggagggtccgttctctatagctttcagccgccctctcagttttttgcaatagatagcgcacgtggcatagttaccgtcatacgcgagcttgactacgagacaacccaggcctaccaactgactgtgaacgctaccgatcaggataagactcgcccgctctcgacactggcaaacctagctatcatcatcaccgatgtgcaggatatggatcccatattcataaacctgccatacagcacaaatatctatgagcactctccacccgggaccaccgttagaattataaccgccattgatcaggacaagggtcggccaaggggaataggctatacaatagttagtgggaatacaaactcaatcttcgccttagactatatttcaggggtcctaacattgaacgggttattggaccgcgagaatcccctgtattcccacggctttatcctcacggtcaaggggactgagctgaacgacgatcgaacacccagcgacgccaccgtcaccacaactttcaacattctggtgatagatataaatgacaatgcacccgagtttaactccagcgagtactctgtggcgattactgaacttgcccaggtgggtttcgcactaccactattcattcaggtagtggataaggatgagacacaaggcctgaactcaatgtttgaggtgtacctggtcggcaataactcacatcactttataatctcccccacatccgtgcaaggcaaagctgatattaggatccgggtcgccataccacttgattacgagaccgtcgatagatacgactttgatctctttgctaacgaaagtgtccccgaccatgttggttacgcaaaggttaagattacgctgataaatgagaacgataacaggccaatattttcccagcctctgtacaatatctccctgtacgagaacgttactgtgggtacttccgtactgactgtgcttgccacagacaacgacgcaggaacttttggcgaggtctcctatttcttctccgacgaccccgaccggttttcccttgataaggacacgggactgattatgcttatcgcccgcctggattacgaacttatccagaggttcacactcactatcatagcaagggatggcgggggtgaggaaacaactggacgcgtccgaatcaatgtgctcgacgttaatgataacgttcccaccttccagaaggatgcatatgtgggggccttgcgtgaaaatgagccctctgtgacgcagctggtgcgcctgagagccactgacgaggacagcccgccgaataaccagatcacttacagcatcgtctctgccagcgcttttggctcctattttgacatctctctatacgagggttatggggtaatctcagtgtctagaccactggactacgagcagatctccaacggactcatctacctgaccgtgatggccatggatgccgggaatcctcccctgaattctacggtgcccgttacgattgaagtgttcgatgagaacgacaatcctcctactttttctaagcccgcctatttcgtgagcgtcgtcgaaaatatcatggccggggctaccgtgctttttctgaatgccactgacctggacaggtccagagagtatgggcaagaaagcattatctactctctggagggctcaacgcagttccggatcaacgccaggtccggtgagatcactaccacaagcctgcttgaccgggagaccaaatctgagtacattctgatagtacgggcagtagacggaggagttggacacaatcagaagaccgggattgccacagtaaatattaccctattagatattaacgataatcatcctacttggaaagacgccccatactatattaacctcgtggaaatgacgccgccggattccgacgtcactacggtggtggcagtggatcccgacctgggtgaaaacggcaccctcgtatacagcattcagccacccaacaaattctattctcttaactcaaccactggtaagatcaggactacacacgcaatgctggatcgggagaaccctgaccctcatgaggccgaactcatgcgtaagatcgtggtgagcgtaaccgattgcggtcgtcctcctctgaaagccaccagttcagccacagttttcgtgaacttgttagacctgaatgacaatgaccccaccttccagaatctgccatttgtggccgaggttcttgaaggaatccctgcaggggtgtctatctaccaagttgtcgccatcgacttggacgagggactgaatggattagtgagctatagaatgccagtgggcatgccgcgtatggattttttaatcaactcttccagcggcgtcgtcgtgaccactactgagcttgaccgagagagaatcgctgaatatcagctccgggttgtggcgtccgatgctggcactccgaccaaaagctctaccagtactctgacaatccacgttctggatgtgaacgacgaaactcctacattcttcccggctgtgtacaatgtcagcgtgtcagaagacgttccacgggaattccgggtcgtatggttgaactgtacagataatgacgtgggcctgaatgctgagctgtcttattttattactggtgggaatgtagacgggaagttcagcgtaggttatcgcgacgccgtggtgcgtacagtcgtaggcttggacagagagaccactgccgcttacatgctgatcctggaagccatcgataacggacccgtcgggaaaaggcacaccggaacagcaactgtgtttgtgacagtattggacgtgaacgataaccggcctattttcctccagtcttcctacgaggcctctgtccccgaagacatccccgaaggacacagcatcctgcaggaggaagaccttgctagcccctgcattagcccggcaccccctagacgcgcctttcagtctagcggggaaaaggagacaagccagtttcccgggaaagagctccggagggagccgggaccgtccaaggcgcagaatagagctgcctttaccgaaccactcgctgaggctcctttattggggagtaaacaggctcaggaggaaagagctccactcccaagagagcaggcacagcagctccagggaagcgaaggggagaaggggggcccatag

SEQ ID NO: 181087 - DNA, 1593 bp, synthetic construct
  misc_feature 1..1593: note = Description of Artificial Sequence: Synthetic coding sequence
  source 1..1593: mol_type = other DNA
atgggccggcacgtggccaccagctgccacgtggcctggctgctggtgctgatatcagggtgctggggtcaggtcaacaggttgcccttcttcaccaatcactttttcgatacctacctgctgattagcgaggacactcctgtcggatcctcagtgacccagctcctggcccaggatatggacaacgacccactcgtctttggcgtgagcggcgaggaagccagcagattttttgcggtggaacctgataccggagtggtgtggctgcgtcagcctttggatcgcgagaccaagagcgaatttactgtcgagttctcagtgtcggatcatcaaggtgtcattacaaggaaagtaaacatacaggtgggcgacgtgaacgataatgcccctacttttcataaccagccttactctgtacggattcccgaaaacacacccgtcggaacacctatcttcattgtcaatgccacagatccggacctgggtgctgggggcagtgtgctttattcatttcagccgcccagccaattcttcgctatcgactccgcgcgaggaatcgtgaccgttatcagggaattagattatgagacgacgcaagcgtaccagctgaccgtaaacgcaactgaccaagataaaacccgccctctcagtacattggctaatttggccatcatcataactgatgtccaggatatggatcccatatttatcaaccttccgtactctactaacatatacgaacattcgccacctgggaccactgtgaggatcatcaccgcgatagaccaagacaaaggaagaccacgtggtattggttataccatagtgagcggaaataccaattctatcttcgctctagattacatttcaggggttttgacgcttaacggcctcctggatcgggagaatcccctctactctcacggtttcatcctgactgttaaagggacggagctcaacgacgaccgaacaccctccgacgccaccgtgactactacttttaacattctcgtgatcgatattaacgacaacgcccctgaattcaattcctctgagtattccgtggctataacagagctagcccaagtgggctttgccctacccctcttcatccaggtggttgacaaggatgagacttggggcctgaacagtatgttcgaagtgtatcttgtcgggaataatagccatcatttcataatttccccaacctccgtgcagggcaaggccgatatccgaatcagagttgcgatcccactggactacgagacagtcgatcgctatgattttgacctctttgccaacgaatcagttcctgatcacgttggctacgccaaagtcaagatcactctgattaacgagaacgacaacagacctatctttagccagcccctctataatatcagcctgtacgagaatgtgaccgtggggacaagtgtcctgaccgttctggtgtcaccgcggttcacagccggtcctctcagcagcccaggtcccactgtggtgagacacccagaggggttctgtcctcgggatctgtctaaccaaggaagaagacacccccagataccagaactctgcttactcgtgtattag

SEQ ID NO: 181088 - DNA, 9960 bp, synthetic construct
  misc_feature 1..9960: note = Description of Artificial Sequence: Synthetic coding sequence
  source 1..9960: mol_type = other DNA
atgggccggcacgtggccaccagctgccacgtggcctggctgctggttctgatctctggctgctggggtcaggtcaaccggctgccattcttcacaaatcactttttcgatacatacctcttgatcagtgaggatacacccgtcggctccagcgtgacccagttgctggcacaggatatggataatgacccactggtgttcggagtgtctggtgaggaagctagcagattcttcgctgtcgagcccgacaccggagtagtttggctgaggcagcctctcgatagagaaaccaagagtgagttcaccgtagagttttccgtgtccgatcatcagggagtgatcactagaaaggttaatatccaggtgggcgatgtgaatgacaacgcgcctactttccacaaccagccatatagcgttcgcattcctgagaatacacccgtcggtacccccatattcatcgttaatgctaccgatccggaccttggcgccggaggtagtgtgttatatagcttccagcccccaagccaatttttcgccatagattcggctcgtggaattgtgacagtgatccgagaactcgattatgagaccacgcaggcctaccagttgactgtaaacgcaacggatcaggacaagactcggccactaagtaccctcgctaatcttgccatcatcattaccgacgtgcaggatatggaccctatcttcatcaacctgccatattcgacgaatatctatgagcacagcccccctgggacaactgtgcgcattattaccgccattgatcaggacaaagggcgaccgcgaggaatcggttatacaatcgtgtccggtaataccaatagcatcttcgctctggattacatatctggggtgctcactcttaatggtctgctagacagggaaaatcccttgtactcccacgggttcatcctaactgtgaagggaacagaattgaatgacgatcgaaccccatcagacgctaccgttactacaacctttaacatcctagtaatcgatatcaatgataatgcacctgagtttaactcctctgaatactccgttgccatcacagagctcgctcaggtcgggtttgccttaccactgttcatacaggtggtggataaagacgagacccaggggctaaacagcatgtttgaagtctacctcgtcggcaacaacagccaccatttcattatatcacccacatcagttcaaggtaaagctgatatccgtatcagggttgccattccccttgattatgagaccgtcgatcgctacgactttgacctctttgccaacgaaagcgttcctgatcatgtcggctatgctaaggtcaagatcacactcattaacgaaaatgacaaccggcctatcttctcccaaccactgtacaacatctccttgtacgagaacgtgaccgtggggacatcagttctgactgtccttgccaccgacaatgacgccggtacctttggggaagtgagctactttttttcagacgatcccgacaggttcagtctcgataaagatacgggactaattatgctcatcgcaaggttagattatgaattgatacagagattcaccttaacaataattgccagggacgggggaggcgaggaaacaaccggacgtgtgagaataaatgtgctggatgtcaacgataacgtgccaacctttcagaaagatgcctatgtcggtgctttgagagagaacgagcctagcgtgacacagctggtgagattgcgcgcaaccgacgaagattcccccccgaacaatcagatcacatattccatcgtgtccgcctccgcattcggatcatatttcgatatcagcctctacgagggctacggagtgatctctgtttctagacctctcgattatgagcagattagtaatggactgatctacttgacagtgatggctatggacgccggtaacccacccctgaatagcactgtccccgtgacgattgaagtctttgacgagaacgataaccctccaacttttagtaagcccgcttatttcgtttcagtggtcgagaatatcatggcaggggctacggtactgttcctcaatgctacggacctggatcgttcaagagaatacgggcaagagtctataatatacagcttagaggggtctacccagtttagaattaacgcaagatcaggtgaaataacaactactagtctgctggatagggaaacaaagtccgaatacatacttattgtgagggctgtggacggcggcgtgggtcacaaccagaagacaggaatagcaaccgtaaatatcacattgttggacatcaatgataaccatcctacctggaaggatgctccctactacattaacctggtggagatgaccccacctgacagcgatgtgaccacagtggttgccgtggatccagacctgggggagaacggtacactggtgtatagcatacaaccgccaaataagttctactccctgaacagcacgacaggtaaaatccgtactactcacgcgatgctggatagggaaaaccccgatccccacgaggcggaactaatgcgcaagatcgttgtgagcgtcacagattgcgggagaccacccctcaaagctaccagctctgctaccgtgtttgtaaaccttctggacctgaacgacaacgaccccaccttccagaatttgccattcgtggctgaggtactggaaggtatcccagccggcgttagcatctaccaggttgttgcaatagatctggacgaagggctcaatggcctggtctcatatcgaatgccggtgggtatgccacgcatggattttctcattaacagctccagcggagtggtggtgacaactacggaacttgatagagaacgtatcgctgaataccaactccgggtggtggcctccgatgcgggcaccccgactaaaagcagcacaagtactctcactatccacgttcttgatgttaacgacgaaacgccaactttctttcccgcggtgtacaatgtgtccgtgtccgaggacgttccgcgggagtttcgagtggtttggctgaactgcaccgataatgacgtaggccttaacgccgagctatcatattttattactggaggtaacgtggacggaaaattttcagtcggatatcgtgacgccgtcgttcgtacagtggttggccttgaccgtgagacaaccgcagcctatatgctgatacttgaggctattgacaacggcccagtgggaaagcgccatacaggtaccgccactgtctttgtaaccgtcctagatgtcaacgacaacagaccaatcttcctccagagctcctatgaggcatctgtgccagaggatatccctgagggccattcgatattacagctgaaagctacggacgccgacgagggagagtttgggagggtgtggtatcgaatcctacatggcaatcacggcaataacttccggatccatgtgtcaaatggcctgctgatgcggggccctcgcccactcgaccgggaacgaaattctagccatgtactcattgtcgaagcttacaaccatgacctgggacctatgcgtagtagcgttcgggtcattgtgtacgtagaggatatcaacgatgaggcccctgtgttcactcagcagcaatactcacggctggggctgagggaaacagctgggatcggaacctcagtgatcgtggtgcaagccactgaccgggacagcggcgacggtggactggtgaattatagaatattgtctggtgctgaagggaagtttgaaatcgacgagagcactggcctgattataaccgtgaactacctggattacgagaccaagacatcctacatgatgaatgtctcagctacagaccaagccccacctttcaaccaggggttctgtagcgtctacatcacacttttaaatgagctcgacgaagccgtccagttctccaatgcaagttatgaggcagcaattctggaaaatctggcgctcggtacagaaatcgttcgagtccaggcatactccattgataaccttaaccagattacctaccggtttaacgcctacaccagcacccaggccaaagccctattcaagattgacgccatcacgggagtgatcactgtgcagggtctcgttgatcgggagaagggagacttctacaccctgacagtggtggctgacgacggcggtccaaaggtagattctaccgtgcaagtgtatataactgtcctcgacgagaatgacaattcaccacgcttcgactttacatctgatagcgcagtttccatacccgaagactgccccgtcggacaacgggtcgctaccgtcaaggcttgggacccggacgccggctccaacggccaggttgtatttagtctggcctctggtaacatcgcaggggctttcgagattgttacaaccaatgactccatcggcgaagttttcgtggccagacctctggatcgtgaagaactggaccattacatcctgcaggtcgtagcctccgacagaggcactcctccccggaaaaaagatcacatcctccaagtcaccatcctagacattaacgacaatccgcccgtaatcgagtcaccattcggctacaatgtgtcagtgaacgagaatgtaggtgggggcacagctgtggtgcaggtccgcgccactgacagggatattgggattaacagcgtcctctcttactatattactgaggggaataaagatatggccttccgaatggaccgtattagtggggaaatcgcaactcgcccagctcctcctgacagggaacgacagagtttctaccacctggtggccaccgtggaggacgagggaactcccactctcagcgcgaccactcatgtatatgtgactatcgtcgatgagaatgataatgcgcctatgttccagcagccccattacgaagtgctgctggatgaaggtcccgacaccttaaatacatccctgataacaatccaggctcttgatctggacgagggcccgaatggcacggtcacatacgctatcgtggccggcaatatcgtcaacacatttagaattgaccgacacatgggggtgattaccgccgcgaaggagctcgattacgaaatttcacacggcaggtatacgcttatcgtaaccgcaactgatcagtgccccatcctcagccaccgtctgacctccaccactaccgttcttgtgaatgtcaatgacattaacgataatgtgcccacatttccgcgagattatgagggacccttcgaggtcactgaaggacagcccggaccacgcgtctggacattcttagcccatgaccgcgattccggaccaaatgggcaagttgagtacagcataatggatggagaccctctgggcgagtttgtcatcagccccgtggagggcgtgctgagagtcaggaaggacgtcgagcttgatcgggagacaattgcattctataatttgacaatctgtgcaagagatagaggcatgccccctctctcttcaaccatgctcgtaggtatcagggtcttggatatcaacgacaacgatcccgtgcttttgaacctcccaatgaacatcacaatcagcgaaaattccccagtctcttcctttgtggcccacgtactggcatcggatgccgattccggttgtaatgctcgcctaacattcaacatcactgctggtaatcgagagcgcgccttcttcatcaatgctacaacaggaattgtcactgtgaaccgcccgctcgatcgtgagagaattcctgagtataaactaacgatttccgtcaaagataatcccgagaatccccgcattgctcgtagggactacgatctactcctgatcttcctaagtgatgagaacgataaccatccgctgttcaccaaaagcacttaccaggccgaagttatggaaaacagtcctgctggcacaccacttactgttctgaacggaccgatcctggcactggacgccgaccaggacatctacgctgtcgtgacatatcagctcctcggggcacagtccggactcttcgatataaacagcagcacaggtgtcgtgaccgtgcggtccggggttataattgaccgcgaggcattttcacccccaatactggagttgctgctgttggcggaggacattgggctgctgaatagtactgcccatctgctgatcacaattttggacgacaacgacaaccgcccaaccttctctccagccaccttgaccgtccatcttctcgagaattgtcctcctggcttttctgtccttcaggtgaccgcaaccgacgaggatagcggtctgaatggagaattggtgtacaggatcgaagccggggcgcaggatcgctttctcatccatcttgttacaggggtgattagggtgggaaatgccacaattgatagagaggaacaggaaagttacaggctgacagtggtcgccactgacaggggcacggtcccgttgagtggtaccgccatcgtaaccatccttatcgacgacatcaacgatagtcggccggagtttctgaatcccatccaaacagtcagtgtgcttgagtcagccgaaccgggaactgtcattgccaatatcactgccattgatcatgacctgaacccaaagctggaatatcacatcgtaggaatagtggctaaagacgatacagacagacttgttccaaaccaggaagatgcctttgcagttaatatcaatactggaagcgtgatggtgaaaagccccatgaacagggaactggtagccacttatgaagtgacactatctgtcatcgataatgcctccgacctgcctgagaggtcagtctccgtgccgaatgccaaattgacagttaacgttttagacgtgaacgataatacgccacaatttaagccgttcggaatcacgtactatatggaacggattttagagggtgctacaccaggaactactctcatcgcggtggccgccgttgatccggataagggtctcaacgggttggtcacatatactctgctggatctagtaccccctgggtacgttcagctcgaggatagttcggctggaaaagtcattgcaaatcggacagtcgattacgaggaggttcactggctcaatttcaccgtcagggcatcagacaatgggtccccccctcgggcagctgaaatacccgtgtatcttgaaatagttgatattaatgataacaaccctatctttgaccaaccttcttatcaagaagccgtgttcgaagatgtccccgtggggacaatcatcctgactgtaactgcgacagacgctgactctggcaacttcgccctgatcgagtactctctcggtgatggagaatccaaatttgctattaaccctactacaggggatatctatgtgttgagtagcctcgacagggagaagaaggatcactacatcctcaccgctctggccaaagacaacccgggcgacgtcgcaagtaaccggcgggagaactccgtccaggtagtaatccaggtgctggacgtcaacgattgtaggccccaattctcaaaaccacagtttagcaccagtgtgtacgagaacgaacctgctgggacctcagtgatcaccatgatggctacggatcaggatgaaggccctaacggagaactcacatactctctggagggacccggcgtggaggccttccatgtggacatggattccggactggtgacaactcagcgcccgcttcagagctatgaaaagttcagtctcaccgtggtggcaactgacggtggggagcctccattgtgggggactacaatgctactggtcgaagttatcgatgtaaacgacaataggcccgtgttcgttagacccccaaatggcacaatactgcatattagagaggaaatccccctgcgcagcaatgtgtacgaggtttacgcgaccgacaaagacgaaggcctcaatggagctgtgaggtacagctttctgaagactgcaggtaaccgcgactgggagttttttattatagaccccatcagcggacttattcagaccgcacagcgcctggacagggaatcccaggcagtctactctttgattctggtcgcctccgacttgggccagcccgtgccctatgagacaatgcagcctttgcaggtagcacttgaggatatcgatgataatgaaccactatttgtacgcccacccaagggtagtccgcaatatcagttgttaacggtcccagagcactcccctaggggcactctcgtgggcaacgtgacaggtgcagtggatgcggacgaaggtcccaacgccatcgtatactactttatcgcagcaggaaatgaagagaaaaacttccacctccagcccgatggatgtctcctcgtgctcagggacctggacagagagagggaggccattttcagtttcatcgtgaaggcttcgagcaacagaagctggacaccacccagaggaccttcgccaactctcgatttggtcgctgatctgacattacaagaagtgcgggtggtactagaggatattaacgaccaaccaccaagatttacaaaggccgagtatactgcaggcgtggcaacggatgcgaaagtcggatccgagctgatccaagtacttgccttggatgctgacatcggaaataattcacttgttttttactcaatcctggcaatccactattttagggcacttgctaatgattccgaagacgttggccaggtatttactatggggtccatggatggcattttacgtactttcgacctttttatggcctacagccccggatactttgttgtcgacatcgtggctagggaccttgctggccacaatgacaccgcaatcatcgggatctacatactgcgggatgatcagcgggttaaaatagtgatcaatgagatccccgatagagtgcgtgggtttgaggaggagttcatccacctcctctctaacatcactggggctatagtgaatacagacaatgtgcagttccatgtggataaaaaaggaagagttaattttgctcagacagagctgctgatccatgttgtgaacagggatactaatagaatactcgacgtcgatagggtcatccagatgattgacgaaaacaaagaacaattaaggaatctgttccgcaactacaacgtcctggacgtgcaaccagccatcagtgtcaggctgcccgatgacatgagtgccctgcaaatggctattatcgtgctggctatactcctgttcctggctgctatgctgttcgtgctgatgaactggtactaccggaccgttcataagagaaagctgaaggccatagtggcaggctcagccggaaacagagggttcattgacattatggacatgcctaacactaacaaatactcgtttgacggagccaaccccgtttggctagacccattttgtcgtaaccttgagctggccgcgcaggcagaacatgaagacgaccttccggagaatctgtccgagatagccgacctctggaactcccctaccagaacgcacggtactttcggccgtgagcccgccgccgtgaagccagatgacgatcggtaccttagggctgcaatccaggaatatgacaatatcgcaaaactgggtcagatcattagagagggacctattaagttgatccaaaccgagctcgatgaggagcctggggaccattctcctggccagggttccttgcgatttcgccacaaaccgcctgtggagctgaaaggcccagacggaatacatgtcgtgcatggttctaccgggaccctgctcgccacggatttgaactctctgccagaagaagaccagaaggggctgggccggtcgcttgaaacacttaccgcggctgaagccacagcgttcgagcgaaacgcaaggactgagagcgcaaaatccaccccccttcacaagctgcgcgacgtgatcatggagaccccgcttgaaattaccgaactctag

SEQ ID NO: 181089 - DNA, 10080 bp, synthetic construct
  misc_feature 1..10080: note = Description of Artificial Sequence: Synthetic coding sequence
  source 1..10080: mol_type = other DNA
atgggccggcacgtggccaccagctgccacgtggcctggctgctggttttaatctccggctgttgggggcaggtgaataggcttcctttcttcacaaaccatttttttgatacatacttactgatttcagaggacacaccagtcggttcttccgtcacccaactcctagcacaggatatggacaatgatccgcttgtttttggagtgagcggggaggaagccagcagatttttcgccgttgagcccgacaccggtgtggtctggcttaggcaaccactagatagagaaacgaagagcgagtttactgtggagtttagtgtatctgaccatcaaggggtgattacaagaaaggtgaatatccaggtcggcgatgtgaacgacaacgcaccgacattccacaatcaaccgtattccgtcagaatccctgaggtgggcgcaacgggaaacacaccggtcggcacacccatctttatcgtgaatgcaacagatccagacctgggcgccggaggtagcgtgctgtattctttccaacccccctctcagttcttcgcaatcgattcagctagaggtatagttaccgttatccgcgaactggattatgagacaacccaggcctaccagttaaccgtgaatgcgactgaccaggacaagacccgacctttgtccactctggctaacctggcgatcattatcactgatgtgcaggatatggatcccatcttcataaatctcccttactccaccaatatttatgagcattctcctccaggaacaaccgtacgcattatcaccgctattgaccaggacaaggggagacctcggggcattggttatactatcgtgtcagtcgccggtaacacaaactcaatctttgcgctggactatatatcaggtgtattaacactgaacgggctgttagacagggagaacccattatactcacacggattcatcctgaccgtgaaaggaactgagcttaacgatgaccggacacccagtgatgccacagtgaccacgacgttcaatatcttagtgatcgatattaatgataacgcacctgaattcaattcctctgagtatagtgtggcgattaccgagttggcccaggtgggattcgccctacctctgtttatccaggtcgtggataaggatgaggggctgaacagtatgtttgaggtctacctggtgggcaacaactcccatcactttattatctcccccacctctgtccaaggtaaagctgacatacgcatacgggtcgcaatccctttggattatgagactgtcgaccggtatgatttcgatctgttcgcgaacgagagcgttcctgaccacgttggatatgctaaggtcaagataactctcattaacgagaacgataaccgaccaatttttagtcagccactgtacaacatctcactgtatgaaaacgtcaccgtcggaacaagcgttctgactgttctcgccaccgataacgatgcaggtacttttggcgaagtctcttacttcttctccgatgaccccgaccgcttctcgctggacaaggatacaggcctgattatgcttatcgccaggctggattacgaacttattcagcgatttacactgacgatcatcgctagagacggtgggggtgaagaaacaactggtcgcgttagaataaatgtgctggacgtaaatgataatgtgcctaccttccagaaagatgcttacgtcggggcgctgcgggagaacgagccgtccgtgacccagctggtccgactgcgggcgactgacgaggacagtccaccaaataaccaaattacatatagcattgtgagcgcctctgcatttggatcttatttcgatatatcactttacgagggatacggcgtgatttctgtctccagaccattggactatgaacaaatctctaacggcctgatataccttacggttatggcaatggacgccggcaatcctccccttaacagcaccgtacctgtgacaattgaggttttcgatgaaaatgacaatcccccgacttttagcaaacccgcgtactttgtgtcagtggtagagaacatcatggctggagcaacagttctcttcctgaatgctactgacctggatcggagcagggaatatggtcaggagtcaatcatctacagcctcgagggatctacccagtttagaattaatgcacggagcggtgaaatcaccacaaccagcttgctagatcgggagacaaaaagcgaatacatcctgatcgtccgtgctgtagacggaggagtgggccataaccaaaagaccggtatcgcaacagtcaacattactttgttagatataaacgataatcacccaacgtggaaggatgccccttactacatcaaccttgtagagatgactccccccgatagcgatgtgaccacggtagtggccgtagatccagatctcggcgagaacgggacactcgtctactccatacaacctcccaataaattttactcgctgaactccacgaccggcaagatcagaacaactcacgcgatgctagatcgcgagaacccagacccccatgaagctgagttgatgcgaaaaattgtcgtcagcgtgactgactgcggccggcctcccctgaaagcgacgtcttccgctaccgtcttcgtcaatctgctcgatctgaatgataatgaccccaccttccaaaatctgccctttgtggctgaggtccttgaaggaatcccagccggggtatccatttatcaggtggtagccattgatctggatgagggactgaacggtctcgtttcataccgaatgcctgtgggtatgcctaggatggactttctgatcaactcgtcatctggtgtagtggtcactacaacggaactcgacagggagcggatagccgagtaccagttacgcgtggttgccagtgatgccggcacacctaccaagtctagcacgtctacactgactatacatgtcctggacgtcaacgatgaaacccccacattctttccggccgtatacaacgtgtccgtgagcgaggacgtccctcgtgaattcagagtcgtgtggctcaactgcacagacaacgacgtagggttgaacgctgagctgtcgtacttcatcacaggcggcaacgtcgacggtaagttttctgtggggtacagagacgccgtggtgcggaccgtagtggggttggatagagagacaactgcagcctatatgctgattctagaggcaatcgataatggccctgtgggaaaaagacacactggcacagccactgtctttgtaacagttttggacgtcaacgacaatagacccatcttcttgcagagcagttacgaagctagcgtgcccgaagacatccccgaggggcattcaatcctacagcttaaggctaccgatgcggacgagggcgagtttggacgggtttggtataggatattgcatggcaatcacggaaacaactttaggatccacgtgtccaacggcctccttatgcgagggcctaggccccttgacagagagaggaactctagtcacgtcctgatcgtggaggcttacaaccacgatttaggccctatgagaagctctgtgagggtcattgtatacgtcgaggatataaacgatgaggctccagtattcactcaacaacagtactctcgattgggtcttcgagagactgccggcatcgggactagcgtgatcgtggttcaggcaacggatcgcgattccggcgatggcggtttggtgaattatcgaatccttagtggagctgagggcaagttcgagatcgacgaatccactggcctgatcattacagtgaactatttagactacgagacgaaaactagttacatgatgaatgtcagtgccaccgaccaggcacctccgttcaaccagggattttgtagcgtgtatattaccctgctgaacgaattagatgaagccgtgcaattttccaacgcatcctacgaagcagccatcctggaaaatctcgcccttggaacagaaattgtgagggtccaggcttattctattgacaatcttaaccagatcacctataggtttaatgcatacacatctacccaggccaaggcactgtttaaaatagacgctatcactggcgtgatcaccgtccaaggactagtcgacagagagaagggagatttttacaccttaacagtggtagccgatgatgggggccctaaggtcgattcaactgtgcaagtgtacattacagtgctggatgaaaatgataattccccgcgcttcgattttacatctgactctgccgtctccatccctgaagactgccctgttgggcagagggttgctaccgtgaaagcgtgggaccccgatgccggctccaacggacaagtggtcttttctctggcctcaggtaacatcgctggagcattcgagattgtgaccactaacgactcaatcggggaggtgttcgtagcacgtcccctggacagggaggagctagaccactatattctgcaagttgtggcttccgatcgcggcacccctccccgtaagaaagatcacattctgcaggtgacaattctggacattaacgacaatccccccgtgattgaatctcctttcggctacaatgtgtctgtaaacgagaacgtaggaggtggcaccgccgtggtccaggttagagcgacagatcgagacatcggcattaactcagtcctgtcctactatatcacagaaggtaacaaggacatggcatttcgcatggataggatttcaggcgagatcgccactaggccagcccccccagacagggagcgacagtcattttaccacctggtggcgactgtggaagatgaaggaaccccgactctgagtgccaccacccacgtgtacgtcacaatagtggatgagaatgacaacgcacctatgttccaacaacctcattatgaagtgctcttggacgaaggccctgatactttaaatactagcctaatcaccatccaagccctggacttggatgagggccccaacggcacagtcacctacgcaattgtggctggcaacattgtaaatacttttcgaatcgatcggcatatgggtgtgataaccgctgccaaagaactggactacgagatatcgcacgggcgttataccctcattgtgaccgctactgaccaatgccctatcctgtcccataggctgacatccactacgaccgtgctggttaatgtgaacgatattaacgacaatgtgcccacatttccccgagattatgagggaccattcgaagtgaccgaaggtcagcctggtccccgcgtgtggacattcttggcacatgacagagatagcgggccaaacgggcaggtggaatattcaatcatggatggcgacccactgggcgagtttgtcatttctcccgtcgagggggttcttagggtcaggaaagatgtggaactcgatagggaaacaattgctttctataatttaaccatctgcgccagggataggggaatgccacccctgtccagcactatgctcgtggggattagggtccttgacatcaatgacaatgatccagtgttgctgaaccttccgatgaacattactatctccgaaaattcaccggtgagctcttttgtggcgcatgtgctcgcctcagacgctgactctggctgtaacgctcgattgactttcaatattactgcggggaaccgcgagcgggcattttttataaacgctacaactggcatcgtgacagtgaacagacctctggatcgagagcggataccagagtacaagttgaccatttcagttaaagacaacccagaaaatcctagaatagccagacgggattacgaccttctgctcatttttctctctgatgagaatgataaccatcccctgttcaccaagtctacatatcaagcagaagtgatggaaaacagtcccgctggaacccctctgactgtcctcaatgggcccattctggcgctggatgctgaccaggacatctatgcagtggtgacctaccagctgctgggagcacagtcaggtcttttcgatatcaatagctctactggagtggttacagtacgttctggcgtgatcattgatcgggaggcattctcaccaccaattctggagctgctcctgctggcagaggacatcgggctcctgaatagcactgcgcacctgctgatcaccattctggacgataatgacaaccggcccacctttagtcctgccacgttaacagttcacttgctcgagaattgtccccccgggttctcagtcctgcaagtcactgcaaccgatgaggattccggactaaatggggaactggtttatcggatagaagccggcgcccaggatagattcctgattcacctcgtgacgggtgtgatccgcgtggggaacgccaccatcgaccgcgaggagcaggagtcttataggcttacagtggtggcaactgatcgtggtaccgtgcccctgtccgggaccgcaattgtgaccatcttgatcgacgacataaatgattcccggccagaatttctgaatccgatacaaacggtatctgtgctggagagcgctgagcctggtaccgttattgccaacataaccgctattgatcacgatctgaacccaaagcttgagtaccatattgtgggcatcgtggctaaagacgacacagaccgcttggtgccaaatcaggaagacgcttttgctgtgaatatcaatactggaagcgtcatggtaaaatctcctatgaaccgcgagctcgtggccacctacgaggtaacactgagcgtgatcgacaacgcctccgacctaccagagcgcagtgtgtcggtgcctaacgccaagttgacagtcaacgtactggatgtgaacgacaatactccacaattcaagcctttcggcatcacctactatatggagagaatccttgagggggctaccccaggcactactctgattgcagtcgctgctgtggatccggataaggggcttaacggactggtgacatatacccttctggacctcgtccccccgggttacgtacagctggaagacagctccgccgggaaggttatcgcaaataggaccgtggattacgaggaagtccattggctcaacttcacggtaagggcctcagacaatgggtctccccccagggccgcagagattccagtctacctggagatagtggacattaatgataataatcccattttcgatcaaccgtcctaccaggaggccgtgttcgaggacgtccctgtgggaactattatcctgacggtgacggccactgatgcggactccggtaatttcgccttaatcgaatatagtctaggggacggagagagcaagttcgccattaaccccaccactggggatatttacgtgctatcctccctcgaccgagaaaagaaagatcactacatactgacagccctcgccaaagacaatccgggtgacgtcgctagcaaccgaagggagaatagcgtgcaggtggtaattcaagtgctggacgtgaatgattgtaggcctcagttctctaaaccacagtttagcaccagtgtatacgagaacgaacctgccggaacatccgtgattaccatgatggctacggatcaggacgagggtcctaacggcgagttgacttacagcctggaaggacccggggtcgaagcctttcatgtcgacatggatagtggtctcgtgaccacccagcgcccactgcagtcctatgagaaatttagcctaaccgtcgtggccaccgatggaggagagccacccctctggggcaccaccatgctgttggtggaagtaatagatgtgaacgataatcgccccgtgtttgtccgacctccaaatggaaccatactccacatccgagaggaaatacctctgcggtccaatgtgtatgaagtgtatgcgacagacaaagacgaagggctcaatggcgcagtcaggtactcgtttctgaaaactgccggaaaccgagactgggaatttttcatcattgacccaatctctggtttaattcagacagctcagagattggaccgggaaagtcaggctgtctacagcctgattttagtagcatctgaccttggtcagcccgtgccatacgaaacaatgcaaccgctgcaagttgctttggaggatatagacgacaatgagcccctgtttgtgcgccctcccaagggaagtcctcaatatcagcttctcactgtgccagagcacagccccagagggacgctggtgggcaacgtcacaggcgccgtggatgcggatgagggccccaacgccatcgtttattatttcattgccgctgggaatgaagagaaaaacttccacctgcagcccgatgggtgtcttcttgtactgagggacctcgaccgtgaaagggaggccatcttcagttttatcgtcaaagcgagcagcaataggagctggacacccccacgcgggccctctccgacactagacctcgtcgccgacttgactttgcaagaagttcgcgttgtgctggaagacattaacgaccagcccccgaggttcactaaggctgagtatactgccggcgtcgctacggatgctaaggtaggatccgaattgatccaggtcctcgctttggacgccgatattgggaataattcactggtgttttactccatcctggctatacactacttccgagcactcgccaacgacagcgaagacgttgggcaggtatttactatgggtagcatggacggcatcctccgaacgtttgacctgttcatggcttactctcccggttatttcgtcgtcgatattgtagctagagatctagcgggccataacgacaccgccatcatcgggatctacatcctgagggacgaccagagagtgaaaatcgtcataaacgaaattccagaccgggtgagggggttcgaggaagagttcatacatctcctgagtaacattacaggcgccatcgtcaacacggacaacgttcagttccacgtagacaagaaaggacgggtcaactttgcacagactgaactgttgattcacgtcgttaaccgggacactaacagaattttagacgtagacagggtgatccagatgatagacgaaaataaggagcaactgagaaatctattcaggaactataatgtacttgacgtccagccagccattagcgtccggcttcccgacgacatgtctgctctgcaaatggccatcattgtcctggccattctcttgttcctggctgcaatgctctttgtcctgatgaattggtactacagaacagtgcataagagaaagttgaaagcgatcgtcgcgggatcagctggtaatcgggggttcattgacattatggatatgcctaatactaataaatactcctttgatggagcaaacccagtctggctggacccgttctgtcgcaacctggaactagcagcccaggccgaacacgaagacgaccttcctgaaaacttgtccgaaatagcggacttatggaactcacccaccaggacacatggcacatttggacgcgaacctgctgccgtgaaacccgatgacgaccggtacctgcgcgccgctatccaggagtatgacaatattgcaaaactaggccagatcattcgagagggcccgatcaagggatcgttactaaaggtggttctggaggattacctcagactcaaaaagctcttcgcccagaggatggtgcagaaggcaagcagctgtcattcctctatttccgagttgatccagacagaattagacgaagaacccggtgaccactctccagggcagggcagcctccggtttcgtcacaaaccaccagtggaattgaaggggcccgatgggatacacgtggtgcacggtagtacagggactttacttgctactgacctcaattctctgccagaagaagaccagaagggactgggcaggtctttagagacactgacagctgccgaagccacagctttcgagcgaaatgcgcgaactgagagcgccaagtccactcccctgcataagctgcgggacgtgatcatggagaccccactggagatcacagagctatag

SEQ ID NO: 181090 - DNA, 1338 bp, synthetic construct
  misc_feature 1..1338: note = Description of Artificial Sequence: Synthetic coding sequence
  source 1..1338: mol_type = other DNA
atggacaacgaccccctggtgttcggcgtgagcggcgaggaggccagccgattctttgccgtggagccggataccggcgtggtgtggctgcggcagcccctcgatagggagacaaaaagtgagttcaccgtagaattcagcgttagtgatcatcagggggtcattacaaggaaggttaacattcaggtcggagacgtcaacgacaacgctcctacgttccacaaccagccttacagcgtgaggatccccgagaacactcctgtaggaacaccaatatttatcgtcaacgcaacagatcccgacttgggtgccggagggagcgtgctctattccttccagcccccatcacaattttttgccattgactccgcgagaggaattgtgacagtcataagggaattagactacgagacgacacaggcctatcagttaacagtcaatgcactggccattatcatcacaaatctgccctatagcactaacatctatgaacatagcccgccaggcacaaccgttagaatcataacagcgattgatcaagataaagggcggccaaggggaataggatataccatagtgtctggaaatacaaactctatttttgcgttggattacatctcaggtgtgctcactcttaatggcctcctggacagggagaatccactgtacagtcacggcttcattttaaccgtcaagggtacagagctgaacgacgaccgcactccaagtgatgctacagtgactacaacatttaatatcttggtgatcgacatcaatgacaacgctcctgagtttaacagctcagagtactctgtggctataactgaacttgcgcaggtaggattcgcccttccgcttttcattcaggtggtggataaggacgagggccttaacagcatgttcgaggtgtacctcgtcggcaacaactctcatcacttcatcatctcccccaccagcgtccagggtaaggcagacattagaataagggtggctatcccgctcgactacgaaacggtggacaggtacgactttgacctcttcgcaaatgaaagcgtgcctgatcatgtagggtatgctaaagtgaagattaccctgattaatgagaatgacaaccgacccattttctcgcagccgctgtataatatatctctttacgaaaacgtgactgttgggacctctgtccttacggtgttggtttccccccgcttcacagctggtccactcagctcacccggaccaacagtagttcgccacccggagggcttctgtcctcgggacctatccaatcaggggaggagacacccacagatccctgagctatgtttgctggtgtattag

SEQ ID NO: 181091 - DNA, 2187 bp, synthetic construct
  misc_feature 1..2187: note = Description of Artificial Sequence: Synthetic coding sequence
  source 1..2187: mol_type = other DNA
gccaccgacaacgacgccggcaccttcggcgaggtgagctacttcttttctgacgacccagacagattctcgcttgataaagacactgggttgattatgctgatcgccaggctggactacgagctgatacaaagattcaccctcaccataatcgcacgcgacgggggcggcgaagagaccacaggtcgcgtgaggataaacgtgctggatgttaatgataatgtgcccacattccagaaggacgcttatgtgggcgcccttcgcgaaaatgagccctctgttactcagctggtcaggttaagagccacggacgaggactctccgcctaataatcagatcacatactctatcgtctccgcttccgcttttggatcctacttcgacatcagcctttacgaaggctacggggtgatttccgtctcgcggcctctagattacgaacagatcagcaatggtctcatctacctcactgtaatggctatggacgccggcaacccccctctcaacagcaccgtgcctgtcactattgaggttttcgatgagaacgataatccgccaacattttcgaagcccgcctatttcgtgtccgtggtagaaaatattatggccggcgcaaccgtgctgtttcttaacgccaccgacttagaccggtctagggagtatggccaggagagcattatctattcacttgagggcagcacccagttcaggattaacgctcgatcaggggaaattaccaccacatcactcctcgatcgggagacaaagtccgaatacatactgatcgtgagagctgtggacggcggggtgggccataatcagaaaacagggatcgcgacagtgaatattacgttgctcgatatcaatgataatcacccgacctggaaggacgctccatactatattaacctggttgagatgacgcctccggactcggacgtgacgactgtcgtggccgtggatcctgacctgggagagaacggcacactcgtgtactccattcagcccccaaataagttctattccctcaacagtaccaccgggaagatccgtacaacccacgccatgctcgaccgtgagaacccagacccgcacgaagcagagctcatgcggaagattgtggtgagcgtcacagattgcggcaggccccccttgaaagccacttctagtgccaccgtgtttgtgaacctgctggatctgaatgataacgaccctacttttcaaaatctgcctttcgtcgctgaagtgctggagggtataccggctggtgtaagcatctatcaggtcgtggccattgacctggacgaggggcttaacggcctagtgagttacagaatgcccgttggcatgcctagaatggatttccttatcaatagcagcagtggagtggtggttacaacgacagaattggatagggaacggattgccgagtatcagttgagggttgtcgcttctgatgccgggacccccacgaaaagctccacttctaccctgacaatccatgtccttgacgtaaatgatgaaacccccaccttcttcccggcagtgtataacgtctccgttagtgaggacgtgcctcgcgagtttagagtagtgtggttgaactgtaccgacaacgacgtgggtttaaatgcagagctgtcttatttcatcactggcgggaatgtggacggaaagttcagcgtggggtacagagacgctgtggtaagaacagttgtcgggcttgaccgagagactaccgctgcgtatatgctgatactggaggcaatcgacaatggaccagtcgggaaaagacacaccggcaccgccactgttttcgtgacggttctagatgtcaatgacaacagacccatctttctgcagagtagctatgaagcatccgtacccgaggacattcctgaagggcactccattttgcaggaggacttggcctcaccttgtattagccccgcccccccgaggcgcgcttttcagagctccggcgagaaggagacctcccagtttcccggtaaggaactgcgcagagaaccgggaccttctaaggctcagaacagggcagcctttacagaacccttggccgaggctccactcctgggcagtaaacaggcgcaggaggagcgggctcctcttcctcgagaacaggcccagcaactccaaggaagtgaaggcgaaaaggggggtccctag

SEQ ID NO: 181092 - DNA, 2238 bp, synthetic construct
  misc_feature 1..2238: note = Description of Artificial Sequence: Synthetic coding sequence
  source 1..2238: mol_type = other DNA
atgcggcggtgccggtgggccgccctggccctgggcctgctgcggctgtgtctggctcaggctaatttcgccccccatttttttgacaacggtgtcggttccaccaacgggaatatggccttgttttcattacccgaggacacaccagtgggatctcacgtgtacaccctgaatggaaccgacccagagggagaccccatttcgtatcacatatcttttgacccttcaaccaggtcagtcttctcggtagatcctacgtttggaaatataactttggtcgaagaacttgatcgcgagagggaggacgagattgaggccattatctcaatttctgacggcctgaacctcgtcgccgagaaggtcgtgatcctagtcacagatgccaatgatgaggctccgaggttcatacaagaaccgtatgtcgccctggtgccggaagacatcccagccggctccattatcttcaaagtgcacgcggtcgaccgggacaccggctcaggcggctcagtgacttatttcctgcagaacctgcactctccgttcgccgtggacagacacagcggtgtcctgagactgcaagctggtgcaaccttggattacgagaggtccaggacgcattatataaccgtcgtcgcaaaggacggcgggggccgccttcacggcgccgatgttgttttcagcgctaccactaccgtgacagttaacgtggaggacgtgcaggacatggcaccagtgtttgtaggtactccttattatggatacgtgtatgaagacactctgccaggctcagaagttctcaaagtggtcgccatggatggagatcgtggcaaaccaaatagaatcttgtacagccttgtgaacggcaacgatggagcattcgagattaatgagacctccggagctatctctattactcaaagtccggctcagctgcagagggaggtatacgagcttcacgtacaggtaacggagatgtcacctgctggatcgcctgccgcccaggccaccgtcccagtcacaattcgcattgtggatttgaataatcatcctccaaccttttatggtgagtcaggccctcagaatcgatttgagctaagcatgaatgaacacccacctcaaggcgaaattctccgaggcctgaagattacagtcaacgactccgaccagggcgctaatgcaaagttcaacctgcagttagtgggaccacgggggattttccgtgtggtgccacagacagtgctgaacgaggcacaggtcactattatcgtggagaacagcgctgcaatcgatttcgagaagagcaaggtgctgacattcaagcttctagcggtagaagtcaatacgcctgagaagttcagctccacagccgacgtggtgattcaactgctcgataccaacgacaacgtcccaaagttcgattccctgtactatgttgcaaggattccagagaacgcccccggcggatccagcgttgtggctgttacagccgttgaccccgacaccggcccatggggggaggtgaaatatagtacatatggcacgggcgccgatctctttcttatacacccgagcacagggctgatttacacgcagccttgggccagccttgacgctgaggccactgcccgatacaacttctacgtcaaagccgaagacatggaaggaaagtattcggtggcagaagttttcataaccctgctcgacgttaatgaccatcctcctcaatttggtaagagtgtgcagaaaaagactatggtgctcggcacgcccgtcaaaatcgaggccattgacgaggacgcagaggaaccaaataatcttgttgattatagcatcacccacgctgaacctgccaatgtgttcgacataaacagccacaccggggaaatttggctgaaaaactcaatccggagccttgacgcattacacaacattacccccggtcgtgattgcctgtggagcctcgaggtccaggccaaagataggggcagcccctctttctccacgaccgccctccttaagattgacattaccgatgccgaagtgaggcggcttcgatacatgaaaaattccaatttccctgggactactaagtccgtccggaagcctaaattcaagcctaaaaagcctcattcctcacagggcctattcctgcacccccattgtgagatcgcactgttcaacctatccaatgttaacctctactcccgcgtgttccagggagctgcacaggcctcctag

SEQ ID NO: 181093 - DNA, 2580 bp, synthetic construct
  misc_feature 1..2580: note = Description of Artificial Sequence: Synthetic coding sequence
  source 1..2580: mol_type = other DNA
atgcggcggtgccggtgggccgccctggccctgggcctgctgcggctgtgtttagcccaggctaatttcgcccctcacttctttgacaacggcgtgggtagtaccaacgggaatatggccctttttagcctaccggaagataccccggtgggatcccacgtgtatacacttaatggtactgaccccgagggcgacccaatcagctaccatatctccttcgacccatccacccgctctgtcttctcagtggacccaacatttggcaacatcactctagtggaggagcttgaccgggagagggaggatgagatcgaagcaattattagtatatccgacgggctgaacttagttgcagagaaggtcgtaattttggtgacggacgcaaacgacgaggcgccccggttcattcaggaaccatacgtggctctggtgcctgaagatatacccgccggctccatcattttcaaggttcatgccgtggatcgcgacactggatctgggggttctgtgacatacttcttgcagaacttgcacagccccttcgccgttgatcgccactccggggtgctgcgcctgcaggctggtgctacactcgattacgagaggagcagaacacattatatcactgtggtggctaaagatggaggcgggcgcctgcacggtgcagatgtcgttttttccgcaactaccacggtgaccgtcaatgtcgaggatgttcaggatatggcgccggtattcgtgggcaccccatattatggatatgtttacgaagatactctccccggaagtgaagtgttaaaggtggtcgctatggacggtgaccgaggaaaaccgaatcgcattctgtatagcctcgtcaatgggaacgacggtgcatttgaaattaacgaaacgtcgggcgctatttccatcacacaaagtcccgctcagttgcagagggaagtctacgaactccatgtgcaagtgaccgagatgagtcctgcggggtcacctgccgcccaggccacagttccagtgaccattagaattgttgaccttaacaatcatcccccaacgttctacggtgagagcggaccgcagaaccgattcgaactcagtatgaacgaacatccaccgcagggggaaatccttcgcggcctcaaaattacagtcaatgactcagatcagggggctaacgccaaatttaacttacagttggtgggcccccgcggcattttcagagtggtcccacagacagttctgaacgaggcccaagtcacaatcatcgttgagaacagcgcggcaatcgactttgaaaaatcaaaagttctgaccttcaagttgctggctgtggaagttaacacacccgaaaagttttctagtaccgctgatgtcgtgattcaactcctggacacaaatgacaacgttcccaagtttgactccctctactatgtggcccgcatccctgagaatgcccccggagggtcatcagtggtggcggtaacggcagttgatcccgatacaggcccttggggggaggtcaaatattctacttacggaaccggcgctgatctcttcctgattcatccttcaacaggcctgatttacacacagccatgggccagtctcgacgcagaagctactgctcgctacaacttttatgtaaaggccgaagacatggaaggtaaatactctgttgccgaggtgtttataacattgctcgatgtgaacgatcatccaccccaatttggtaagtctgtgcagaagaagaccatggtccttgggacgccagtgaaaatcgaagctatcgatgaggatgccgaggaacccaataatctggtggactactcaatcacccatgctgagccagctaacgtcttcgacattaacagtcacactggcgaaatctggctgaagaactcaatacgcagtttggatgccctgcacaacatcacacctggaagggactgtctgtggtcgttagaagtacaggctaaagatcgcggctcgccaagcttcagcactactgctctgcttaagattgatataactgatgccgaaactttgagtcggagcccaatggccgcatttcttattcagacaaaagacaatcccatgaaagccgtgggcgttcttgctgggaccatggcaaccgtggtggccatcacagttttgatcagcaccgcgacgttttggagaaacaaaaaatccaataaagtgctgcccatgaggcgcgtgttgaggaagagaccaagcccagctcctcggaccattcgcatcgagtggctcaaatcaaagtcaacaaaggcagccacaaagttcatgctcaaggaaaagccaccaaatgagaattgtaataataactctccagaaagctcactgctgccgcgggcgcctgccctgcccccccccccgagcgtagctccttccaccggggccgcgcaatggactgttcccacggtctccggttccctgacaccacagccgacccaacccccgccaaaaccaaaaaccatgggttcaccagtgcagagcacactgatttccgaacttaagcagaagtttgaaaaaaagtctgtgcacaacaaagcttacttctag

SEQ ID NO: 181094 - DNA, 1692 bp, synthetic construct
  misc_feature 1..1692: note = Description of Artificial Sequence: Synthetic coding sequence
  source 1..1692: mol_type = other DNA
atggcccccgtgttcgtgggcaccccctactacggctacgtgtacgaagacaccctcccaggttcagaagtcttgaaggtcgtggcaatggacggagatagaggtaagccaaaccggatactgtactctttagtaaacggaaacgatggggcgttcgagataaacgagacctctggagccatcagtatcacacagtcacctgcgcagctgcagagggaggtgtatgagctccatgttcaggttactgagatgtcacctgccggatcgcctgctgcccaggctactgtaccagtgacgatccggatagtggatcttaacaaccaccccccaacattttacggggaatctggtccacagaaccgctttgagttgtcaatgaacgagcacccccctcagggggagatactgcgagggttaaaaatcacagtcaatgactcagaccaaggagcaaacgcaaagttcaatctccagctcgtggggccaaggggaatctttagggtggttccccagaccgtgcttaacgaagctcaagtcacaatcatcgttgaaaattctgccgctatcgacttcgagaagagcaaggttctgacctttaaggctgtggaccccgacaccggaccatggggcgaggtgaagtattcaacatatggtaccggcgcagacctgtttctcatccatccgtccactggcttgatctacacccaaccatgggcttccctagacgccgaggcaacagctcggtacaacttttacgtgaaggccgaagacatggagggaaagtactctgtggccgaggtgttcatcacgctgttggatgtgaatgatcaccccccacagttcggcaaatccgtgcagaagaaaactatggttctggggactcccgtcaagatagaggccattgatgaagacgcagaggaacccaataacctcgttgactactcaattacacatgctgagcccgccaacgtctttgacatcaatagccatacaggagagatctggcttaagaattccattaggtcgctggacgcattgcataacattacccccggtagagactgcctgtggtctctggaagttcaggctaaggatagagggtcgccctctttctcgacaactgctctcctgaaaatcgacattactgatgctgagaccctctccagatccccaatggctgcctttctgatccagaccaaggacaacccaatgaaggcagtcggcgtgttggcggggaccatggctactgtcgtagcgatcacagtcctgatcagcaccgccaccttctggcgcaacaagaaatctaacaaggtgcttcccatgagacgagtgcttaggaagcgcccctcccctgctccacggaccattagaatagaatggcttaagagcaaaagcactaaggccgccactaagttcatgcttaaagagaaaccgcctaatgagaattgcaataataactcccctgaaagctcacttctgcctcgtgcccccgcccttcccccccctcccagcgtcgcgccgtcaacgggcgctgcccagtggactgtgccaaccgtatctggatccttgactccacaaccaacgcagcccccccctaaaccaaagacaatggggagcccagtgcagtccaccctaatttccgagctgaagcagaagttcgaaaagaagtccgttcacaataaagcctacttttag

SEQ ID NO: 181095 - DNA, 1464 bp, synthetic construct
  misc_feature 1..1464: note = Description of Artificial Sequence: Synthetic coding sequence
  source 1..1464: mol_type = other DNA
atgggcagctgggccctgctgtggccccccctgctgttcaccggcttgctggttagaccccctggcaccatggcccaggcacagtattgctcagtcaacaaagatattttcgaagtcgaagagaacactaacgtaaccgagccacttgttgatatccacgttccagagggacaagaagtaactctgggtgcactcagcacacctttcgcttttcgcatacagggcaaccagctgtttctgaacgttacccccgactatgaggaaaagtccctactggaagctcagctgctgtgccagagtggaggaactctggtaacacagctgagggtcttcgtatccgtcttggacgtaaatgataatgcacctgagtttccttttaaaacaaaggagattagggtggaggaagataccaaagtgaactctaccgtgatccctgagacacagctgcaagcggaggatagggataaggacgacattctgttttataccttacaggaaatgacggcaggcgcttctgactatttctcccttgtgtcagtgaacaggccagctctgcgactggataggccacttgatttctacgagcgtcctaatatgacgttctggctgcttgtgcgggatacccctggcgaaaatgtggaacctagtcacacggccacagccactcttgtgctaaacgttgttcctgcagatttgcgacctccctggtttttaccatgtacattttcagacggttacgtctgtatccaggctcagtaccacggtgctgtcccaaccggtcatatcctgccctctcccctggtgcttagacccggacctatttatgctgaggatggggacagagggatcaaccaacctataatctactcgatcttccgagggaacgtcaatggcaccttcattatccaccccgatagtgggaacctgaccgtggcgcgcagtgttcctagtccgatgacattcctgctgcttgttaagggacagcaggccgatcttgcccgctactccgtgactcaagtgacggtagaggctgtggctgctgcaggctcccccccccgattcccgcagcgcctgtatagaggtaccgtagcgaggggagcaggagccggagtggtcgtgaaggatgcggccgctccgtcccagccactccgtattcaagcacaggaccccgagttctccgacctgaactccgccatcacttatcgaatcactaatcatagccactttcggatggaaggggaagttgtcctcaccacgactactctggcacaagccggcgccttttacgcggaaccgccaacatgtaccggtgatctgcggcatcctgcccacctgcggcctcctgcacctgatcctacacagcggcttcccggagaggccgaggagcctatgcaaacccccaaggccactcatctcggcgccgggggacttaaacatttgcctggtgttctggtgcccttttag

SEQ ID NO: 181096 - DNA, 1956 bp, synthetic construct
  misc_feature 1..1956: note = Description of Artificial Sequence: Synthetic coding sequence
  source 1..1956: mol_type = other DNA
atgggcagctgggccctgctgtggccccccctgctgttcaccggcctgttggtgaggccacctggcactatggctcaggctcagtactgctccgtgaacaaggatatattcgaagttgaggagaacaccaatgtgacggagcccctggtggacatccatgtccccgaggggcaggaggtcaccctgggagccctgtcaacccctttcgcctttcgcattcagggaaaccagctcttcctgaatgtgacccctgactacgaggagaaatccctgctggaggcccagctgctatgtcaatccggtggtactctagtaactcaactgcgggtttttgtctcagttctggatgtgaacgataacgcaccagagttccctttcaagaccaaggagatcagggtggaggaggatacaaaagtaaacagcaccgtgatccctgagactcagctgcaggctgaggaccgagacaaagacgacatcctgttctacaccctgcaggagatgacagccggggcttctgactacttctcactggtttcggtaaatagaccggcgctaaggctcgaccggcccctggatttctatgagaggccaaacatgacattttggcttctcgtgcgcgacacccccggcgagaacgtggagcctagccatacggctaccgcaacattagtattaaatgtcgtgcccgcggacctccggcccccttggtttctcccttgtacgttcagtgatgggtatgtgtgtatccaggcccagtatcacggtgccgttcctaccggccatatcctgccctcccccctggttctgaggcctgggccgatttatgctgaagacggagaccgcgggatcaatcagccaatcatctattcaatttttaggggtaacgtcaatggcacctttatcattcaccccgatagtggcaacttgaccgttgctagaagcgtaccaagtccgatgacattccttctgctggtcaaaggacagcaggccgatctggcccgatattcagtcacccaggttaccgttgaggccgtcgccgccgcgggctctccccctcggttccctcagcgcctctatcgcggcactgttgccagaggcgccggcgcaggggtggtcgtgaaggatgcagcggccccttcccagcctctccgcattcaggctcaggaccccgaattttctgacctgaattccgccatcacgtaccggattaccaaccattctcacttccgcatggagggggaggtagtgcttactaccaccacacttgctcaggcaggagcattttatgctgaggtggaggctcacaatactgtcacctcaggaactgcaacgaccgttatcgagattcaggtctctgaacaagaaccgcccagcacaggcgggggaccctccgaagacaagcgcttctcagtggttgacatggcagccctggggggggtgctgggagctctgcttctcctcgctctgctcggcctcgccgtgttggtccataaacattacggccctcgcctcaaatgttgttgcggcaaggcccctgagccacagcctcaaggattcgacaatcaggcctttctgcccgaccataaggcaaattgggcccctgtgccctcgcccacacacgaccccaaacctgctgaggctcctatgccagccgagcccgccccacctggacccgccagtccaggaggagctccagagccacccgccgcagctagagctgggggcagtcccaccgctgtccgaagtatcctgacgaaggagcggaggcctgagggtggctacaaggcggtttggttcggcgaggacatcggaacagaggctgacgtggtagtcttaaacgcccccacactcgatgtggatggtgcctccgattctggctcaggggatgagggtgagggcgccgggaggggcggaggcccatatgacgcacctggcggtgacgacagttacatatag

SEQ ID NO: 181097 - DNA, 2538 bp, synthetic construct
  misc_feature 1..2538: note = Description of Artificial Sequence: Synthetic coding sequence
  source 1..2538: mol_type = other DNA
atgggcagctgggccctgctgtggccccccctgctgttcaccggcttactcgtgaggcctcctggaacaatggcccaggcccaatattgcagcgtcaacaaggatatcttcgaggtagaagaaaatactaacgtgacagaaccactggtcgatatacatgtcccagagggacaggaagtgactttaggcgccttgagcaccccattcgctttccggatccagggcaatcaattgttcctgaacgtgactcctgattacgaagaaaaaagcctcctcgaggctcaacttctgtgccagtccggaggtaccctggtgacccagctccgggtgtttgtgagtgtactcgacgtcaatgataacgctcccgagtttccttttaagactaaggagatcagagtggaggaagacaccaaagtgaattccaccgtgatcccagaaactcaactccaggcagaagatagggacaaggacgacattctcttctacacacttcaagaaatgaccgctggcgcctccgattatttctcactagtgagtgtgaatcgccctgctctgagactcgatagaccacttgatttttacgagagaccaaacatgacattttggttgctggttagagatacacccggtgagaatgttgaaccatcccatacagctaccgctacgctggttctgaatgtggtgcccgcagatcttcgcccaccgtggtttctgccgtgcacatttagtgatggatacgtttgtattcaagcccagtatcatggagccgtcccaaccggtcacattctaccaagccctttagtcctgcgaccaggtccgatctacgccgaggacggagatagagggatcaaccagcctatcatttactccatctttcgcggcaatgttaatggcaccttcatcatccaccccgactctgggaacctcaccgtggccaggtcagtccccagccccatgactttcctcctactggttaaagggcagcaggctgacctcgcacgttatagcgtcacacaggtgactgtagaggccgtggctgcggcaggaagtccaccgcggtttccacagcggctttatcggggaacagtggcccgcggcgcgggcgcaggggtcgtggtaaaggacgcagctgctccatcccagccgctgaggattcaggcccaggaccctgagttctcggacctcaattcagccattacatacagaatcacgaaccacagtcactttcgtatggagggagaagttgtgctaaccaccacaacattggcacaggcgggtgccttctacgctgaggtcgaagcacacaacaccgtgacctctggcacagcaactacagttatagagatccaggtctcggaacaggagcctccaagcacagacgtgcccccatctcccgaggcagggggcacaacagggccatggacatccaccacgtcagaggtcccgcgcccccccgagccctcgcagggaccttcaactacctcttccggaggcggtactggacctcaccccccttctggcactactctcagacctcctacctcctccacgccagggggccctccaggtgcagagaatagcacgtctcaccaacccgcaacacccggaggagacaccgctcagacgccgaagccgggtactagtcagcctatgcctcccggggtcggtaccagcactagccatcagccagccaccccaagtgggggcacggcccagaccccagaaccaggaacctctcagccgatgcccccgtctatgggaacttccacttcccaccaacccgccaccccaggagggggcaccgcccagacaccggaagcagggacctcgcagcccatgccgccggggatggggacctctacaagtcaccagcctacaacgcccggagggggcaccgctcaaacgccggaacctggtacctcacagcccatgccgctctctaagtccacacccagctctggcgggggccctagcgaagataagcgcttcagtgtcgtggacatggcagcgttaggtggcgtgctcggagcacttcttctactagcactgctgggcctggccgtgctcgtgcacaagcactatggcccccggctcaaatgctgctgtggaaaggccccagagccacagccacaaggcttcgacaaccaggcatttctgcctgatcataaagcaaattgggctcctgtgccgtcccccactcatgaccccaaacccgctgaggctccaatgcccgccgagcccgcgcctccaggtcctgcatcacctggaggtgcaccagagcctccagctgcggcacgtgcgggagggagccccacagcggtaagatcaatcttaacaaaggagcgaagaccggagggagggtacaaagcagtttggttcggagaggatatcggaacagaggctgatgtggtcgttttaaacgccccaacactggacgttgatggcgcttccgactctggcagcggcgatgagggcgagggcgcgggacgaggaggcggcccctatgacgcacctggaggggatgactcctacatctag

SEQ ID NO: 181098 - DNA, 2538 bp, synthetic construct
  misc_feature 1..2538: note = Description of Artificial Sequence: Synthetic coding sequence
  source 1..2538: mol_type = other DNA
atgggcagctgggccctgctgtggccccccctgctgttcaccggcttgttggttcgcccccctggaacaatggctcaggcacagtactgttctgtcaataaggacattttcgaggtggaagaaaacacaaatgtgaccgagcctctggtcgacatccatgtcccagagggtcaggaagtgaccctgggagccctatccacacccttcgcctttcggattcagggcaaccaactattcctcaacgtgactccagactatgaagaaaagagcctcttagaagcccagctgctttgccaatcagggggtactcttgtcactcagcttcgggtgttcgtgagtgtactcgacgtgaatgataatgccccggaatttccatttaagactaaagagattcgggttgaggaggataccaaggtgaactccacagtgatcccagagactcagttgcaagcagaggatagggacaaggatgatatccttttctacaccctgcaagagatgaccgccggggctagcgattacttttctctcgtgtcagtgaacagaccagccctgcggttagaccggcctctcgatttttatgaacggcccaatatgaccttctggctgctggttagggacacgcccggtgaaaatgttgaaccctcccacactgcaacagctacacttgtgttgaacgtggtgcccgccgatttgcgccccccctggttcttgccttgtacgttttccgacggctatgtgtgtatccaggcccaataccacggagcagtgcccaccggccatatcctgccctctccccttgtgctgcggcccggccctatctacgcagaagacggggatagaggtattaaccagccaattatttacagtatctttcggggtaacgttaacggaaccttcatcatccaccctgacagcgggaatctgacagtcgctcggagcgtcccctcccctatgacattcctcctgcttgtgaaaggccaacaagccgacctggccaggtacagcgtgacccaggtgacggttgaggccgtggccgccgccggctctcctccaagattcccccagaggttgtacagaggaaccgtcgccaggggggccggagccggggtagtcgtgaaggacgctgctgcacctagccagcctctgaggattcaagcacaggaccccgagttctccgacctaaactcagctataacctacagaattactaaccacagccacttcagaatggaaggcgaagtcgtactgactaccaccactctcgcgcaggcgggagccttttacgctgaagtggaagcacacaatacagtcacctcaggcacggccacgactgtcatcgaaattcaagtttccgagcaggagccaccgagtacagacgttccaccatcaccagaggcggggggcactaccggaccttggactagtaccaccagtgaggttcctagacctccggaaccgagccaggggccgtcaaccacctcttccgggggtggtacagggccccaccctccctccgggaccaccctccgaccacctacgtcaagcactcccggtgggccgcctggtgcggaaaactccaccagccaccagcctgcaacaccaggcggggacacggcccagacacctaagccaggcacaagtcagcccatgcccccgggggtgggtaccagcaccagccaccagcccgccactccgtccggcggaaccgctcagacccctgaaccaggcaccagccagccgatgcctcctagcatgggcacaagtacctcccaccaacccgcgacacccggaggcgggacagcccaaacccctgaagcaggaacctctcagccaatgccacctggtatggggacctccacctctcaccagcctacaactccaggagggggcaccgcacagactccagaacctgggaccagtcaacctatgcctctctccaagtctacgccctccagcgggggtggtccatccgaggataagcgatttagcgtggtcgacatggctgcacttgggggcgttctcggcgcgttgttacttctggccctgcttggactcgccgtgctggtgcataaacattacggccctagactgaagtgctgctgcggcaaggcgccggaacctcagcctcagggctttgacaaccaggccttcctccctgaccataaggccaattgggctcccgtgcctagtccaacccacgacccaaaacctgcggaggctcctatgccggccgagccagctcctccaggcccagcttcgccaggcggagcaccagagccacctgcagccgctcgcgccggagggtcacctacagccgtgcgctctatcctcaccaaagaaagaaggcccgagggcggatacaaggcagtatggttcggcgaggacatcggaaccgaggcggatgtggtggtgctcaacgcacctacactggatgtagatggagcatctgatagcggttcaggcgatgagggagagggagcaggacgcggtggcggtccatatgatgcccccggaggtgatgatagctatatttag

SEQ ID NO: 181099 - DNA, 786 bp, synthetic construct
  misc_feature 1..786: note = Description of Artificial Sequence: Synthetic coding sequence
  source 1..786: mol_type = other DNA
atggccgagagccacctgcagagcagcctgatcaccgccagccagttttttgagatctggctgcatttcgacgctgacgggagcggttatctcgagggcaaagaacttcagaatctcattcaggaattgcaacaagcacgcaaaaaagccggcctggaactgagtcccgagatgaagacatttgtggatcaatacggccagagggatgacggtaaaatcgggattgtcgagctggcccatgtgcttcctaccgaggagaacttcctgctgctgttcagatgtcaacagttgaagtcctgtgaagagttcatgaaaacctggcgtaagtacgatacagaccacagtggcttcatcgagactgaagaactcaagaactttcttaaagaccttctagagaaggcaaataaaacagtagatgacaccaagctggcggagtatactgatctaatgctcaaactttttgacagcaataacgacgggaagctggagctcaccgaaatggctaggcttctccccgttcaagaaaatttcctcctgaagtttcaagggataaagatgtgcggtaaagagttcaacaaagctttcgagctgtatgatcaggatgggaatggctatatcgatgagaatgagctagacgcacttcttaaagacctctgtgagaaaaacaagcaggacctagatataaacaatatcaccacctacaagaaaaacattatggccctgtcagacggtggaaaactctaccgcacggacctggcactgatcttatgcgcgggtgacaattag

SEQ ID NO: 181100 - DNA, 615 bp, synthetic construct
  misc_feature 1..615: note = Description of Artificial Sequence: Synthetic coding sequence
  source 1..615: mol_type = other DNA
atgaagaccttcgtggaccagtacggccagcgggacgacggcaagataggaatcgtcgagttggcacatgtgttaccaacagaagaaaactttttgctgctctttcggtgtcagcagctcaaatcttgcgaggagttcatgaagacctggcggaagtatgataccgaccatagcgggtttatcgaaacagaagagttgaagaattttctgaaagacctgctggaaaaagcgaacaagactgtggatgacaccaagttggcagaatacaccgacttgatgctcaagcttttcgactctaataacgacggtaagctcgagcttactgagatggcaaggctgttgcccgtacaggaaaattttctgcttaagttccagggtataaagatgtgtgggaaagagtttaacaaggcgtttgaattgtatgatcaagacggtaatggctacatcgatgagaacgagttggacgccctgcttaaagacttgtgcgagaagaataaacaagacctggacatcaataacatcacaacgtacaagaagaacatcatggcactatcagatggcgggaagttatacaggaccgatttagccctgatactgtgcgctggggataactag

SEQ ID NO: 181101 - DNA, 816 bp, synthetic construct
  misc_feature 1..816: note = Description of Artificial Sequence: Synthetic coding sequence
  source 1..816: mol_type = other DNA
atggccggcccccagcagcagcccccctacctgcacctggccgagctcaccgctagccagtttcttgagatctggaaacattttgacgccgacggaaatggctatatcgaggggaaggagctggagaatttttttcaggaactggaaaaggcacgcaagggatccgggatgatgtccaaatcagacaattttggtgaaaagatgaaggaattcatgcagaaatacgataaaaattctgatggaaagatcgaaatggcggagctagcccagattctgccaaccgaggagaactttttgctgtgctttaggcaacacgttggttcttcggctgagtttatggaggcctggcgtaagtacgatacagataggtcagggtacattgaggctaatgaactgaagggcttcctaagcgaccttttgaaaaaggctaacaggccttacgatgagcccaaactgcaggaatacacacagactatcctgcggatgttcgaccttaacggcgacggtaagctgggactgagcgagatgtcacggctgctgcctgttcaggaaaactttctcctcaagttccaagggatgaaactcacatccgaggagttcaacgcaatctttaccttttatgacaaagacaggtccgggtatattgatgaacacgagcttgacgcccttctgaaagatctatacgaaaagaacaagaaggagatgaacattcaacaactgacgaattatcgcaaaagtgtcatgtccctcgctgaagcaggtaagctatacaggaaagacctcgaaattgttttatgctcagagcctcctatgtag

SEQ ID NO: 181102 - DNA, 579 bp, synthetic construct
  misc_feature 1..579: note = Description of Artificial Sequence: Synthetic coding sequence
  source 1..579: mol_type = other DNA
atggccggcccccagcagcagcccccctacctgcacctggccgagctcaccgcatcgcagttcctagagatctggaagcattttgatgccgacggcaatggatacatcgaaggaaaggaactcgaaaacttcttccaagagctggaaaaggcacggaaaggtagcggtatgatgtccaagagcgataactttggtgagaagatgaaggagttcatgcaaaaatacgacaagaattcggatgggaaaatagagatggctgaattagctcaaatactaccaacagaggaaaacttcctactatgcttccgacagcacgtgggcagttccgctgagttcatggaggcttggagaaagtacgatacagatcgctccggctacattgaggccaacgaactgaaggggtttctgtcagacctactgaaaaaagctaacaggccttacgacgaaccgaagctgcaggagtatacccagactatcttaagaatgtttgacctgaacggtgatgggaaactggggctgtctgaaatgtcgcgaattgaggccgcaaccttaacatccatgtcatggatgcctttttag

SEQ ID NO: 181103 - DNA, 6663 bp, synthetic construct
  misc_feature 1..6663: note = Description of Artificial Sequence: Synthetic coding sequence
  source 1..6663: mol_type = other DNA
atgatccggatcgccgccctgaacgccagcagcaccatcgaggacgaccacgaagggtcattcaaatcacacaaaacccagacaaaggaagctcaggaggctgaagcattcgctctctatcataaggccctggacttgcaaaaacacgaccgcttcgaagaaagtgccaaagcctatcatgagctccttgaagcctccctgctgcgggaggccgtctctagcggagacgagaaagagggcttgaaacatcccggactgatcctcaaatactctacttacaagaatctggcccagttagcagcgcagagagaagacttggagacagcaatggaattttacctggaagccgttatgctggacagcactgacgtcaacttatggtacaaaataggccacgtggccctgcgcctcatcaggatccctctggcgcgccacgcttttgaagagggccttcgttgtaacccggatcactggccctgtctagacaacctgatcactgtgctgtatacgctctctgactacaccacctgtctgtacttcatttgtaaagcacttgagaaggactgccgctattccaaaggccttgtccttaaagaaaagattttcgaagagcagccatgtcttcgaaaagactctctgcgtatgtttctgaagtgtgatatgtctattcatgacgtgagtgtgtcagccgctgagacacaggccattgtggacgaggccctgggcttgcgtaagaagcgccaggccttaatcgtgagagagaaagagcctgacttgaagcttgtgcagcctattccgttctttacgtggaagtgcctgggggagtctcttttggctatgtacaaccaccttacaacctgcgaacctcctcgccccagcctggggaaaaggatcgacctgagcgactaccaggacccatcacagcccctcgagagcagtatggtggtcacacctgtgaatgttatccagccgtctaccgttagcaccaatccggccgtcgctgtcgcggaacctgttgtcagttatacatccgtcgccacaacctcctttccactccacagtcccgggttgctggagaccggcgctcctgtcggggacatctccggtggggacaagtccaagaaaggggttaagcgcaaaaagatcagcgaagaaagtggcgaaaccgccaagcgcaggtcggcacgggtccggaacacaaaatgtaagaaagaagaaaaggtcgatttccaagaattactgatgaagtttctacctagccgactgaggaagctggaccctgaagaagaggacgactcattcaataactacgaggtacaaagcgaagctaagctggagagcttcccttccattggccctcagcgactctcttttgattccgctacgtttatggaatcggagaaacaggatgtgcatgagtttctcctagagaacttgaccaacggcgggatactggaactgatgatgaggtatctcaaggcaatgggacataaattcctcgttaggtggcccccaggcctggcggaggttgtcctgtcagtctaccatagttggcgaaggcatagcacgagtctgcctaatcccctgctccgagactgcagtaataaacatattaaggatatgatgttgatgagcttgagttgcatggaactgcagcttgaccagtggctccttacgaaaggacgctcctcggccgttagtccgcgaaattgccctgcaggcatggttaatggcaggtttggcccggacttcccaggcactcattgtctgggagacttgcttcagttatcatttgccagtagccaaagagacctgttcgaggacggctggctggaattcgttgttcgcgtttactggttgaaagcccgattcctggccttacagggggatatggagcaggccttagaaaactatgacatttgcacagagatgttgcaatcttcaaccgcaattcaagttgaggctggtgctgaacgaagggatattgtcatacgacttcctaatctgcacaacgattccgtagttagcctggaagagatcgataagaacctgaaaagtctggaacggtgccagtctctggaagagatccagcggctctacgaggccggcgattataaggccgtagtacacctcctgcgccctactttgtgtactagtgggttcgatagagccaaacatctcgaattcatgactagcatccctgagaggcccgcccagctgctcctgctgcaagatagcctcctgaggttgaaggattatcggcagtgttttgagtgcagcgacgtggccctgaacgaagcagtgcagcagatggtgaattcaggcgaggcagcagcaaaagaagagtgggtagccactgtgacccagctgttaatggggatagaacaagccctttctgctgatagctcaggttcaatcctcaaggtgtcttccagtacaactgggctggtgcgcttaaccaacaatctcatacaggtgatcgactgctccatggctgtgcaagaagaggcaaaagaaccccacgtaagctccgtgctgccttggataatcttacaccggatcatttggcaggaggaggatacctttcactctctgtgccaccagcagcaacttcagaaccccgccgaagagggaatgagcgagactccgatgctacccagttcgctgatgctcctcaacacagctcacgaatatttagggaggcgttcttggtgctgcaactcagacggtgctcttctgcggttttacgtgagggttcttcaaaaggagctggccgcttccacaagtgaggacacgcacccttacaaggaggaactagagactgcgttggaacagtgcttttactgtctctatagcttcccttcgaaaaagagcaaagcgaggtatctggaggagcacagtgcacaacaggtggaccttatttgggaggatgctctgtttatgttcgagtatttcaaaccaaaaacacttccagagtttgatagctacaagacctctacagtgagcgccgatctggctaacctcttgaagaggatagccacaattgtccctcggaccgagcggccagcactgagtctggacaaggtttcagcatacattgagggaaccagcacagaggtcccgtgcctcccagagggagcggacccatcgccacctgtggtgaatgagttgtactatctgcttgcagactaccattttaaaaataaagagcagagcaaggccattaagttctacatgcatgatatttgcatctgccctaacaggttcgattcctgggcaggcatggcactcgctagggcatcccgcattcaagacaaactgaactcgaacgagctcaaaagcgacggacccatttggaaacacgccacccccgtcctgaactgctttcgaagagccctggagatagatagctccaatctttcactgtggattgaatacggaacaatgagttatgccctccactctttcgcctctcgccaactgaagcagtggcgtggcgagctgccccccgaactggtacaacaaatggagggccgaagagactccatgttggaaaccgccaaacactgcttcacttcagcggcccggtgtgagggtgatggcgatgaagaagagtggttgatccactacatgctgggtaaggtggccgagaagcagcagcagccgcccacagtctacctgcttcactatcggcaggcaggccactatctccacgaagaagctgctcggtatcccaagaaaattcattatcacaatccccccgaactggccatggaggcactggaggtgtattttagactccacgcaagtatcttaaaactcttggggaaacctgacagcggggttggcgcagaagtgctggtaaacttcatgaaggaagccgctgagggcccttttgctcgcggagaggaaaagaacaccccaaaagcctccgagaaagaaaaggcgtgtcttgtggacgaggactctcattcgagcgcggggactctgccgggcccaggcgcctcactgcccagctcctccggtcccggccttacttcgcctccttatacggccacacctattgaccacgattatgttaaatgtaaaaagccccatcagcaggctacacctgacgataggagtcaggactcaaccgcggtggccctttcggatagttctagcactcaggatttctttaatgagcctacctcccttttggaagggagcagaaagtcctataccgaaaagaggctccctatcttatcttctcaagctggggctacagggaaagacttgcagggtgccacggaggagcgaggtaagaatgaagagtctctggagtctactgagggtttcagagccgcagagcaaggggtccagaaaccagcagctgaaactcccgccagtgcttgtatccctggcaagcctagtgcaagtacccctacactgtgggatggcaaaaagaggggcgacctcccaggtgagccggtggcttttccccagggcctgcctgcaggcgctgaggaacagaggcagtttcttacggaacaatgcattgcgtcattcaggctttgcctgtctagattcccacagcactacaagagtctctatagactagcctttctatacacttattctaaaacccatcgaaatttgcagtgggcaagagacgtgcttctggggtcatcaatcccttggcagcagctgcagcatatgcctgcacagggccttttctgcgagcgaaataagacaaattttttcaatggtatttggagaatccctgtcgacgaaatagataggccaggatcatttgcttggcacatgaatcggtccatcgtgcttctattgaaagtgttggcccaactgagagaccactcaaccctgctgaaggtcagctccatgttgcaacgaaccccagaccagggcaagaaatacctcagggacgccgaccgacaagtactcgcacagagagctttcatattgacggtgaaagtgttggaggatacgctgagtgaactcgcagaagggtccgaacgccctgggccaaaagtatgcggactgcccggggcaaggatgaccactgacgtttctcataaagcctcacctgaagatggacaggaagggctgccgcagcccaaaaagcctcctttggctgacggaagcgggcccggtccagagcctggcgggaaagtggggttgcttaaccacagacccgtagctatggacgcaggagacagcgccgatcagtctggcgaacggaaagacaaggaaagtccacgggctggcccaactgagcctatggatacaagcgaggctacagtgtgccattccgatctcgaacggacgcctccactcctgcctgggcgtcccgcaagggatcgaggacctgagtccaggccaaccgagctatcactggaggagctgagtataagtgccaggcagcagcccactccactgacccctgcacagccagcacctgcgccagcaccagcaactacaacggggaccagagccggcgggcatcctgaggagccactttccagattgtcacgcaaacgcaagctgctcgaagataccgagtcgggcaagacccttctcctggacgcgtatagagtgtggcagcagggccagaagggggtggcatacgatctggggcgggtcgagagaatcatgtcggaaacatacatgctgatcaaacaagtcgatgaggaggccgcattagagcaggccgtgaaattctgtcaggtgcatttaggtgctgcagcccagcggcaagcctctggcgatactcctactacacctaagcaccccaaggactcaagagaaaacttttttcctgttactgttgtgcccacggctcccgatcccgtccctgccgacagcgtgcagagaccgtcagatgcccacactaagcccagacctgcattggccgcagccaccacaatcatcacctgtcctccaagtgcaagcgcatctaccttggaccaaagcaaggatcccggcccaccgagaccccaccgccctgaggctaccccctctatggcatcgctcgggccagagggcgaggagctggctagagtcgcagaaggtacttctttcccaccccaggaacccaggcactcacctcaggttaaaatggccccaacatctagtcctgcggagccgcattgctggccagccgaggcagctctcgggaccggagctgaaccgacctgttcccaggagggcaagctgcgccccgaaccccgacgggatggggaggcccaggaagcagcttccgaaactcagcctctgtcgtcacctcccacagcagcctcctctaaggcaccttccagtggaagcgctcagccacctgaaggtcacccaggcaagccagagccctcccgggccaagagccgtcctctccccaatatgcctaagttggtgatcccctcagccgccaccaaattccctcctgagattactgttacgccacctaccccgactctcctgagtccgaaaggcagcatcagcgaagaaactaaacagaagctgaagagcgccatcctgtccgcacagagcgccgccaacgtccggaaggaatccctctgtcaaccagctctggaggtcctcgagacttccagccaggagtcctccctggaatcggaaactgacgaggacgacgattatatggacatctag

SEQ ID NO: 181104 - DNA, 6663 bp, synthetic construct
  misc_feature 1..6663: note = Description of Artificial Sequence: Synthetic coding sequence
  source 1..6663: mol_type = other DNA
atgatccggatcgccgccctgaacgccagcagcaccatcgaggacgaccatgagggtagttttaagagtcataagacacagacaaaggaagcccaggaggcagaagcgttcgctctgtatcacaaagcccttgatctgcagaaacatgacagattcgaagagtctgctaaggcgtatcatgagctcttagaggcatcacttctgcgagaagctgtgtcatcaggtgatgaaaaagagggactgaaacacccaggacttatcttgaagtactccacctataagaaccttgcccaactcgccgcgcaacgtgaggacctggagaccgcaatggaattttatctggaagctgtgatgctagatagtacagacgtcaacctgtggtacaaaatcggtcacgttgcgttacgcctgattagaatccctctcgcaagacatgcgttcgaggagggcctaaggtgtaacccggatcattggccatgtcttgacaacctcattaccgtcctctatacactttcggattacactacttgcctctatttcatatgtaaggccttggagaaagactgccgttactccaaggggcttgttttaaaggagaagatatttgaggagcagccatgcctgcgcaaagattccctgaggatgttcttaaaatgtgacatgtccattcatgacgtgagtgtctccgctgcagagactcaggcaattgtggacgaggctcttgggcttagaaaaaagcggcaagccctgatagtcagggaaaaagagcccgacctgaaactggtacaaccaatccccttctttacctggaagtgcttgggggaatccctgctggccatgtataatcacctcactacctgtgaacctccgcggccttccctggggaaacgtatcgaccttagcgactatcaggatccaagtcaacccttagaaagctccatggtggtgacgccagttaatgtgatacagccaagcacagtgtctactaaccccgcggtcgcagtcgccgagcccgtggtaagttatacatctgtggccaccacttccttccccttgcactctccgggcctgcttgagactggagcaccggtgggcgacatttccgggggagataagagtaagaaaggagtgaaaagaaagaagatcagcgaagaatctggagaaacagccaagcgcaggtccgcaagagtgcggaacacgaaatgcaaaaaagaagagaaagtggattttcaggaactactgatgaaatttttgccatctaggctccgaaagctggatcctgaagaggaggatgattcattcaacaactacgaggtgcaatctgaggcgaagcttgagtcattcccaagtattggacctcaacggttaagttttgactcagcaacatttatggagagcgaaaagcaggatgtgcatgagttcctgctggaaaatctgactaacggggggatcctggaacttatgatgcggtatctgaaggccatgggacacaagttcttggtacggtggccccccggccttgccgaagttgtactgtccgtgtaccactcttggcggaggcactctaccagcctacctaatccattgcttcgtgactgctcaaataagcatataaaggatatgatgctcatgtctctctcttgcatggaactacagttagaccagtggctgctaacgaagggacggtcatctgcggtaagtccaagaaactgccctgccggtatggtgaatggtaggtttggcccagattttcccggaactcattgtttgggcgacctcctgcagctgtcgtttgcctcctctcaacgcgatctttttgaagacggatggctggagtttgttgtgcgtgtatattggctgaaagcccgattcctagcgctccaaggggacatggagcaggccctcgagaattacgacatttgtaccgaaatgctacagtccagcacggccatacaggtcgaagcgggagcagaacgccgggatatagtcatccggctgcccaacttgcacaacgattcagtggtgtctctggaggaaatcgacaagaacctaaaatccctggaacgatgccaatctctggaggaaatccaacgtctctatgaggcaggagactataaagccgtcgtacacctgttgaggcccaccctgtgcacctccggattcgacagagctaagcacctagagttcatgaccagcataccagaaagaccagcccagctgctgcttctacaggattcattgctacgcctgaaggactaccgacagtgttttgaatgttcagacgttgcccttaatgaagccgtgcagcagatggtgaattccggtgaggcggccgcaaaagaggaatgggtggcaaccgttacccagttgttgatgggcattgagcaggctctgtctgccgattccagtggttccatcttaaaggtcagcagctcgacaaccgggctggtgaggctcaccaataacctgattcaggttatcgattgtagtatggccgtacaagaagaggctaaagagccccacgtctctagtgtgctaccctggattatactgcacagaatcatctggcaggaagaagacactttccacagcctttgccaccaacagcagctgcagaaccctgccgaggagggaatgtctgagacaccgatgctgccaagtagtttgatgttactgaataccgcgcacgagtatcttggccgccgtagctggtgttgtaatagtgacggggccttgcttaggttctatgtgcgcgtgctgcaaaaagaacttgctgcgtctaccagcgaggacacccatccctataaagaagaactggaaacagccctggagcagtgtttctattgcctgtatagttttccttctaagaaatctaaagcgcgatacctagaggagcattcagctcagcaagttgacttgatctgggaagacgccctgtttatgttcgagtacttcaaacccaaaactctgccggagtttgatagttataagacctctaccgtcagcgccgatttggctaacctgttaaagagaatagccacaattgttcctcgaacggagcgccccgcactgtctttggacaaggtgtctgcgtacatcgagggtacatctaccgaggtaccgtgcctgcccgagggcgccgatccatccccgcccgtggtgaacgagctgtactatctactcgccgattaccattttaaaaataaggaacagtcaaaagctatcaagttttacatgcacgatatctgcatctgtccgaaccgtttcgacagctgggccggaatggcactggcccgagcctctagaattcaggataagctgaactccaacgaattgaaaagcgatggccccatctggaagcatgccacaccagtcctaaattgctttcgcagagcgctggagatcgactcaagtaacttaagtttatggatcgagtacggaaccatgagctatgctttgcattcctttgcctcccgccagctgaaacagtggcggggtgaacttcctccagagttggtgcagcagatggaggggcgccgggattctatgctggagaccgcaaagcactgctttacatccgcagcccggtgcgagggtgacggcgatgaagaggaatggctgatccactacatgctaggtaaggttgcagagaagcagcaacagcccccaacagtctaccttctgcactacagacaagctggacattatctccacgaggaagccgcacgttaccccaagaagatccattatcacaacccccccgagctggccatggaagctttagaggtctacttccgtttgcacgcaagcatacttaagctcttgggcaagccagattccggggtgggtgccgaggtgctggtgaactttatgaaggaagccgccgagggcccttttgcacgtggcgaggaaaaaaatacgccaaaggctagcgaaaaggaaaaggcctgcctggtggatgaagactctcactcctctgcagggacgctgcccggcccaggcgccagcctcccttcttcttctggtcccgggttaaccagccctccatacactgctacgcccatcgatcacgactacgttaagtgtaagaagccacaccagcaggcaacccctgatgaccggagccaagattccactgcggtggccctgtcggattccagctctactcaagacttcttcaatgagcccacatccctgctggaggggtccagaaagtcatacaccgagaaaagattacccatcctgagtagtcaggcgggggctactggcaaggatttgcagggagctacagaggagaggggcaagaatgaggaaagcctcgagtctaccgaagggtttcgggccgcggagcagggggtccagaaacctgccgccgaaacgccagcatcagcctgtattcccgggaagccatcagcttctacacctaccctctgggacgggaaaaagcgaggcgatttgcccggtgaacctgtggccttccctcagggcctgcctgcaggagcagaggagcagaggcagtttttaactgaacagtgtatagcctcatttaggttgtgcctctcgcggttcccgcagcattacaagagcctttatcgccttgctttcctgtacacatattctaagacccaccgaaatttgcagtgggcccgggatgtgcttctgggcagctccattccttggcaacagctgcagcacatgccagctcaagggctattctgcgaaagaaacaaaaccaatttctttaacggcatctggagaattcccgtggacgaaatcgatcgcccgggttcttttgcgtggcatatgaatcgaagcattgttctacttttgaaagtcctggcacagctgagggatcactccaccctgctgaaagtctcaagcatgctgcagcggacccctgatcaaggcaagaaatacctgcgggacgctgacaggcaagtgctggcacaacgggcatttatactgacagtgaaagtcctagaggatactctgtctgagctcgccgaggggtccgagaggcctgggcctaaggtgtgcggactgcccggcgctcgcatgactactgatgtgagtcacaaggcctctccagaggatggacaggagggactccctcagccaaagaagcctcctctcgccgatggctcaggcccaggaccagagccaggggggaaggtgggccttctgaatcaccgtcccgtggctatggacgcaggcgatagcgctgaccaatccggagaacgtaaggataaggaatcaccacgcgcaggccccactgagcccatggacacgagtgaagcgactgtatgccactctgatctagagcgtacccctcccctgttgcctggccgcccagctagggatcgcggtccagagtcaaggccaacagaactgtccctggaagagctttccatcagcgccaggcagcagcccaccccactgacccccgctcaaccggccccagcgcccgcaccagccactaccacggggacacgggcagggggtcatccggaagaacctttatctagactgtcccggaagagaaagctcctcgaggacactgagtccggcaagactctactactggatgcctatagggtgtggcagcaagggcagaaaggtgtggcctatgacttgggacgcgtggagaggatcatgtccgagacctatatgctgattaaacaggtggacgaggaagctgcgctggagcaggctgtcaagttttgccaagtccacctgggtgccgctgcacagcgacaggcgtccggcgacacgccaacgacccctaaacatccgaaagactcaagagagaacttctttcccgtgactgttgtcccaaccgctccggaccccgtgcccgctgactccgtgcagcggccttccgatgcccatacaaagcctagacccgcactcgccgctgcgacaaccatcatcacctgcccccctagcgcgagcgcctccacattggatcaatcaaaagacccaggtcccccccggccacaccgtccagaggcaactccaagcatggcttctctcggacctgaaggagaagaactagcgcgggttgcagagggtacgtcttttcctcctcaggagccacgccattcaccacaggtgaaaatggcacccactagttctcctgccgaaccccactgctggccggccgaagctgctctggggaccggcgctgaaccaacctgcagtcaggaagggaaactgcggcctgagccaagacgagacggggaagcacaagaagctgctagcgagacacagcctctgagttcacctccaactgccgcctcatctaaggctccttcaagcggttctgcccaacctcccgaaggccacccgggtaaacctgagccatcaagggccaagtcacgcccccttcctaacatgcctaaactcgtaatcccgtcagctgcaacgaagttccctccggagatcactgtaactccaccaacccccactctcctgtccccaaagggttctatcagcgaagagacaaagcagaagctgaagtctgccatcctgtctgcacagtccgccgcaaacgttcgaaaggagtctttgtgtcagcccgccttagaagttctggagacatcatcacaggaaagttcccttgagtctgaaaccgatgaagacgatgactatatggacatatag

SEQ ID NO: 181105 - DNA, 1770 bp, synthetic construct
  misc_feature 1..1770: note = Description of Artificial Sequence: Synthetic coding sequence
  source 1..1770: mol_type = other DNA
atgccccggcggagccggcggggcatctggcggatccccgtggacgaaatcgatcgacctggcagcttcgcctggcacatgaaccggtcaatcgttcttctactgaaggtgctagctcagctgagagatcattctactctgctcaaggtttcctccatgttgcaaaggacacccgaccaggggaagaagtaccttcgcgatgcagaccgtcaagtgttggctcaaagggcctttatcttgactgtaaaggttttagaggataccctcagtgagctagccgagggcagcgagagaccggggccaaaggtctgcgggctaccaggggcccgtatgacaaccgacgtgagccacaaggccagcccagaggacggccaggagggcttgccacagccaaaaaaaccgcccctggccgacggctccgggcctgggcccgagcctgggggtaaagttggcctcctgaatcaccgacctgtggcaatggatgccggtgattctgccgatcagtctggagagaggaaggataaggagtccccaagggccggaccgacggaaccaatggacacctcagaggcgacagtctgccactcagacctggaaagaacccctcctctgctccccggccgccccgctcgcgaccgcggccctgagtccaggcctactgagctatccctcgaggaactgagtatttccgcacgccaacagccaaccccactgacccctgcccagccggccccagccccggcccccgctacgactaccggaacacgggcaggtggacatccagaggagcctctcagccgcctctcaagaaagcgcaagctgctggaagataccgaaagcggaaaaactctcttgctggacgcctatcgagtctggcagcagggacagaagggcgtggcttatgatttgggccgagtagaacggataatgtctgagacctacatgctgataaagcaggtagacgaagaggctgcccttgagcaggctgtgaagttctgtcaggtgcatctcggactaccaccacgggatcggccacgtgatacgccaactactcccaaacatcccaaagattcccgagagaacttcttcccagtgactgttgtaccaaccgcccctgaccctgtgccagcagactcagtccagagaccaagtgacgcacacaccaaacccaggcccgccctggctgcggccaccacaatcatcacatgccctccctctgctagtgcctctactttggatcagagcaaggatccgggcccccctagaccccaccgtcctgaggctaccccgtctatggcaagtttgggccccgagggcaaactgcgccccgagccccggcgtgacggtgaggcccaggaggcagcgtccgagacccagcctctgagttctccgcctaccgcagcttcctctaaagccccatcatccggaagcgctcagccgcctgagggccatcccggcaagcctgagccatcacgcgcaaaatcccgcccgctccctaatatgcccaaactggtgatcccttccgccgcgaccaagttccctcccgaaatcacggtcaccccccctaccccaactctcctgagtcctaagggttctatctccgaagagaccaagcagaaactgaagtctgctatcctctcagcccagagcgctgcgaacgtcagaaaggagtcactctgtcagccggctctggaggtgctcgagacgagttcccaggagagctcactggaatcagagacggatgaggacgatgactacatggatatctag

SEQ ID NO: 181106 - DNA, 1224 bp, synthetic construct
  misc_feature 1..1224: note = Description of Artificial Sequence: Synthetic coding sequence
  source 1..1224: mol_type = other DNA
atgatccggatcgccgccctgaacgccagcagcaccatcgaggacgaccacgagggttcttttaaatcgcacaagacccagaccaaggaagcacaggaggccgaggcctttgccctatatcacaaggccttggatctgcagaagcacgatcggttcgaagaatcggccaaagcctaccatgagctcctggaggccagcctcctgcgtgaggccgtatccagcggggacgagaaagagggccttaaacatcctggcctgatcctcaaatactcaacctataaaaatctggcacaacttgctgctcagcgtgaagacttagagactgcaatggagttttacctcgaagctgttatgctcgacagcaccgacgtgaacctgtggtacaagatcggtcacgtagctctcaggctaatccgtattccgctcgcccgacacgcatttgaagaaggccttcgctgtaacccagaccattggccgtgcttagataacttgatcaccgtgctgtacacgctctccgattacacgacttgtctatatttcatatgcaaggcactcgagaaagattgtcgttattcaaagggactggttctaaaagagaaaatctttgaagagcagccttgtcttagaaaggattcactacgtatgttcttgaagtgtgatatgagcatccacgacgtttccgtttcagccgccgaaacccaagccatcgtggatgaggccttagggcttcgtaaaaagcgccaggcgcttatcgtgagagagaaagagcctgatctgaaactcgtgcagcctatccccttcttcacttggaaatgcttgggagagtctctgctggcaatgtacaatcaccttaccacttgcgagcctcctcgtcccagtttgggaaagcgaatcgacttaagcgattaccaggaccctagccagcctctggagtcaagcatggtagtcacacctgtgaacgtgattcaaccatcaactgtgtctaccaatcccgccgtggctgtggccgaacccgtggtttcatacacttcggtggcaaccacgtccttcccactgcattctcccgggctgttggagaccggagcaccggtgggcgacatatctgggggggacaaatcaaaaaagggcgtgaaacgcaagaaaattagcgaagaaagcggggagacagccaagagacgctccgcccgcgtgcggaacaccaagtgtaaaaaagaggaaaaatag

SEQ ID NO: 181107 - DNA, 1527 bp, synthetic construct
  misc_feature 1..1527: note = Description of Artificial Sequence: Synthetic coding sequence
  source 1..1527: mol_type = other DNA
atgcagttcagcggcgagaagatcagcggccagcgggacctgcagaagtcaaagatgcggttcactttcacctctagatgcctcgcactgttcctcctcctgaaccatccgactccaatactccccgccttctccaaccagacataccctacaattgagcctaaacctttcttatatgtggttggaaggaaaaagatgatggacgcccagtacaaatgttatgatcgcatgcagcagctgcctgcgtaccagggagagggtccctactgtaacaggacatgggacggctggctgtgctgggatgacacccccgctggagtgctgagctaccaattctgccccgattactttcctgacttcgatccatccgaaaaggtgactaaatactgtgatgaaaagggtgtttggtttaaacacccagaaaataaccgcacatggagtaattacacgatgtgcaacgccttcacacccgagaagttaaagaatgcttatgtactgtactatttggccattgtaggacactcactgtctatctttacccttgtcatttctttgggaatcttcgtcttcttccgcaagttgactacgatttttccgctgaactggaagtacagaaaggctctgtcgctgggctgtcagcgagtgaccctgcataagaacatgttcctgacttacatcttgaattccatgattattattatccatctcgtagaagtggtccccaatggcgagctggttcgcagagatccggtctcttgtaaaatcctacacttctttcatcagtatatgatggcgtgcaattacttttggatgctgtgtgaaggaatatacttgcatacgttgatagtcgtggccgtattcactgagaaacagcgacttcgctggtactatctcctgggctggggcttccccctagtgccaactactattcacgctattaccagagctgtatattttaatgataattgctggttatctgtcgagacccacctgctgtacattattcacgggccagtcatggctgctctggtggtcaacttcttttttttgctgaatatcgtgagggtactcgtaaccaagatgcgcgaaacccacgaggcagagagccatatgtatctcaaagcggtcaaggcgacaatgatattagtgccccttctaggcattcagttcgtcgtgttcccttggcgtccatctaacaagatgttgggcaaaatatatgattatgtgatgcactccctgatccactttcaggggttctttgtcgccacaatttactgtttctgtaataacgaggtccagactaccgtgaagaggcagtgggcccaatttaaaattcagtggaaccagcgctggggcaggcggccatccaacaggtcagccagagctgctgctgccgcagccgaagccggcgatataccgatctatatttgccatcaggaactgcggaatgaacccgctaataatcaaggcgaggagtcagcggagattatcccccttaacattatcgagcaggagagctcagcatag

SEQ ID NO: 181108 - DNA, 1473 bp, synthetic construct
  misc_feature 1..1473: note = Description of Artificial Sequence: Synthetic coding sequence
  source 1..1473: mol_type = other DNA
atgcggttcaccttcaccagccggtgcctggccctgttcctgctgctgaaccaccctactcctatcctccctgcatttagtaaccagacgtatcctacaattgagcccaaacctttcctgtatgttgttgggaggaaaaagatgatggacgcacagtataaatgttacgaccgcatgcaacagcttccagcgtatcagggtgagggtccatactgcaacaggacatgggacggatggctctgctgggatgatacccctgctggcgttctgtcttaccagttttgccctgactattttcctgattttgatccaagtgaaaaagtaactaagtattgcgatgagaaaggggtgtggtttaagcatccagaaaataatcgaacatggtcgaattatacgatgtgcaacgcgtttacacctgaaaagctgaaaaacgcttacgtgctctattacctcgccatcgtagggcacagtctgtcaatttttactctcgtgatcagcctggggatattcgtattcttccggaagctcaccacaatctttcctctgaactggaaatatcgcaaggccctatcccttgggtgccaacgcgttacccttcataagaacatgttcttgacgtacattctgaactcaatgatcattattatccaccttgtagaggttgtacctaacggggaattagtgaggagagatcccgtctcttgcaaaatcttacattttttccatcagtacatgatggcatgtaactatttctggatgttgtgcgaaggaatatacctccatactctcatagtggtcgctgtgtttaccgagaagcaacggctgcggtggtattacctgctcggctggggtttcccactggtgcctaccaccatacacgccattactcgcgcggtctactttaatgacaactgttggttgagtgttgaaacccacctactgtatataattcatggccccgtcatggctgccctggttgttaattttttttttcttctaaatatcgtgcgagtgctggtgactaagatgcgggagacccacgaggccgaaagtcatatgtatctgaaagccgttaaggcgacaatgatcttggtgcccttactgggaatccaattcgtggttttcccctggaggcccagcaataaaatgcttggcaagatctacgattacgtgatgcatagtctcatccactttcagggatttttcgtggctacgatatactgcttctgtaataatgaggtgcagacaacagtgaagcgccagtgggcccagttcaaaatccagtggaatcaacgatggggacgcaggccaagtaacagatctgcacgggctgctgcagccgccgccgaggctggagacatccccatttatatttgtcaccaggagctgcgtaacgaaccggcaaacaatcagggggaagaaagcgctgaaatcattccgcttaatattattgagcaggagagtagcgcatag

SEQ ID NO: 181109 - DNA, 1425 bp, synthetic construct
  misc_feature 1..1425: note = Description of Artificial Sequence: Synthetic coding sequence
  source 1..1425: mol_type = other DNA
atgcggttcaccttcaccagccggtgcctggccctgttcctgctgcttaaccatccaacacctattctgccagctttcagtaaccagacctatcccacaatcgaacccaaaccgttcctatacgtcgttggcaggaagaaaatgatggatgcccaatacaagtgctacgatcggatgcagcagttgccggcatatcagggcgaggggccctactgtaatagaacttgggacggctggctatgctgggacgatacccccgcaggcgtgctgtcatatcagttttgtccagattacttccctgatttcgacccttctgaaaaggtcaccaaatattgtgatgagaagggggtctggttcaaacatccagaaaataaccgcacctggtccaattacactatgtgtaatgcgtttacccctgagaagctgaagaatgcctatgtactgtattatctcgcgatcgtgggccactctttgagtatattcactctcgtcatcagtctgggcatttttgtcttcttccgctccctaggttgtcagagggtaaccctacacaagaacatgtttctgacatacattctgaattcaatgattattataattcatttagtcgaggttgttcccaatggcgagctggtccgcagagacccagtgagttgtaagattctgcacttcttccatcaatacatgatggcctgcaattatttctggatgctgtgcgaaggcatctatttgcatacgttgatcgtggtggctgtattcacggagaagcagcggcttcggtggtactatctcctcggatgggggttccccctggtaccaacaaccatccacgcaatcacacgggctgtgtatttcaacgacaattgctggctgtctgtagagacccacctgctgtacatcattcatggaccggtgatggccgcccttgtggtgaacttcttcttcctgcttaacatcgtgagggtattagtgaccaagatgagggaaactcacgaggccgagagtcatatgtatctgaaagcggtcaaggcaaccatgattctggtgccattgctggggattcagtttgttgtgttcccctggcgtccatccaacaagatgctaggaaagatctacgattatgtgatgcacagcctcattcactttcaaggtttttttgtagctacaatctattgcttttgtaacaatgaggttcagacaaccgtgaagcgccagtgggcacaattcaagatacagtggaatcagcgatggggaaggagaccatccaaccgcagcgcaagagctgcagccgcagcagctgaggccggcgatatccccatctacatttgccatcaggagcttagaaacgagccagcaaacaaccaaggggaagagagcgccgaaatcatcccactgaacattattgagcaagagtcttccgcatag

SEQ ID NO: 181110 - DNA, 825 bp, synthetic construct
  misc_feature 1..825: note = Description of Artificial Sequence: Synthetic coding sequence
  source 1..825: mol_type = other DNA
atgcggttcaccttcaccagccggtgcctggccctgttcctgctgctgaatcacccgacccccattctccccgctttttctaatcagacgtatcccaccatcgaacctaagccttttctctatgtggtcgggcgtaaaaaaatgatggatgcccagtacaagtgctacgatcgaatgcagcagctccctgcctatcaaggggagggcccgtactgcaaccggacgtgggacggatggctttgctgggatgatacgcccgccggtgtgctgtcctaccaattctgtcctgactattttcccgacttcgatccctccgagaaggtgacaaagtactgcgatgagaaaggcgtgtggtttaaacaccccgagaataatagaacatggtcaaactacacaatgtgtaatgccttcacccccgagaaactcaaaaatgcctatgttctctactatctcgccattgtaggacacagcctgtcaattttcacgctggttatcagccttggcattttcgtcttcttcagaagtctaggatgccagcgcgtgacactgcacaagaatatgttcctgacttacattctgaatagtatgatcataatcattcatctcgtggaagttgtgcctaatggcgagctcgttaggagagaccctgtgtcttgcaagatactgcacttttttcaccagtatatgatggcttgtaattatttttggatgctctgtgaagggatctacctgcacaccctgatcgtggtggccgtctttaccgagaagcagcggctaaggtggtattaccttttgggatgggccccagccttccaccgggactag

SEQ ID NO: 181111 - DNA, 1473 bp, synthetic construct
  misc_feature 1..1473: note = Description of Artificial Sequence: Synthetic coding sequence
  source 1..1473: mol_type = other DNA
atgcggttcaccttcaccagccggtgcctggccctgttcctgctgttgaaccacccgacacctatcttgcctgccttctctaatcagacttaccccacaatcgagccaaagccattcctttacgtagtaggtcgcaagaaaatgatggacgctcagtataagtgctacgacaggatgcagcagctgcccgcttaccagggggaagggccgtactgcaaccgtacatgggacgggtggctatgttgggacgacacacccgcgggtgtgcttagttatcaattttgtcccgactactttccggactttgatccctccgagaaggttaccaagtattgcgacgagaaaggcgtctggttcaagcaccctgaaaacaacaggacctggtcaaattacacaatgtgcaacgccttcacgccagaaaaactcaagaatgcatatgtcctgtactacctggccatcgttggacattctctaagtatattcactttggtgatttctctgggaattttcgtgttttttcgaaagcttacaacgattttcccgttgaactggaaatatcggaaagccctgagcttggggtgtcagcgggttaccttgcacaaaaatatgtttttaacatatatcctgaactccatgattataatcatacacttggtggaggtggtacccaatggtgaactggtacgcagagaccccgtctcctgcaagatcctacacttcttccatcagtacatgatggcatgcaattatttctggatgctgtgtgagggaatctacttgcataccctgattgtggtggctgtctttactgaaaaacagagactccggtggtactacctcttgggatggggcttcccattggtacctacaacaatacacgcgatcacccgtgcagtctactttaacgataattgctggctcagcgtggagacccacctgctctatataatacacggcccagtgatggctgcgttagtcgtcaactttttctttttgctcaacattgtcagggtgctggtgaccaaaatgagggagacccatgaggctgagtcccacatgtatctcaaagccgtcaaggccacaatgattctggtgccactgctgggaatacaatttgtggtgtttccttggcgtccttccaacaagatgctgggtaaaatctacgactatgttatgcacagcctgatccactttcaaggattcttcgtggccacaatctactgtttttgtaacaacgaagtccaaacaaccgtcaaacgccagtgggcccagttcaagatccaatggaaccagcgctggggccggcggccctccaatcgcagcgcacgcgccgcagcagccgccgcagaagcaggcgacatacccatatatatatgccatcaggagctccgaaacgaaccagctaacaaccagggcgaagaatctgccgaaataataccactgaacattatcgaacaggaaagctcagcttag

SEQ ID NO: 181112 - DNA, 873 bp, synthetic construct
  misc_feature 1..873: note = Description of Artificial Sequence: Synthetic coding sequence
  source 1..873: mol_type = other DNA
atgcggttcaccttcaccagccggtgcctggccctgttcctgctgctaaaccatccaacacccattctccctgcctttagcaatcagacctatcctacaatcgaacctaaaccctttctatacgttgttggcagaaaaaagatgatggacgctcaatataagtgttacgatcgtatgcaacagttgccagcctatcagggcgagggaccgtactgtaaccgtacctgggacggctggctttgttgggacgacaccccggccggagttctgagttatcaattttgtcccgattattttcccgatttcgacccaagcgagaaggtgacgaagtactgcgatgagaagggtgtctggttcaaacatcccgaaaacaatcgcacatggtccaactacactatgtgtaatgcatttacacccgagaagctaaagaatgcctatgtgctgtattaccttgcaatcgtggggcattctctgtctatctttaccctggtgatttctctcggaatcttcgtcttctttaggaagctgacaactatcttccctttgaattggaagtaccgtaaggccctatccctcgggtgtcagagagttacactgcataaaaacatgttcctgacatacattctcaattcaatgatcatcatcatccacttggtcgaggtcgttccaaatggcgagctggtgaggcgggacccagtctcttgcaagatcctgcatttcttccatcagtacatgatggcctgtaactacttctggatgctatgtgaaggaatatacttgcatacgctgattgttgtggccgtcttcactgaaaagcagcgtctgcgctggtactatctcctcgggtgggctcctgccttccatagggattag

SEQ ID NO: 181113 - DNA, 1425 bp, synthetic construct
  misc_feature 1..1425: note = Description of Artificial Sequence: Synthetic coding sequence
  source 1..1425: mol_type = other DNA
atgcggttcaccttcaccagccggtgcctggccctgttcctgctgctaaatcaccctacccctattctgcccgccttctccaatcagacatatcccactatagagcccaagccgtttctctacgtggtaggccgaaagaagatgatggacgctcagtataagtgctatgaccgtatgcaacagttacctgcataccagggcgaaggtccatactgcaaccgcacctgggatggttggctgtgctgggatgacacccctgccggagtgctcagctatcagttctgtcccgactattttccagatttcgatccgtctgagaaagtaacaaaatactgtgatgagaagggcgtctggtttaagcacccagaaaataatcgcacctggagtaactatacaatgtgcaacgcgttcacacctgaaaaactgaaaaacgcttatgtcctctattacttagcaattgtcggccactccctgagcatttttacactagtgataagtctggggatcttcgtcttcttccgcagcctgggttgccaaagggtgactctgcacaagaacatgttcctcacctacatcctgaactcgatgatcatcataatacacttggtggaggtggtaccaaatggagagttagtgcgacgtgatcctgtgagctgtaagatcctgcacttcttccaccagtatatgatggcttgcaattacttctggatgttgtgtgagggcatctatctgcatactcttatcgttgttgctgtttttacggaaaaacagaggctgcgttggtactacctgctgggctggggcttccctttggtacctacaaccatccatgcaatcacccgcgcggtttattttaatgacaattgctggctatccgtcgaaacgcatctgctctatattatccatgggccagtgatggcggctttggtcgttaatttcttctttcttctgaatatagttcgggtcctggttacaaagatgagggagacgcatgaagccgagagccatatgtatctcaaggctgtgaaggccacaatgatacttgtgccgctcctgggaattcaatttgtagtctttccctggcgcccatcaaataagatgctcggaaaaatctacgattatgttatgcactcactaatacatttccaaggtttttttgttgccactatatactgcttttgtaacaatgaagttcagacgacggtcaaacggcagtgggcccagttcaaaatacagtggaaccagaggtggggcaggcgtcctagcaatagaagcgcccgcgccgctgctgcagccgccgaagcgggtgatatcccaatctatatctgccaccaggaactgaggaacgagccggccaataatcaaggtgaagagtctgccgagatcatccctttaaacatcatcgaacaggaatctagcgcttag

SEQ ID NO: 181114 - DNA, 489 bp, synthetic construct
  misc_feature 1..489: note = Description of Artificial Sequence: Synthetic coding sequence
  source 1..489: mol_type = other DNA
atgcggttcaccttcaccagccggtgcctggccctgttcctgctgctgaatcacccaactcccatcctcccagccttctctaatcagacgtatccaacaatagaaccaaaaccctttctttacgtcgtcgggcgaaagaagatgatggatgctcagtataaatgttatgataggatgcagcaactgcccgcttatcaaggtgagggaccatattgcaacagaacttgggatggatggctgtgctgggacgatacaccagccggcgttttgagctatcagttttgccctgattattttccagatttcgatcccagcgaaaaggttacgaaatactgcgacgagaaaggcgtgtggttcaaacaccctgaaaacaatagaacatggtccaattataccatgtgcaatgcctttactcctgagaagttaaagaacgcctacgtgctatattatctggcgattgtgggccattcttgccagtttagcccatag

SEQ ID NO: 181115 - DNA, 1386 bp, synthetic construct
  misc_feature 1..1386: note = Description of Artificial Sequence: Synthetic coding sequence
  source 1..1386: mol_type = other DNA
atggagaagaagtgcaccctgaacttcctggtgctgctgcccttcttcatgattttggtcacagccgagcttgaggagtcacctgaggactcaattcagctcggcgttactcgcaacaagatcatgacagctcaatacgaatgctaccagaagatcatgcaggatcccattcaacaggccgaaggcgtgtattgtaatagaacttgggatggatggctgtgctggaatgacgttgccgccggcacagaatccatgcagttatgtcccgattactttcaggattttgatccgtcggaaaaagtgaccaagatctgcgatcaagatggtaactggtttcggcatcccgctagtaaccggacctggactaattacacccagtgcaacgtcaatacacacgagaaggtgaaaactgccttgaacctgttttatctgacaatcataggccacggcctgtccattgcttcactgctaatctccctaggaattttcttttacttcaagagcctgtcatgccagcggattactctgcataaaaacttattttttagtttcgtgtgcaacagtgtggttacaattatccacctgacagctgtcgcaaataatcaagctctggtcgcaacaaatccagtctcttgcaaagtcagtcaattcatccatctgtatttgatgggctgtaactatttttggatgttatgcgaaggaatatacttgcataccttgatagtggttgcagtatttgcagaaaagcagcatctgatgtggtactatttcctggggtggggtttcccccttatacccgcctgcattcacgccatcgcccggagcctttattacaacgacaattgttggatttcatcggatactcacctcctgtacatcatccacggacccatttgcgctgctctcttggttaaccttttttttctgctgaatattgtgagagttctgataacaaagctgaaagtgactcatcaggctgagtcgaacctttatatgaaggcggtacgcgcgaccctgatcctcgtccccctgttaggcatcgaatttgtccttattccttggaggcctgaaggaaagatcgcagaggaagtgtacgactacattatgcacatcctgatgcacttccagggactgcttgtgtccaccattttctgttttttcaatggcgaggtgcaggctatcctgaggcggaactggaaccaatacaagattcagtttgggaattcattttctaatagcgaggcgctgaggagcgcctcttatacagtgtcaactatctcagatggacctggatactcccacgactgtcccagcgagcacctgaacgggaagagcatacacgatatcgagaatgttctgttaaagccggagaacctctacaactag

SEQ ID NO: 181116 - DNA, 1386 bp, synthetic construct
  misc_feature 1..1386: note = Description of Artificial Sequence: Synthetic coding sequence
  source 1..1386: mol_type = other DNA
atggagaagaagtgcaccctgaacttcctggtgctgctgcccttctttatgattctcgtgaccgccgagctcgaggaaagtcccgaggatagcatccagctgggcgttacgcgcaacaagataatgaccgcccagtacgaatgctaccagaagatcatgcaggacccaatacagcaagcggagggcgtctattgcaacagaacttgggatgggtggctgtgttggaacgatgtggccgctggtacggagagcatgcagctctgtcctgattactttcaggacttcgatccttcggagaaagtgactaagatctgtgatcaggatgggaattggtttcgtcatccagccagcaataggacctggacaaactacacacagtgcaacgtgaacacacacgaaaaagtgaaaaccgctctcaacctgttctaccttaccattatcgggcacggcctgtcaattgcttcgctgctgatctcactgggtatttttttctacttcaagtccctgagctgccagaggattaccctacataagaatctgttcttttcattcgtgtgcaacagcgtggtcaccattatacatttgacggccgttgccaacaatcaggccctggtagccaccaatcctgtgtcatgcaaggtcagccagtttatccatctgtacctgatgggctgtaattacttctggatgctctgcgagggtatctacctccacacattaattgtcgtagcagtctttgctgagaagcaacatcttatgtggtattactttctagggtggggttttcccctaattcctgcctgtatccacgcaatcgctcgcagtttgtattacaatgataactgctggatctcatctgacactcaccttttgtacattattcatgggccaatctgtgctgcactgctggtcaatctctttttcctcttaaacatagttagagttctgatcaccaagctcaaggtgactcaccaggccgaatcaaatctgtacatgaaggccgtgagggccacccttatcttagtgcccttgctgggcattgaattcgtgctgatcccttggagacctgaagggaaaatcgctgaggaggtgtatgactatattatgcacattctgatgcatttccaaggtttgctggtgagcacaatcttttgcttctttaatggcgaggtccaggcaatccttcgccgtaactggaatcaatataagatccaatttggaaactctttcagcaactcagaagcgctgaggagcgcttcttacaccgtatccaccatctctgatggcccaggatactcccacgactgccctagcgagcacttgaatggcaaatcaatccacgacatcgaaaatgtgctactaaagcctgagaacctgtacaactag

SEQ ID NO: 181117 - DNA, 1386 bp, synthetic construct
  misc_feature 1..1386: note = Description of Artificial Sequence: Synthetic coding sequence
  source 1..1386: mol_type = other DNA
atggagaagaagtgcaccctgaacttcctggtgctgctgcccttcttcatgatcctggtgacagccgagctggaagagtcacctgaagactccatacagctgggcgtgactagaaacaaaatcatgaccgcccagtacgagtgttatcagaagataatgcaggacccaattcagcaggctgaaggcgtatattgcaatcgcacttgggacgggtggctctgctggaatgacgtagccgcgggaaccgagtctatgcagctatgccctgattattttcaagattttgacccttccgagaaggtgacgaaaatttgcgaccaggacgggaattggtttcggcatcccgcaagcaatcgaacatggactaattacacccagtgcaatgtgaacacccacgagaaggtcaaaactgctctgaacctgttctatctcactattattggccacggtctgagtatcgcatctttgctgatctctctggggattttcttctactttaagtctctttcctgtcagcggatcacgctgcataagaatttatttttcagtttcgtgtgcaactccgtcgttacaattatacatctgactgccgtggccaataaccaggccttagttgcaacaaaccctgtaagctgtaaggtgtcacagtttatccatctgtatctgatgggctgcaactatttctggatgctctgcgaaggcatttatctgcacacactcattgtcgtggctgtgttcgctgagaaacaacacctgatgtggtattacttcctcggatggggcttccctctgatcccagcttgcattcatgccatcgcacgatccctttattataacgacaattgctggatctcgtccgatactcatctgttatatattattcacggtcctatttgcgctgcgctccttgtgaacctcttcttcttactaaacatagtgagggtactcatcaccaaattgaaagtaacgcatcaggctgagagtaatctgtacatgaaggccgtgagggccacactgattttagtgcccctgctgggcattgagtttgtcctaataccctggaggcccgaaggtaagatagccgaggaagtctacgattatattatgcatatactgatgcacttccagggtctgttggtgtctactatcttctgctttttcaatggggaagtacaggcgattttgcggagaaattggaatcagtacaagatccagtttggcaactcattttctaacagcgaggcgctccgatccgcatcgtacacagtaagcaccatttcagatggcccaggttatagccacgactgtccttcagagcacttgaacggcaaatcaatacacgatattgaaaacgtgctgctgaagcccgaaaacttgtacaattag

SEQ ID NO: 181118 - DNA, 114 bp, synthetic construct
  misc_feature 1..114: note = Description of Artificial Sequence: Synthetic coding sequence
  source 1..114: mol_type = other DNA
atggagaagaagtgcaccctgaacttcctggtgctgctgcccttctttatgatcctcgtgacagctgagcttgaagagagccccgaagacagcattcagctcggcgtcacatag

SEQ ID NO: 181119 - DNA, 237 bp, synthetic construct
  misc_feature 1..237: note = Description of Artificial Sequence: Synthetic coding sequence
  source 1..237: mol_type = other DNA
atggagaagaagtgcaccctgaacttcctggtgctgctgcccttctttatgattctggtcacagccgagctggaggagtcacccgaggacagcattcagctcggagtgaccaggaacaagattatgactgcccaatatgagtgttaccaaaagatcatgcaagacccgattcagcaggccgagggcgtgtattgtaataggacctgggatggttggctgtgttggaatgacgtgtag

SEQ ID NO: 181120 - DNA, 426 bp, synthetic construct
  misc_feature 1..426: note = Description of Artificial Sequence: Synthetic coding sequence
  source 1..426: mol_type = other DNA
atgggcttccagaagttcagccccttcctggccctgagcatcctggttctgctgcaagctgggtctcttcatgcggcgccattcagatcggccttagagagtagtcccgccgatcctgccaccctctcagaggatgaagcaagattgcttcttgcagcactggtacagaattatgtccaaatgaaggctagtgaactggaacaagaacaggagcgggagggatcttctctggactctcctcggtcaaaacggtgcgggaacctctccacgtgtatgcttggaacatatactcaggactttaacaaattccatacattcccccagaccgccatcggagtcggggctcctggaaaaaaaagagacatgagcagcgacttggaaagggaccacagacctcacgtgtccatgcctcagaatgcaaactag

SEQ ID NO: 181121 - DNA, 426 bp, synthetic construct
  misc_feature 1..426: note = Description of Artificial Sequence: Synthetic coding sequence
  source 1..426: mol_type = other DNA
atgggcttccagaagttcagccccttcctggccctgagcatcctggtactgctacaagctgggtcactccacgccgctcctttccgttcagcactcgaaagttccccagcggatcccgcgactctgtctgaagacgaggccagattgctgctggctgcccttgtgcagaactatgtacagatgaaggccagcgaattggaacaggagcaagagcgagaaggcagttccttagatagtccgaggagtaaacgttgtggcaatttgagtacatgtatgcttgggacatacacgcaagattttaacaagttccacacctttccccagactgcaattggcgttggagcacctggaaagaaacgggacatgtcttccgatctggagcgcgatcacagacctcataatcactgccccgaggagagtctgtag

SEQ ID NO: 181122 - DNA, 387 bp, synthetic construct
  misc_feature 1..387: note = Description of Artificial Sequence: Synthetic coding sequence
  source 1..387: mol_type = other DNA
atgggcttccagaagttcagccccttcctggccctgagcatcctggtgctcctccaggctggatccctgcacgcagcgccgttccggtcagctcttgagtcttcgcctgccgatcccgctaccctgtccgaggacgaagctcgtctgctgcttgctgcgctcgtgcaaaattatgttcaaatgaaggcctctgaactggagcaggagcaagagcgcgaagggtcccggattatcgctcagaaacgcgcgtgcgatactgccacgtgcgtgacccatcgactggccgggctgcttagccggtctggaggagtggtgaaaaacaattttgttccgaccaatgtcggtagtaaagcatttggccgcaggagaagagacctccaggcttag

SEQ ID NO: 181123 - DNA, 426 bp, synthetic construct
  misc_feature 1..426: note = Description of Artificial Sequence: Synthetic coding sequence
  source 1..426: mol_type = other DNA
atgggcttccagaagttcagccccttcctggccctgagcatcctggttctcctccaagccggctcacttcacgcagcaccgttcagaagtgccctggagagctctcctgcagatcctgccacattgagcgaggatgaagcccgattattgctcgccgctctggtgcagaactatgtacagatgaaagcatcagagttggagcaggaacaagagcgtgagggctcttcacttgactctcctcgcagcaagcgctgcggaaatctctcaacttgtatgttggggacttacacacaggactttaacaaattccacacttttcctcagacagccatcggggtgggggcacccggcaaaaagagagatatgagcagcgacctggagagggatcataggcctcatgtcagcatgcctcagaacgcgaattag

SEQ ID NO: 181124 - DNA, 387 bp, synthetic construct
  misc_feature 1..387: note = Description of Artificial Sequence: Synthetic coding sequence
  source 1..387: mol_type = other DNA
atgggcttccagaagttcagccccttcctggccctgagcatcctggtcctgctccaggccggctctctgcacgctgcacccttcaggagcgccctggaaagcagccctgctgatcccgccacactctctgaggatgaggcgcgcctgttgcttgccgcactcgtgcaaaattatgtccagatgaaggcatcagaactcgaacaggaacaagagagagaagggtccagaatcatagcacagaagagggcttgcgacaccgcaacatgcgtaactcatcgcctggctggtctgctcagcaggagcggcggcgtggtcaagaataatttcgtgcccacaaatgtcgggagtaaggcattcggcaggaggagacgagacctgcaggcatag

SEQ ID NO: 181125 - DNA, 384 bp, synthetic construct
  misc_feature 1..384: note = Description of Artificial Sequence: Synthetic coding sequence
  source 1..384: mol_type = other DNA
atgggcttccggaagttcagccccttcctggccctgagcatcctggtgctatatcaggccggaagtttacaggccgctccttttcggagcgccctggagtcaagcccagatccagctaccttatctaaagaggacgcccgcctactactcgcagctttggtccaagattatgtgcaaatgaaagccagcgagctgaaacaagaacaggagacacaagggtcatcatcagctgcccaaaaacgggcctgtaatactgctacttgtgttactcatcggctggccggtctcctgagtcggagtgggggcatggtgaagtctaatttcgtccccactaatgtcggctcaaaggcgtttgggagacgcaggagagatctacaagcatag

SEQ ID NO: 181126 - DNA, 417 bp, synthetic construct
  misc_feature 1..417: note = Description of Artificial Sequence: Synthetic coding sequence
  source 1..417: mol_type = other DNA
atgaagaaggaggccaacctgcagcggggcggcatgggcttccggaaattcagccctttcctggctctgtccatcctggtgctttatcaggccggatcattgcaggctgcgccatttagatctgcgttggagtcttcacccgatcctgccactctaagcaaggaagacgcacggttgttgctggctgccctggtgcaagactacgtgcagatgaaagccagcgagttaaaacaggagcaagaaacacagggttcctcatcggcagcccagaaacgcgcctgcaacaccgcaacgtgtgttacgcatcggttggccggattactttcgcgtagcggtggaatggtgaaatctaatttcgtgcctacaaatgtgggcagcaaagcgtttggcaggaggaggcgggacttgcaagcctag

SEQ ID NO: 181127 - DNA, 384 bp, synthetic construct
  misc_feature 1..384: note = Description of Artificial Sequence: Synthetic coding sequence
  source 1..384: mol_type = other DNA
atgggcttccggaagttcagccccttcctggccctgagcatcctggttctctaccaggccggttccctccaggccgccccgtttaggagcgcattggagtccagtccggacccagcaacactctccaaagaagatgcgaggttgctgcttgcggccctcgtgcaggattacgtccagatgaaagcctccgagctgaaacaagagcaagaaacccagggcagctcatctgccgcccagaaacgagcatgtaacacagcaacctgtgttacccacagactggccgggcttctgtcccgctccgggggtatggtaaaatccaatttcgtcccaacaaacgttggtagcaaggcatttggccggcgccggagagatttacaggcctag

SEQ ID NO: 181128 - DNA, 1206 bp, synthetic construct
  misc_feature 1..1206: note = Description of Artificial Sequence: Synthetic coding sequence
  source 1..1206: mol_type = other DNA
atgcccgtgcagctgagcgagcaccccgagtggaacgagagcatgcattccctccgcatatcagtcggaggcctccccgtgctcgcgagcatgaccaaagcggctgacccgagattcagacccaggtggaaagtcattctgacttttttcgtgggcgctgccatcttgtggctgttgtgttcccacaggcctgctcctgggagacccccaacccacaacgcacacaattggcggctgggccaggcgcccgccaactggtacaacgacacctaccctctgtctccaccacagcggacccccgctggtatccggtacagaatagccgttattgccgacctcgataccgagtctcgggctcaagaggagaacacctggttctcatatctaaaaaagggttatcttacgttgtctgactccggtgataaggtggcggtggaatgggacaaagatcacggtgtgctcgagagccacttggcagaaaagggaagaggcatggagctgagcgatcttattgtgttcaacggtaagctgtattccgtggatgaccgcacaggagttgtttaccaaatagaaggatctaaggctgtgccgtgggtcatattgtccgatggcgatggcacagttgagaaaggcttcaaggccgagtggttagcagtgaaggacgagcgcctgtacgtgggaggcctgggcaaggaatggaccacaacgacgggcgacgtcgtgaatgaaaaccccgaatgggtgaaagtcgtgggctataagggctctgtagaccacgagaattgggtgagtaactataacgcactccgcgccgcagctggaatccagcccccaggttacctcattcatgaaagcgcttgctggtcagacactctccagcggtggttcttccttccacggcgcgccagtcaagagcggtactctgaaaaggatgacgaacgcaagggggccaatctgctgctcagtgctagtccagacttcggggacatcgccgttagccatgtgggagcagtggtgccaacgcacgggttttcttcttttaagtttatcccaaataccgatgatcagatcattgtggccctgaagtctgaagaagattccggccgagtcgcaagctacattatggctttcacactggacggccggtttctcctgcccgagactaagattggatccgtcaagtatgagggaatagaattcatctag

SEQ ID NO: 181129 - DNA, 1053 bp, synthetic construct
  misc_feature 1..1053: note = Description of Artificial Sequence: Synthetic coding sequence
  source 1..1053: mol_type = other DNA
atgcccgtgcagctgagcgagcaccccgagtggaacgagagcatgcacagcctgagaattagtgtgggtggcctgccagtgttagccagtatgacaaaggccgctgaccccaggttccggcccagaagtccaccacagagaacaccagctggcatacggtataggatcgccgtgattgctgatctggacaccgagtccagggctcaggaagagaatacgtggttttcttatctcaagaagggttatctgacactgtcggatagtggagataaagtggcagtcgagtgggataaggatcacggcgttctggagagccacctggctgagaagggcagagggatggagctatctgatctgattgtttttaacggcaaactgtattctgtggatgacagaacgggcgtagtctatcagattgagggctctaaggctgtgccatgggtgatactctccgacggcgacgggaccgtggaaaagggcttcaaggccgagtggctcgctgtgaaagacgaacgcctttacgtcggaggtctgggaaaggagtggactacgacgacgggagatgtggtgaacgaaaacccggaatgggtgaaagttgttgggtataagggtagcgtggaccacgagaattgggtctccaactacaacgcccttagagccgccgctggcatccagcctcctgggtacctgattcacgagagcgcctgctggtccgacacactgcaacggtggttttttttaccacggcgagcaagtcaggagcgctactccgagaaggacgatgagcgaaaaggcgctaacctgctactgtcagcatctcccgactttggggatatcgcagtcagtcatgtgggggctgtggtccctacccacgggttctcatcgttcaagttcatacctaacactgacgaccagataatagtggcacttaagagtgaagaagattctggtcgtgttgcctcttatatcatggcatttaccctggatggccgatttttgctccctgagaccaaaattgggagcgtaaagtatgaaggaattgagtttatttag

SEQ ID NO: 181130 - DNA, 1206 bp, synthetic construct
  misc_feature 1..1206: note = Description of Artificial Sequence: Synthetic coding sequence
  source 1..1206: mol_type = other DNA
atgcccgtgcagctgagcgagcaccccgagtggaacgagagcatgcacagtctacgcatcagcgtcggaggtctcccggttttggcctccatgaccaaagccgccgatccaaggttcaggcctcgctggaaagtgatactgaccttttttgttggagccgctatcttgtggcttctgtgttctcatcgccccgctcccggacgacctccgacccacaatgcccataattggcggctgggccaggctcctgccaattggtacaacgacacataccctctttctcccccgcaacgcacccccgctgggatacgatacagaattgcagtgattgcagatttagacacagaatcaagggcccaagaggagaacacttggttctcctatctgaaaaagggctaccttacactctctgacagtggggacaaggtggccgtggagtgggacaaggatcacggtgtcttagagtctcacctggctgagaagggccggggtatggagctcagcgatctgattgttttcaatggaaagttatattccgtggacgacagaacaggagttgtgtaccagatcgaagggagcaaagccgtcccttgggtcatcctgagtgacggtgacggaacagtggaaaaaggattcaaggctgaatggctggctgtaaaggatgagcggctgtacgttggtggtttggggaaggaatggaccacaaccaccggcgacgtggttaacgaaaaccccgaatgggtgaaagtcgtgggctacaaggggtctgtggaccatgaaaactgggtaagtaactacaatgcactgcgcgcagctgccggaattcaaccacctgggtacctaatccacgagtcggcctgctggtctgacacgcttcagaggtggttttttctgccaagaagggcctcacaggagagatattctgaaaaagatgacgagcgcaagggagctaacctcctgctgtccgcctcacctgattttggagatatcgctgtctcccatgttggcgccgtggtgcctactcacgggttctcttctttcaaattcatcccaaacaccgacgaccaaatcattgtagccttgaagagtgaggaggattctggtagggtggctagttatatcatggcattcactttggacggaaggttcctgctgcccgagacgaagatcgggtctgttaaatacgaaggcatcgaattcatctag

SEQ ID NO: 181131 - DNA, 738 bp, synthetic construct
  misc_feature 1..738: note = Description of Artificial Sequence: Synthetic coding sequence
  source 1..738: mol_type = other DNA
atgcccgtgcagctgagcgagcaccccgagtggaacgagagcatgcattccttgcggatctccgtgggtggcctgccggtccttgcaagtatgaccaaagccgcggatcctcgatttcggccgagatggaaagtgattctgaccttttttgtgggtgctgcaatattgtggcttctgtgtagtcatcggccggcacctggcagacctccgacacacaatgctcataactggcgactcggccaagcacctgctaattggtacaacgacacttatccattgagtccccctcagcggacacctgccggaattcgatacagaattgctgtgattgccgacctggacacagagagtagggcccaggaagagaacacatggtttagttacttgaagaaggggtatctgacactgagcgatagcggagacaaagtggccgtcgagtgggataaagatcacggcgtgctagaatctcacctggctgaaaagggtcgcggaatggaactatcagatctgatagtctttaacgggaagctgtattctgtcgatgatcggacgggggtggtctatcagattgagggatcaaaagccgtgccctgggtgattttgtcggatggcgatggaacagtagaaaagggcgtgggtggggagtgggaagcagtgagggaaatcgtgcgcaagcgctggcggctcgtgaagcaggtgagccacgtgggcgtcttgggccaatggatccagagatag

SEQ ID NO: 181132 - DNA, 663 bp, synthetic construct
  misc_feature 1..663: note = Description of Artificial Sequence: Synthetic coding sequence
  source 1..663: mol_type = other DNA
atgggcaactgcgccaagcggccctggcggcggggccccaaggaccctcttcagtggctaggctccccacccagaggatcatgccctagcccaagtagctctcctaaagagcaaggcgaccccgcccccggagtgcagggctactccgtgttgaattccctggttggcccggcttgcatctttctacggccgtcaattgctgccacccaactggatagagaactgcgccccgaggagattgaagaacttcaggtggcattccaagagttcgatagagacagagatggttatatcggctgtcgcgaactcggagcctgcatgcgcaccttgggctacatgccgaccgaaatggagctgattgagatctctcagcaaatcagtggtggcaaggtggattttgaagattttgtagaactcatggggcccaaactgctggccgagacagccgatatgataggcgtaagagaattgagagacgcattccgtgagtttgacactaacggagacggtagaatttctgtgggggaactgagggcagctcttaaggccctgctaggtgaacgcctgtctcagagagaggtggatgagattctgcaagacgtggacctcaatggggacggcttggtggactttgaggaatttgttagaatgatgtccaggtag

SEQ ID NO: 181133 - DNA, 1026 bp, synthetic construct
  misc_feature 1..1026: note = Description of Artificial Sequence: Synthetic coding sequence
  source 1..1026: mol_type = other DNA
atgcccttccccttcggcaagagccacaagagccccgccgacatcgtcaagaacctaaaggagagtatggccgtgctcgagaagcaggacatcagcgacaagaaagcagagaaggccaccgaggaagtgtccaagaacctagttgccatgaaagagatcctgtatgggacgaacgaaaaggaaccacaaacggaggccgtcgcccagttggcccaggaactatacaactcaggtctgctgagcaccctggtggctgatctgcagctgatcgatttcgagggaaagaaagacgttgcacagattttcaacaatatcctccgtagacagattggaaccaggacaccaacagtggagtacatctgcacacagcaaaacatcttatttatgttgctgaagggctacgaatcacccgagatagcactcaattgtggcatcatgctgcgcgagtgcatacgacacgaacccctggcgaaaatcattctctggagtgagcaattctacgacttttttcggtatgtggagatgagcaccttcgatatcgccagcgacgcttttgctaccttcaaggatttactgacgaggcataaactcctgtcagccgagtttctggaacagcattatgaccggttcttttctgaatacgagaagctgctgcatagcgagaattacgttacgaaaaggcagagcctaaaactcctgggggaactcctgctggatcgacataatttcacaatcatgactaagtacattagcaaacctgaaaacctgaagttaatgatgaacttactacgggacaagtcacgcaatatccagttcgaagccttccacgtctttaaagtgtttgtggctaatccaaataagacgcagcctattctcgacatcctgctgaagaatcaggcaaagctgattgagtttctgagcaaattccaaaatgacagaacggaagacgaacagttcaacgatgaaaagacatatctggtgaaacaaatcagggacctcaaacggcccgctcagcaggaagcatag

SEQ ID NO: 181134 - DNA, 1026 bp, synthetic construct
  misc_feature 1..1026: note = Description of Artificial Sequence: Synthetic coding sequence
  source 1..1026: mol_type = other DNA
atgcccttccccttcggcaagagccacaagagccccgccgacatcgtcaagaatttaaaagaatctatggccgtgcttgaaaaacaggatataagcgacaaaaaggctgaaaaggccaccgaagaagtgtctaagaatcttgttgcgatgaaagaaattttatatggaaccaatgaaaaagagccacagaccgaagcagtcgcccaattagcccaggaactgtataatagcggtctgctatcaacactggtcgccgatctccagcttattgactttgaaggcaaaaaggacgtagcgcaaatctttaacaatatcctgcggagacagatcggcacacggacgcccacagtcgagtacatctgtacccaacagaatattctatttatgctgttgaagggctacgagagcccggagatcgcactgaactgtgggattatgctgcgtgaatgtatcaggcatgaaccacttgcaaagattattctttggagcgagcagttctatgacttctttcgatacgtcgaaatgagtacattcgatatagcgtctgatgcattcgcaacgtttaaggacctccttactcgacacaagctgctctccgctgaatttctcgagcagcattacgacagattcttttctgaatatgagaagctgcttcattcggagaactatgtaactaaacgccaatccctaaagctgctgggggagttacttctggacaggcacaattttaccatcatgacaaagtacattagtaagcccgagaatctgaagcttatgatgaacctgctgagagacaagtcccggaacattcagtttgaagccttccatgtcttcaaggtgtttgtggccaacccaaataaaacacagcccatccttgacattctcttaaagaatcaggcaaaactaatagaattcctgtctaaatttcagaatgacagaaccgaagacgaacaattcaatgatgagaagacctatcttgtgaaacagattcgtgacctaaaacgccctgcccagcaggaagcctag

SEQ ID NO: 181135 - DNA, 1026 bp, synthetic construct
  misc_feature 1..1026: note = Description of Artificial Sequence: Synthetic coding sequence
  source 1..1026: mol_type = other DNA
atgcccttccccttcggcaagagccacaagagccccgccgacatcgtgaaaaatctcaaggaatccatggctgtgctcgagaaacaggacatctccgacaagaaggctgaaaaggccacagaggaggtgtcgaaaaacttagtcgctatgaaagagatcctgtatgggacgaacgaaaaagagccacagacggaggctgtcgctcaactagcccaggagctctacaatagcggtctattatctaccttagtggccgatctgcagctcattgactttgagggaaagaaggatgtggctcagatttttaataatatcctccggcggcaaattggaacccggactcccactgtggaatatatctgtacccagcagaacatactgtttatgcttctcaaaggatacgagtcacctgagatcgcactcaattgcggaatcatgctgagagaatgtatacgtcacgagcctctggctaagatcatcctttggtccgaacaattctatgatttcttcagatacgtcgaaatgtcaacttttgacatcgccagtgatgcttttgccacattcaaggacctactgacaaggcataagctgctttcagcagaatttctggagcagcattatgataggttcttttccgagtacgaaaagctgctccattcagagaattatgtcacgaaacgccagagcctgaagctgctgggtgagctcctgctggataggcacaatttcacaattatgaccaagtacattagtaaaccagagaatctaaagttgatgatgaatctgcttagagataagagcagaaacatccagttcgaggcatttcatgttttcaaggtttttgtggctaaccctaataaaacacaacccatcctcgatattctcttaaaaaaccaggctaaactaattgagttcttgtccaagttccagaacgatagaactgaagatgagcagttcaatgatgagaagacctacttggtcaagcagatccgcgacctaaaacggcctgcgcagcaggaagcctag

SEQ ID NO: 181136 - DNA, 1014 bp, synthetic construct
  misc_feature 1..1014: note = Description of Artificial Sequence: Synthetic coding sequence
  source 1..1014: mol_type = other DNA
atgaagaagatgcccctgttcagcaagagccacaagaaccccgccgagatcgtcaagatcctcaaagataacttggctattctcgaaaagcaggataagaaaactgacaaggcttctgaggaagtgtcgaaaagtctgcaggccatgaaagaaatcctgtgcgggacaaatgagaaagagccacccaccgaggccgtggcacagttggctcaggaattatactctagtggactcttggtcaccttgatcgccgacctgcagctcattgacttcgaaggaaagaaggatgtgacccagatctttaacaacatactcaggcggcagatcgggacccgctcccccactgtagagtatatctcagcccatccccacatcctcttcatgctgttaaaaggatacgaggcgcctcagatcgcgctgcgatgcggcatcatgttgcgtgagtgcattcggcacgagccgcttgcaaagattatcttgtttagcaatcagttccgggactttttcaagtatgttgaattgtccactttcgacatcgcatcagatgccttcgcaacatttaaagacttgctcacccgccacaaagtgctggtggcggactttctggagcagaattatgataccatcttcgaagattacgaaaagctgttacaatccgagaactacgtaaccaaaaggcagtcactgaaactgctgggcgaactcatactagataggcacaattttgctataatgaccaagtacatttcaaaaccagaaaatttaaagctcatgatgaacctgctgcgcgacaaatcccccaatattcagttcgaagcattccatgtgtttaaggtgttcgtcgccagtcctcataaaacacagcctatcgttgagatcttactcaaaaatcaaccgaagctgattgagttcctgtcctccttccaaaaggagcgtactgacgatgagcagttcgcagacgaaaagaactacctgatcaagcagattagagacctcaaaaaaacagcgccctag

SEQ ID NO: 181137 - DNA, 1014 bp, synthetic construct
  misc_feature 1..1014: note = Description of Artificial Sequence: Synthetic coding sequence
  source 1..1014: mol_type = other DNA
atgaagaagatgcccctgttcagcaagagccacaagaaccccgccgagattgtgaagatactcaaagacaacttagctatcttggagaaacaggataaaaaaaccgataaggcttcagaggaggtgtctaagtcactccaggcaatgaaggaaatactgtgtggcaccaatgaaaaagagccacccacagaagcggtggcccagctagcccaggagctgtattcaagcggcctgttggtcaccctcattgccgatctccagctgatcgactttgaagggaagaaggacgtaacacaaatattcaataatatccttaggagacagatcgggacccgatcgcccactgtagaatacattagcgcccaccctcatattctttttatgctgctgaagggctatgaggccccgcagatcgcgctcaggtgtgggattatgctccgcgaatgtattagacacgaaccactggccaagattatcctgttttccaatcagttccgggacttttttaaatacgttgagctttctacattcgacatagcctcagatgcattcgcgaccttcaaggacctgttgactcgtcataaagtccttgtcgccgactttctggagcagaactatgataccatcttcgaggattatgaaaaactcctgcagagtgagaattatgttactaagcggcagtcattgaagctcctgggggagcttatcctggaccggcataacttcgctatcatgacaaaatacatttccaagccagaaaatctcaagctgatgatgaatcttctgagagataagtccccaaacatccagttcgaggcttttcacgtctttaaggtgttcgtcgcatccccacataaaacccagcccattgtagaaattctgctcaagaatcagcccaagctcatcgagtttctgagcagctttcagaaggagcggactgacgatgagcagtttgcagacgaaaaaaattacttgattaagcagatccgtgacttgaaaaaaacagctccatag

SEQ ID NO: 181138 - DNA, 945 bp, synthetic construct
  misc_feature 1..945: note = Description of Artificial Sequence: Synthetic coding sequence
  source 1..945: mol_type = other DNA
atgcccctgttcagcaagagccacaagaaccccgccgagatcgtgaagatcttgaaagataatttagcgattttagagaagcaagataagaaaacggataaggcctctgaggaagtgtctaagtccctccaggcaatgaaggagattctttgcggtaccaatgaaaaggaacctcccacagaagccgttgcacagctggctcaggaactctactcttccgggctgttggttacactgatcgccgatctgcagctaatcgacttcgaggggaagaaggacgttacgcagatatttaacaatatcctcagacgccagattggtactcgttctccaacagtggaatatatctccgcacacccacacattcttttcatgctcctgaagggctatgaggcgccgcagatcgccctgaggtgcggcattatgctgcgtgaatgcatacgtcacgaaccactcgcgaagattatcttgttctcaaatcagtttagggatttcttcaagtatgtggagttaagcacctttgacattgcatcagatgccttcgccacgtttaaaatatttgaagactacgagaagttgttacagtccgaaaattatgtcaccaaaagacagtccctgaaactgttaggcgaactgatcctggatcgccacaacttcgctattatgacaaagtacatttccaaacccgagaacctaaagctgatgatgaatctgttacgcgacaagagcccaaacatccaatttgaggcattccacgtgtttaaagtgttcgtggctagtccccacaagacccagccaatcgtggagattctgttgaagaaccagcccaagcttattgagttcctatcttcattccagaaagagaggacggatgacgagcaatttgctgacgaaaagaactatctcattaaacaaatccgggatcttaaaaaaacagctccctag

SEQ ID NO: 181139 - DNA, 282 bp, synthetic construct
  misc_feature 1..282: note = Description of Artificial Sequence: Synthetic coding sequence
  source 1..282: mol_type = other DNA
atgaagaagatgcccctgttcagcaagagccacaagaaccccgccgaaatagtcaagattctcaaggataacctcgctattttggaaaagcaagataagaaaaccgacaaggcatcagaagaggtgtcaaagtctcttcaagccatgaaagagattttatgcgggacgaatgaaaaagaacctccgactgaggccgtggcgcagctggcgcaagaactttactccagtggtctgctggttacgttaattgcagatctgcagctaatagatttcgaggtttag

SEQ ID NO: 181140 - DNA, 1014 bp, synthetic construct
  misc_feature 1..1014: note = Description of Artificial Sequence: Synthetic coding sequence
  source 1..1014: mol_type = other DNA
atgaagaagatgcccctgttcagcaagagccacaagaaccccgccgaaattgtgaaaattttgaaagataatctcgctattttagagaagcaagacaaaaaaaccgacaaggcttccgaggaagtgtcaaaaagcctccaggctatgaaggaaattttgtgcggaactaatgagaaggaaccacccactgaggccgtggcccagttagctcaggagctttactcctctggcctgctagtcacccttatagccgacctccagttgatcgacttcgaaggcaaaaaggatgtaacacagatttttaacaatatcctcagaagacaaatcggtacacgctctcctactgttgaatatatttctgcacatccacatatactctttatgctgctaaaaggttatgaggcccctcagatcgccctccgctgcgggattatgttgcgcgaatgtatcaggcacgagccactggctaagattatactgtttagcaatcaattccgcgatttttttaaatacgtggaactcagtacctttgacattgcctccgatgcgtttgctaccttcaaagatctgcttaccagacacaaggtactagtggcagacttcctcgagcaaaattatgacactatctttgaggactacgaaaaactccttcagtcagaaaattacgtcacgaaaaggcagagcttgaagctgctgggagagttgatcctggatcgtcacaattttgctatcatgaccaagtacatatcgaaacccgagaacttaaaactaatgatgaacttgctcagagacaagtctcccaacatacagtttgaggcctttcatgtttttaaagtctttgtggcaagcccccacaaaacgcaacccatcgtggaaatcctgctcaagaaccagcccaaactgatcgagttcctctctagcttccagaaggagcgcaccgatgacgaacagtttgccgacgagaagaactatttgattaaacaaattcgggatctcaaaaaaacggccccgtag

SEQ ID NO: 181141 - DNA, 1014 bp, synthetic construct
  misc_feature 1..1014: note = Description of Artificial Sequence: Synthetic coding sequence
  source 1..1014: mol_type = other DNA
atgaagaagatgcccctgttcagcaagagccacaagaaccccgccgagatcgtcaaaatcctcaaggataacctggctatcctagagaagcaggacaaaaaaacagacaaggcgtctgaagaggtatcgaagtccctccaggctatgaaggaaattctatgtggcacaaatgagaaagaacctccaactgaggctgtggctcagctggctcaggagctttattcctcaggcctcctggtgaccttaatcgctgatctccagctcattgactttgaggggaagaaagacgtgacccagatctttaataacatactcaggaggcaaattggaactagaagccccaccgtcgaatatattagcgctcacccacacattttattcatgctgctcaaaggctatgaagctccacagatcgccctgcgttgcggcattatgctccgagagtgtattcggcacgaaccgttagctaaaatcatcctgttctctaaccagttcagggacttcttcaaatacgtcgagctctcaacattcgacatcgcctccgacgccttcgcaacatttaaggacctccttacgcggcacaaggtgctggtggctgattttttagagcagaactatgatactattttcgaggactatgagaaacttctgcaaagtgagaattacgtcactaagcggcagtctctgaaactactcggagagctcatcctggaccgacataatttcgccatcatgacaaaatacatctcaaagccagaaaacctcaaactcatgatgaatctgcttcgtgataagtcccccaatattcaatttgaggcttttcacgtatttaaggtcttcgttgcatctcctcacaagactcagcccatcgttgagattcttcttaaaaaccaaccgaaattgatcgagttcctgtcttcctttcagaaggaacggactgacgatgaacagttcgcagacgagaagaactacctcatcaagcagatccgagacctaaagaagactgcgccctag

SEQ ID NO: 181142 - DNA, 387 bp, synthetic construct
  misc_feature 1..387: note = Description of Artificial Sequence: Synthetic coding sequence
  source 1..387: mol_type = other DNA
atgaagaagatgcccctgttcagcaagagccacaagaaccccgccgagatcgtcaaaatccttaaagacaatctggccatcctcgagaaacaggacaaaaagaccgataaggcctccgaagaggtttcgaagtccctccaagcaatgaaagagattttgtgtggcaccaatgagaaagagccgccgactgaggccgtggcccagctggcccaggagctgtactctagcggtctgttagtcacactcatcgccgacctgcagttaattgattttgaagggaagaaggatgtcacccagatcttcaataatattctgcgacggcagattggtactcggagtcctacagtggagtacatttccgctcacccacatatcctttttatgtag

SEQ ID NO: 181143 - DNA, 567 bp, synthetic construct
  misc_feature 1..567: note = Description of Artificial Sequence: Synthetic coding sequence
  source 1..567: mol_type = other DNA
atgaagaagatgcccctgttcagcaagagccacaagaaccccgccgaaatcgtcaaaatcttgaaagataatctggccatacttgaaaagcaagacaagaagaccgataaagcctctgaagaagtctcaaagtccctgcaggcgatgaaagagatcctgtgcggcactaatgagaaggagcccccgactgaggccgtagctcagcttgcccaggaattgtactcaagcgggttgttggttaccctgattgctgacctacaacttatcgactttgagggcaagaaagacgtgacccagatatttaacaacatcctccgcaggcagattggcacgagaagccccactgttgagtacatctccgcgcacccccacattctgttcatgcttctgaaggggtacgaggcgccacaaatagctttgaggtgtggcattatgctgcgagaatgtatcaggcacgagccgctggcgaagatcatcctgttcagcaaccagttccgggattttttcaagtacgttgaactgtccacattcgacattgcatctgacgcattcgctacttttaaatag

SEQ ID NO: 181144 - DNA, 828 bp, synthetic construct
  misc_feature 1..828: note = Description of Artificial Sequence: Synthetic coding sequence
  source 1..828: mol_type = other DNA
atgaccaccgagcaggcccggggccagcagggccccaacctggccattggtaggcagaagcctcccgcaggcgttgtgactcctaaaagtgacgcagaggaacctcccttgacgcggaaacggagcaagaaggaacgggggttgaggggcagccgcaaaagaacaggatcctctggtgaacagaccggacccgaggcccccggctccagcaataatcctccaagtaccggggaaggtcccgctggggctcctccagcctcacctggacctgcgagtagcagacagagtcacagacaccgcccggattctctgcacgatgccgcccagcggacctatggacccttgcttaaccgtgtttttggtaaggaccgtgaactaggccctgaggagctcgacgagttgcaagcggccttcgaggagttcgacactgaccgcgacggatatatatcccatcgcgaactcggtgactgtatgcggaccttgggctacatgccgacggagatggaactgctagaagtcagccagcatatcaaaatgcgtatgggcggaagggttgactttgaggagtttgtggagctgattgggcccaagctgcgcgaagaaaccgcacacatgctgggtgtgagagagcttcgcatcgctttccgagaattcgacagagatcgggacgggcgcattactgttgcagagcttagggaggctgtccccgcactactgggggagcccctggcaggcccagaactggacgagatgttgcgggaagtagacctcaacggtgacggtacagtcgactttgatgaattcgtcatgatgctctcacgccattag

SEQ ID NO: 181145 - DNA, 513 bp, synthetic construct
  misc_feature 1..513: note = Description of Artificial Sequence: Synthetic coding sequence
  source 1..513: mol_type = other DNA
atgaccgagccctggctggccctgggcaccagctggaccctgcccctacaggaccgcgaactgggacctgaggagctcgatgaactgcaggccgccttcgaggagtttgacaccgatcgggacgggtatatctctcaccgcgaactgggtgattgtatgcgcactctcgggtacatgccaactgagatggaactgctcgaggtgtcccagcacatcaagatgcgaatgggtggccgagtcgactttgaggagttcgtggaactcatcgggccgaagctccgtgaagagaccgctcacatgctcggtgtccgagaactgaggatcgcctttcgcgagttcgatcgggaccgcgatggacggatcacagtagccgagcttagagaggctgtgcctgcgctgttaggcgagcccttggccggtccagaactggacgagatgttacgcgaggttgacctgaacggtgatggtacggtcgacttcgacgagttcgtcatgatgttgagcaggcactag

SEQ ID NO: 181146 - DNA, 522 bp, synthetic construct
  misc_feature 1..522: note = Description of Artificial Sequence: Synthetic coding sequence
  source 1..522: mol_type = other DNA
atgcagttccccatgggccccgcctgcatcttcctgcggaagggcatagctgagaagcaacgggagagaccgctcggtcaagacgaaattgaggaactgcgcgaggcctttctcgaatttgataaagacagggacggcttcataagttgcaaggatttgggaaatcttatgagaacgatgggctatatgcccactgagatggagctcattgagctcggccaacagatccggatgaatcttggtggacgggtggatttcgacgatttcgtggaattaatgaccccaaaactgctggcagagaccgccggaatgataggtgtgcaggagatgagggacgctttcaaagagttcgatactaacggagatggcgaaatcaccctggtggagctgcaacaggccatgcagcgattgcttggtgagcgattgacaccccgagaaatctcagaggtcgtcagagaagcagatgtgaatggggatggcaccgtcgactttgaggaatttgtcaagatgatgtcccgatag

SEQ ID NO: 181147 - DNA, 846 bp, synthetic construct
  misc_feature 1..846: note = Description of Artificial Sequence: Synthetic coding sequence
  source 1..846: mol_type = other DNA
atggagaagagcaccgacaccgacgaggacaacgtgacccggaccgagtacagcgataaaactacacagtttcctagtgtgtatgcggttcccggcacagagcagactgaggctgtcggaggactgtcatctaagccagctaccccgaagacaaccaccccaccttctagtcccccacccacggcagtgagtccagaatttgcatacgtacccgcagatcccgcccaactggccgcccagatgcttgccatggcaacttctgagaggggccaacctcccccatgctctaatatgtggaccttgtactgtttgaccgataaaaatcaacagggccacccttctccacctccggcccccggcccctttccacaagccaccctgtacctgcctaaccccaaagatcctcagtttcaacaacaccccccgaaggttacttttcccacgtatgtgatgggcgataccaagaagacttcagctcctccattcattctagtgggctctaatgtacaggaggcacaaggctggaaacctctgcctgggcatgccgtggtgtcgcagagcgacgtccttagatacgtggccatgcaagtgcctattgcagtaccagccgatgaaaagtaccagaagcatactctgagcccacagaatgccaacccgccaagtggccaggatgtgccacggcccaagtcgcccgtcttcctgagtgtagcttttcccgtggaggatgtcgcaaagaagagttcggggtcaggggacaaatgtgccccctttgggagctatggtatcgctggggaggtgactgtgactactgcacataagcgccggaaggctgaaacagagaactag

SEQ ID NO: 181148 - DNA, 1188 bp, synthetic construct
  misc_feature 1..1188: note = Description of Artificial Sequence: Synthetic coding sequence
  source 1..1188: mol_type = other DNA
atggagaagagcaccgacaccgacgaggacaacgtgacccggaccgaatattctgataagaccacccagttcccatcagtttatgccgttccgggtacagagcagactgaggcagtgggtggtctgagctcaaagcccgctacaccaaaaactaccacccccccgagttccccgccaccaactgcagtttcccctgaatttgcctacgtccccgccgatcctgcccagctggccgcccagatgctgggtaaagtgagttccattcattctgaccagagcgacgtgcttatggtggacgtagccacctccatgcccgtcgtgattaaggaagtcccctcctcagaagctgccgaagacgtgatggtggccgcccctctcgtctgttcaggcaaggttttggaagttcaggtagtaaaccagacatcagttcacgtcgacctgggctcacagccaaaggagaacgaggcagaaccttctactgcaagctccgtcccactgcaggacgagcaggagccacctgcatatgatcaggccccagaagttacactgcaagctgatatcgaggttatgtcaaccgtccacattagcagcgtgtacaacgacgtccctgttacagaaggagtggtatacatcgaacagctgcccgagcaaatcgttatcccatttactgatcaggttgcgtgcctcaaggagaatgaacagagcaaggagaacgaacagtccccgagggtttcacctaagtcggtggtagaaaagacaacatctggaatgtctaagaaaagtgtggagtcagtgaagcttgcccaactcgaggagaatgctaaatatagcagcgtgtacatggaagctgaggcaacagcacttttatctgataccagtcttaaaggacaaccagaagtgcccgctcagctgctcgacgcagagggggccatcaaaatcgggagtgagaaatcgctgcacctcgaggtcgagattactagtatcgtcagcgataacaccggtcaggaggaatctggagagaactcagttccacaggaaatggagggcaagcctgttctcagcggggaggcagctgaagctgtgcattcaggtacttcagtgaagagcagcagtggcccctttccgcccgcaccagagggcttaacagctccggaaatagaacctgagggagagagcactgccgagtag

SEQ ID NO: 181149 - DNA, 1140 bp, synthetic construct
  misc_feature 1..1140: note = Description of Artificial Sequence: Synthetic coding sequence
  source 1..1140: mol_type = other DNA
atgatcagcagcaagccccggctggtggtgccctacggcctgaagaccctgctcgaaggcatctctcgagcagtgctgaaaacaaatccctcaaatatcaatcagttcgctgccgcttatttccaggagcttactatgtacaggggtaatactacaatggacataaaagacctggtaaaacagtttcaccagattaaagtggagaagtggtccgaagggactacacctcagaaaaagttggagtgtctaaaggagcctgggaagacctcggtagaatcaaaagtgccaacacagatggagaaaagtaccgatactgacgaagacaacgtaacacgcactgagtactcagataaaaccacgcagttcccaagcgtttacgccgtccccggcaccgaacagaccgaagctgttggtggactctcttcaaaacccgccaccccaaaaacaaccacgcctccatccagtccccccccgactgcagtctcacctgaatttgcctacgttcccgctgaccctgctcagctcgctgcccaaatgcttgccatggcaacgagtgagcggggacagccgcctccctgctctaacatgtggactctctactgcttaactgataagaaccaacagggccatccaagtcctccccccgcccccggacctttcccccaggccaccctttatcttcccaatcctaaagaccctcagtttcagcagcacccccccaaagtgacgttcccaacctatgtgatgggcgatacaaagaagactagcgcccccccctttatcttagtcggaagcaatgttcaggaggcccaggggtggaagcctctgccgggacatgctgttgtcagccagagcgatgtcttgcgctatgttgctatgcaggtgcccattgctgttcccgccgacgaaaaataccaaaagcacacactctctcctcagaacgccaatcctccaagtggccaagacgtccctcggcccaagtcacccgtattcctgagtgtggctttcccagtggaggacgttgcaaagaagtccagcggcagtggcgacaaatgcgcccctttcggctcatacggtatcgcaggagaagtcaccgtaactactgcccacaagaggcgtaaagcagagacagaaaattag

SEQ ID NO: 181150 - DNA, 1140 bp, synthetic construct
  misc_feature 1..1140: note = Description of Artificial Sequence: Synthetic coding sequence
  source 1..1140: mol_type = other DNA
atgatcagcagcaagccccggctggtggtgccctacggcctgaagaccctcctggaagggatttcccgggcagtactcaagaccaacccttcaaatatcaatcaattcgcggctgcttatttccaagaactcacgatgtaccgcggcaatactaccatggatatcaaagatctagtgaaacagttccaccaaataaaagtggagaaatggagcgaggggacaacgccccagaaaaaacttgaatgcctgaaagaacctgggaaaacttctgtggaatccaaggtgccgacacaaatggaaaagagtaccgatacagatgaggacaacgtgacaaggactgagtacagcgataagacgacacaattcccgtcggtgtacgctgtgccaggcacagaacagaccgaggcagtaggcggcctgagcagcaagcccgccacgccaaaaacaacaacaccaccgtccagtcctcccccgactgccgtctctccagaatttgcctacgtgccagccgaccccgctcaacttgctgctcaaatgctggcgatggcaacttcagagcgaggacaacctcccccttgtagcaatatgtggacactgtactgcttgaccgataaaaaccagcagggacaccccagtcctcccccggcccctgggccctttccacaggctacgctgtacctcccgaaccccaaagacccacagtttcagcaacatccgcctaaagtaacgttcccgacttatgttatgggcgacacaaaaaagacctccgcacctcctttcattttggtggggtctaacgtccaagaagcacaaggctggaaaccactgcccgggcacgctgtagtgtcccagagtgacgtcctgcgctacgtagccatgcaggtgcccattgctgtccctgcggacgagaagtatcaaaaacacacactaagcccgcaaaacgcaaatcctccttccggccaggacgtgcccagaccaaagagtcctgtctttctctccgtcgcctttccagtcgaagacgtggctaaaaagagcagcggctccggagataagtgtgcacccttcggctcctacggcatagccggcgaagtgactgtcactacagcacacaagagaaggaaggcagagactgagaactag

SEQ ID NO: 181151 - DNA, 666 bp, synthetic construct
  misc_feature 1..666: note = Description of Artificial Sequence: Synthetic coding sequence
  source 1..666: mol_type = other DNA
atgatcagcagcaagccccggctggtggtgccctacggcctgaagacccttttggaagggattagccgggccgttctgaagaccaatccatcgaatatcaatcagttcgccgcagcctacttccaggagctgactatgtaccgagggaacacgacaatggacatcaaggatctagttaagcagttccaccagatcaaggtggagaagtggtccgaaggcaccacaccacaaaagaaactggagtgtttgaaagaacccgggaaaacaagtgtggaaagtaaagttcctacccagatggagaagtcaacggataccgacgaagacaacgtgacgcggaccgagtacagcgacaaaaccacgcaattcccaagcgtgtacgccgtaccagggacagagcagacggaagcagtgggggggttatcaagcaagcctgccaccccaaaaacaacaacccccccctcctcccctcccccaacagctgtgagccctgaattcgcctacgtccctgccgatcctgcccagctcgcagcccagatgctggaggacgtcgcaaaaaaaagcagtgggtccggcgataagtgcgccccctttggctcctacggtatcgccggtgaggttaccgtcacgacagcccataagcggcgcaaagccgagaccgagaactag

SEQ ID NO: 181152 - DNA, 1482 bp, synthetic construct
  misc_feature 1..1482: note = Description of Artificial Sequence: Synthetic coding sequence
  source 1..1482: mol_type = other DNA
atgatcagcagcaagccccggctggtggtgccctacggcctgaagactctgctggagggcatctcacgggccgtgctaaagaccaacccttccaatattaaccaattcgcagctgcctatttccaagaactcacgatgtaccggggaaacaccacaatggacattaaagaccttgtaaaacagtttcatcagatcaaagtagaaaaatggtcggaggggaccactccgcagaaaaaactcgaatgtctcaaggaaccaggcaagaccagcgttgaatcaaaggtgcctactcagatggagaaatcaaccgacactgacgaagataatgtcaccagaacggaatattcagacaagactacacagtttcccagtgtgtatgctgttcccggcacagaacagaccgaagctgtgggaggactgtcttccaagcccgcaacacccaagacaaccacacccccatcttccccccctcccacggctgtgtctcctgaattcgcatacgtgccagccgaccctgcacagctcgccgctcagatgctggggaaagtctctagcattcactctgatcagtctgacgtgctcatggtggacgtcgctaccagcatgcccgttgttatcaaagaggtgcccagctccgaagccgctgaggatgttatggtagccgccccacttgtatgttctgggaaggtgctggaggtgcaggtggtgaaccagacctccgtgcatgttgacctgggatctcagccaaaagagaatgaggccgaaccctcgactgccagttcggtgcccttgcaggatgaacaggagcccccagcctacgatcaggctcccgaagtgacactccaagcggatatcgaagtgatgtccactgtgcacatcagctctgtgtataatgacgtgcctgttacagagggagtcgtctacatagaacagttacccgagcagatcgtgattccttttacagaccaggtggcttgtctcaaagagaatgagcaatcgaaggagaacgagcagtctcctcgggtgtcgcccaagtctgtcgttgagaagaccacttccggcatgagtaaaaagtctgtcgaatctgtcaaactggcccagcttgaggaaaatgctaaatacagttccgtgtatatggaagccgaggcgacagccttgctcagcgatacctcgttgaaggggcaaccggaagtgccagctcagctgttggacgccgaaggcgccatcaaaattgggtctgagaaatctctccatttggaggtagagattacaagtattgtctctgacaacacgggtcaggaggagagtggcgaaaatagtgttccacaagagatggaaggaaagcccgttctgagcggcgaggccgcagaggcagtgcattcagggacctcggtgaaatctagtagtggcccattccctccggccccagaaggtttaaccgcaccagaaatcgagccggagggtgagtcaactgccgaatag

SEQ ID NO: 181153 - DNA, 1428 bp, synthetic construct
  misc_feature 1..1428: note = Description of Artificial Sequence: Synthetic coding sequence
  source 1..1428: mol_type = other DNA
atgatcagcagcaagccccggctggtggtgccctacggcctgaagactctccttgagggaatctcacgggcagttctgaagacaaacccctcgaatattaatcagttcgctgcagcatacttccaggagttaactatgtacagagtagagaagtggagcgaaggcaccacacctcagaaaaagctcgaatgtctgaaagaacctggcaaaacaagcgttgagtcaaaggtacctactcagatggaaaagtcaactgacacagacgaggacaacgtcactaggaccgaatatagcgacaagacaacacaatttccctctgtctacgccgtccctggaactgagcagaccgaggccgttgggggcctgtccagcaaacctgccactcccaagaccactacccctccttcctctccccctccaacggcggtgtccccagaatttgcttatgtcccagccgatccagcccaactggccgcccagatgctgggtaaggtatccagtatccacagcgatcaatctgatgtcctgatggtcgacgtggcaacaagcatgcctgtcgtgattaaggaggtcccatcaagtgaggctgcagaggatgtgatggtggctgccccattagtatgttccggtaaggttcttgaggtgcaagtcgtgaaccaaactagtgtccatgtagacttgggatcccaacccaaggaaaatgaggctgagcctagcacggcttcgagtgttcccctccaggacgaacaggagcctcccgcctacgatcaggcacccgaggttacacttcaggccgatatcgaagtcatgtccacagtgcacatcagctccgtgtataacgacgtcccggtgactgagggcgttgtatacatagaacagttgcccgaacagatcgtaataccgttcaccgatcaggtcgcgtgcctgaaagaaaacgagcagtccaaggagaacgaacagtctcctagagtatccccaaagtccgttgtggagaaaacaacctcaggcatgtccaaaaaatccgtagaaagcgtgaaactggcacagctggaggaaaatgccaagtatagttcggtgtacatggaggccgaggctactgctctactgagcgatacctccctgaaagggcagcctgaggtccctgcacagctgcttgatgcggaaggcgccatcaagattggtagcgagaagagtctccatctggaggtagaaatcacgtcaatagtgagcgacaacacaggtcaggaagagagcggcgaaaatagcgtgccccaggagatggaagggaagccagtgttaagcggtgaagctgccgaagctgttcacagcgggactagtgttaagagcagttctggcccctttccccctgcccccgagggacttacagcacccgaaatcgagcctgagggtgaatctacagcagagtag

SEQ ID NO: 181154 - DNA, 1452 bp, synthetic construct
  misc_feature 1..1452: note = Description of Artificial Sequence: Synthetic coding sequence
  source 1..1452: mol_type = other DNA
atgagcttcagcgacagcagcgccaccttcctgctgaacgagggcagcgctgattcgtacacatcccggccctcgcttgactcagatgtgagcctggaggaggaccgtgagtctgctcgcagggaagtcgagtcacaggcacaacagcaactggagagggccaagcacaagcccgtcgccttcgccgtccgaaccaacgtcagttattgcggtgtgctagacgaggagtgccctgtccaggggagcggcgttaactttgaggccaaggacttcctgcacattaaggaaaaatattcaaacgattggtggatagggcgcctggtgaaggagggaggggatattgcttttataccgtcaccgcagcgtctggagtccatcagactaaagcaggaacaaaaagcccgtaggtccggcaacccctcctctctctcagatatcgggaacagacgttctcccccccctagcttggccaaacaaaagcaaaagcaagcagaacatgttcccccttatgacgtcgtgcccagcatgcgccctgtggtgctggtcgggccgtccttgaaaggctatgaggtgaccgacatgatgcagaaagccctgtttgactttcttaagcaccgttttgacggtaggatctccatcaccagagtcactgctgacctgtcccttgctaagcgctccgtactgaacaatccaggcaagcgaactatcattgagcgtagctcagctcgatccagtattgcagaagtccagagtgagattgagaggatctttgagcttgccaaaagcctgcagctggtagtcctggacgccgatacgatcaatcatcccgcccagctggccaaaacctcgctagccccaataatagtttttgtgaaggtctcttcccccaaggtgctgcagcgtctgatccgctccagggggaagtcccagatgaagcacctgacggtccagatgatggcctacgataagctggtccaatgcccgcccgaaagcttcgatgtgattcttgacgaaaaccagctggaagatgcctgcgaacacttggccgaatacttggaggtttactggcgggccacgcatcatccggcccccggccccggcctgctcggccccccaagcgcaatcccaggactgcaaaatcaacagctcctgggcgagaggggggaagagcactcccccttggagagggactctcttatgccttctgacgaggctagtgagagctcacgacaggcctggacaggatcgagtcagcgcagttcccgacatcttgaagaagattacgcagatgcctaccaagacttataccagcctcaccggcaacatacctcaggtttgccctccgctaacggtcacgacccacaggaccgactgctggcacaagattcagaacataaccattctgatagaaactggcagcggaatcggccatggcccaaagactcctactag
